United States Patent Application Publication US 2009/0018031 A1 - sequence listing, part 10

SEQ ID NO: 4961 - DNA, 6000 bp, Homo sapiens
ttgcctagtaatgtagtgtcatagtgcaacacattactcacatgtttgtggtgatgctggtgtaaacaaatcgaccatgctgccagtcttataaacgcatagcatctaaattacagtgcataatacttgataataaacaactatgttactgctttatatatttactgcactatattgttaatttttttttttttttttgagatggagtctagctctgtcgccaggctggagtgcagtggcgcaattttggcgcactgtaacctccatctcctgggttcaagtgattctcctgcctcagcctccagagtagctgggactacagatgcgcaccaccacgccaagctaatttttgtatttttttgtagagacggggtttcaccatgttggccaggatggtctccattacttgaccttgtgatctgcccatcttggcctcccaaagcgctgggattacaggcgtgagccaccgcccccagcctgttgttatttgagagagtatctctccttacagaaaaagtaaaacagcctcaggcaggtccaggtccttcaggaagtggtcccgaagaaggagatcttttaggagatgacagctccatgtgtcattggagacaggatatgcaggcgcaagacagtgacattgatgatcctgacccagggcagctgtgcaggctttaggctaatgtagtgtgtatttgtgtccacagtactgtgtatagtaatgtcagtaatgtcctgttcagtgtgtgttctgtgcagtgtactcacttgcccctctcactcactcactcactcactcactcactcactcactcactcacttacccacccagccatccagagcagcttccagtcctgcaagctatattcatggtaatagaggtgcatcaattttaaaatcttttgtaccatacttttactgtgtagtttttctgtgtctaactgtgcgtagatacacacatgcttactgcagcattccagttgcctgcagtattcaggacagtcttgtgctggacaggtgtgtagcctaggggcaataggctgtaccgtagagcctggatgtgtaggaggccacaccatctcggtttgtgtaagtgcactgtgatggttgcacaaagatgagattgccttcgcatttctcagagctctttctttgttaaatgacacatgaaggtactgggttgaggagagggaaggtaggtaggaaatggagaccagtgtagacaactgtttctaggtctttgaccgtgaagaggagacaagcgttagaattaggacagcaactgaaaggcatctttccctgttatcccctcatactctgttttatatggaatgccattgggaggaaaccccttcaggtccttttctcagcataagaatcacctggagtccaggccccatgctcagggattgtggattttaagcctagggcatccaggtaaacccaatgcagttgttctctaggcccacttagagaagtgctgtcctgggagctttgtggcgtaggacttgggcacctgttccttccccttccatgcgcatgtgcagggggcacccagtaccggtagaagggaaggccagcagcattgaaagcgaggctccctggccctctgcctctcctttcctgtccgggtctctgtggcttgcttccctcaggccacttctaactgtggtctcctctccgccccctggtcctgtagctcttctgtgttcttaattggagtcatcctctagcctttccctttccctgagagaaagcctcgccttttacagatatcactagccaatggcagtgcctctctgtttcttgccagtgccccgccagtcgccagtcgcaggatcgttgacatctgtcattaaactgtttccagctgctggccttgttctctcagctgttcttcaacactgaagccttgtttcgcctgcttccgggtttggagctcttccggaggcacaagggtttcagaaggttgactttttgccttgtcaaggtttatagaaggaaaggacagtgacatttaaagtagtgtggctccgaatgttaggaatcattttctgttacctaataacttcatcttagtggtgattgtctaaattgtatgatatgttgacagatttctcaaagcagtctctagtgatcattaaacagcctgagttgtatcctgaagaaacatgtatctgtccatatatggaacaaatatttgttccattccctttgtgtggaaactgcctgcatgcttcattcatcacagtaatgcatttcctcaggaacttttaatgtttcaggtgtctgttgtcatagctttggaatcgtgataacattatttgacttgcttagaattatagtctaatggatttactacacactaaaccttttagacaggccttgaaaggtgaatttggtaggcatttcacacttctgtgacactcagattttgctggtctcttggatacagtcacaagtgatatgtaagcaaaactgcaagctcaggcataacagcctgctgggctgagcacgattgcagaagtgaatgacttttcacgttacgcttaactcttttctctcgggtgctcagagcacaacttaaagcattctctctgagccaggggaatagcatcctggaatgtaagcccttgaagatggaggtctgtaaaagaaatattcagtgttaacttggaattcagtgaacttttttcatattaaaggaaatttgtcaagaaaaataattgcacagttaaattgtgctacagttgttttcattaagaaagtagaaagaagaccctaacagtttaaaaaacaaatggccctcattgtctttatattgtgcatataactctttgttatcttcagattatatgaaactattagtattatttttatattcttctcatctttttttcttttgccttgagaaagtcacgttcttctcattgtgtactttacatccaaaattattttgtaactcttttttttttttttttttttttttgagacggagtctcgctctttcgccaggctagagtacagtggcgcgatcttggctcactgcaacctccgcctcccgggttcaagcgattctcctgcctcagcctcctgagaagctgggattacaggagtatgccaccacacccagctaatttttgcatttttagtagagacggggtttcactatgttgtccaggatggtctcgatctcctgacctcgtgatccacccgccttggtctcccaaagtgctggattacaggcgtgagccactgcacttggccctctataactctaaatgttgctgcattttattattgcaatgactaataagtccctaaacttgatgcagttagatttccctgttattggatataggatatttacatttttgctcttgtgaatatactagagtactatactgaatgtgtgtgtatatgtgtgtcaccttttatatatttaagtatttccttagggtaaattcccagtagctggattattagagggtagaaatttttttatggtttttgatataaattgtcaaattatttcccaaaaagttgtatcagttcacagagctaccagttggtttctcgcagccatctgctatagttttgttgggttaaaaaactttctatttttgctagttcatcttatgttgctttaatttacattttccaataacgattaaacctaaactttttttgtataaatttgcttttttgagtatttcttcttgtggagggacagatacttatatataattattagattggctgctagtccaagagcagtaagtagttaagggatcaagtcagcaaccagtggccgtagccatctttgaccaatcaaagatatagattcatatcatcgtgaaagctttgattcagagaaaatagttatatatgtacctaatggtaggaaattggggtagttgtatttagtatatagaatattacctaattttttggttagaggttctagaagacaagactttttcagtttgtcttatgccctctttttttttgttgggggagaggtggggggtctggacactctaggaaattaaaactgagtattttacttattgcatgcatagaagttgattttcttttcttttctttctttttttttgagatggagtcctgctctgttgcccaggctggagtgcagtggcataatcttggctcagtgaaacctttgcctcccaggttcaagcagttctcctgcctcagcctccggagtagctgggactacaggcacccacgacgatgcctggctaatttttagtagagctggggtttctccatgttggctgggttggtctcaaactcctgacctcaggtgatctgcctgcctcagcctcccaaagtgctgagattccaggcgtgagccagcgctcctggcagaagttgattttcttaaaaaagagagataataggaaaacaagctcaaaaatctatttggggccttatgcaggatgttggccttagcctgaagaaataaaaactgatgaagcgcattgttagcagagggatgacttgatcaggtttttgaaaacgaatgttcagcattgaggtaactgaggcatctggatatgctggtctgggcccctgggagccgcaggagataatggagatagagattctatgggctgagaccattggtaggttttatggtgttgaggaatacttaacactgattttttttttgagcgctgttaattaaatgttaaaatataatcggtttgctttagagaaaggcacgaatggattctggggctctggtatggaagttattttcgcagtgtaggtgcaaggtgagggaaccagatagggaggggagatgggcgagggtctgtggagaggggctggagtgaaatggtttgagagccatcatgtttataaaagcaatagaaggtacggtggggtaatactttctatttaatgcatttttcattttatttctttataactaatataaggcacattttacatttcagatgaatttacaaccaattttctggattggactgatcagttcagtttgctgtgtgtttgctcaaacaggtaaaaacaaaaaattttcttagttgtcttttcatttccgtatcttgtattgcgctttgaccagttaggttcatatgagaacctaagtcataatcatgctgctccttctggaagccctgcaattgttcctcttactcagagaaaggtcaagttccttcatggtcaggctcccctcacccctgccacctgggatgatgggaggcaagttggctggtgaagtactaaaatgctagggattgaacacactgcaagaagatcttttgagaacatgagagtgtgtaagtgaacagaaggcaaaagcaagtatatttagaagcaaatgaaataaatgtgtagaatggaggattatgaactgtccattattatctgcaaagactttctagaagacattctcactctttgataaaaaagtctcacaaaatgttggcatcatctaggaaagcagtgaaaataaagctgaaaatgtatttaacccttctataaagatgtggctccacatctggaataatggatacgcagttctgtcctctgaatcttgaaaaactacactgcatagagcagttcgatatcaggattggaaggacttactacaagtagtaaaaatgaagcaggagaccgtaaaagaaagtattgataagttagttacataaaatcagtaataacaaaaacattctgtgtcagaacaccgtaaacaagatgagaaactaaacaaaggttccacttcattaatgtgtatagaaatccaataaaaactgaggaacataacaaaaaaatttgcaaaagacataacaaaattataaaagaaatggttagtaaaaatatgaaacaatgtaaaacctgaaattgataggcttcaccaatgaattgatattctaatttacacttatgaaatgagcaacagttttttaacattaaagcacttcggttggaaatgtggtaaaatggtattt

SEQ ID NO: 4962 - DNA, 6000 bp, Homo sapiens
tttcccattttgaggctcctagtgagttcctttagtcttgcagtctccagctgccatagacatttttgcctcttcccaccatcactggctccaaagcctatttgcctcctcctccgactgcctatgtgagccttcctccgtctgactgcctttgtgagcctttcagtttaggaaccccccaatccccctgccctcaaagcttttgaatatcctcacaatttccttctttgaaaacattttcactccttccctcaaccccaaccccatgtggtcttctcaggccttttgtggaaatgatgatgagagagggcagggtgatcagcagcattctagaatggggtctggccctcccgtgggcatgggcagtgctgacttgcttctacatgtatttcaagactccccagcttgagtgaaaacactctgagtggtacttctggaacatgtaatctctagaaaatgaacattaattgtgtagtgttctgtctatgaccaacggtttatggcaaatgagggtttcagtggaatggtatttataatgaatggcatcaaccctggttttcatttgttgtcttttctcacagagtggaacttaaataaaattaaaaagaatgaaacttactggcaatcatagggggaggatttttccttctgattcctccttcagtaagtgatttcaggaataaaaaaggtatgggatcttcctatgcccctggagacttagagtggtgggacattaaaaaactggtggtatccttcgtaagttaaacacacacacagacacacacacaaacaaaaaaaccgctgaggctgtagaatagtcttcagtgcttgtatatttgtagaccatctcaggaggagaggcctgagatgggtagctacttaaaatttttttgtgtgttatgtttatatattatatttaaaaaggataataatagtatcccttttattctttataaatgatctagaaacattgaaagtttcctcaccagttggtttataactcctcttgctcaatatgtcttttgattgagggcattgcctgttcacagtgcctttaattggtctgaggcttcacattcattaacggcttgggactagagtactttgacttgagtttcaaattttgcatgtatggggatatgtcaggccaatttctttcttccatcctttcccttatttctaaaaaggatttaaagctgtttgtgctcaatattttcttttttcagcagctttagacaaatatggatttgaaatgaggtggtcgccatgagttgagccacagattatggccatttcaactgaacatctcactgctgccctttagaacaaggtcttcttgcattgtggaacagaacaggatttggaatcctttgtgattgatagtttctaaccgcggagttcagacaaattaaaaagcaatccaaacccattttctttatcttaagaattccagctaccctaggaaaatgctcaaaatagaatttgtataagttgccacctctctgaaagagtagggtggcaactgaattctaattcggtgtccagaaccaatgatgccagtcaccacactgctgtttggagtgtgtgctattgggggcagcttctcaggggtcattgtctagaagtatctccctgggctgccatattgctttatatcaccagaggttcataaggccactttctggccaaagttattgtgacctacaatgacatgatatccatttcacacaacagcgacatctcttaggtgttggtgtttctccaagagatttacacatttgcatttgtactttttaaacaaacaggaagttgtagcacatttgccagccacatgtaaaaacaagatactttctctttttccatctagtgactacaaatagagagtggaatacattttttgtctttcctttttttttctttttttttgccctggtttggagaagtaaacattaaattgtgttggggtcgtcactaaaacaaggagatcagcatcatctccggtgattactgctcgtcatgggaagaaatcattctgattgttccactgactaatttagacaaggcaccatttgatgcctacttcacagcagtgccctcatcctgctgtctccttatcaacatagagatgactcactccatgtttttctcactcagagagaatttctctagtctactgattatggcagtgattaaataaaaaatgattcctgcagaggtgtgcttgaaaaaaatgattgtattatttgtgcttgttgaactttggataattcagcattcactattataatcagtaagatattggtttttaggctttttgggtaaagggtcaggaacccctttaaggtacatatgcacgtacacaatttccatgtataacacttctacatttttaggagatgacattcccctgcccagttaccatgcttagtcacacatcccatgctaaatgtgcttctggatagctctgtgtggcaggtaggtgcctgctgtaaaagatggcttttctgattagatctaggtgaaagactggggaagatagctatgttcaaggcagcctaacttcaataaaatttacaacttccagaattgtcccaacatggactcaaaagttggaaatagtctcttatatgagttgctaatccttttaatttaaaaaggaagcagaagcacctttacactttttgtttcctttctatttgagacagggtctcgcactgttgtcccggctggagtgcagtggtgcgattatggctcattgcagcctcgacctcccaggctcaaacagtcttcccaatcagccccgttagtaactgggactgcaggtgtgcgccaccatgcccagctaatttttgtatttttttgtacagacaggatttcaccatgttggctaggctggtcttgaactcctaggctcaagctgtgcacccacctctgcctcccaaagtgctgggattacaggtgtgagccaccacgcccagcccctttttgttttctaacagctaatttcattttccagcagatttcatgtttctggacattgtatttatttgttccctgaatttatcatatttatagcattttgtcttctgtggccagattgcaagctagctggccacaaaacaccagtgttttaaaagtttttaaagtagtggccagagttttaaaaatcagaaaatcttacataatttgatttctaactactcatgaaaaactagaatatctagcagtactgggctctattcttgcatgggacagtgggctggaatggaacagaggttgccccctcaggagggagtccaatttgctgtggtccccacatcacctgtttgctacctgtttgatcctctcaggcttttggttttgtcacccctgacttactgttcgtttaaaatcttatcctaaaaaatcaagagatctttaggttcaacaaaacaacctttttttttgttgaaatggagtctcactctgttgcccaggctggagtgcagtggtgtgatctcggctcactgcaacctccgcctcccaggttcaagcgattcttatgcttcagcctccccagtagctgggaccacaggttgcaccaccatgcccagctaatttttgtatttttagtagagatggggtttcgtcatgttggccaggctggtctcgaactggtctcaacctcaagctatccgcccacctcagcttcccaaggtgctgggattacaggtgtgagccaccacgcccagcctgatacctctctttttaaataaggaaactaaaatttaaatgatagggaaaaaaatgttgggacagtagggtgaaacaaatatttttttctttaaataaatttgtgtgttttatggctgggcctggtggctgatgcctgtaatcccagcactttgggaggccgaggtgggcggatcacctgagatgaggagttcaagaccagcctggccaacatagtgaaatcccgtctctactaaaaatacaaaaaaattagccaggcatggtggcgggcacccataatcccagctattcaggaggctgaggcaggagaattgcttgaacctgggaggcaaagtttgcagtgagccgagatggcgccattgcattgcactccagcctgggcagcaagagcaaaactacatctaaaaaaaaaaaagaaagaatggaatttgtgtgtttttaactaagaggaaggaaagaaagcaacaatgtaatttttaaaaagtattctttacaaatatcaagtcattatattagttttgaaacatataatgtcctttgtataatgtgatttactcacaaaaataccatgttgggaacatttatacaaatttactaattacatttgctcttaaatattttcattttatttttcaaatagaagtgaactactgaactcaaaggagttgaatgtttcttaggtttttttccttttaatagacaaaaatataaaactggacaacagaagtcaccagtgttttaatgaaacaaagaattagtttttgggtctggtaccttctaaagcatctgtagattttagaaaaggaatttcacaccaccaccaccaccaagaaagcccaaccaacctaaaacttgaataactgaacttaatccgagtcattcctattttatgagccatcatgatccacagtttctgtttcttctcatgtcgtcgtttcctttctgaaatcattcttgtagactgctgaagactaaatgctagcccagatggagactgaatttcaacctttttcatttttggcttcttggttttggggtgagagttcatcagactgttggtatacgtgacttgccaccaactctacagcaacctgctgtctctgagctttagttgtttctgagataaatgagatcatgtctgggccttcctcaagctctgacattctagaattccactattctgtcacatactgcacatactcagtgctgggtaaacctggagtactggccatgtaacaacttctgtggggttcaaagggcagagtctcagtagagatgggttcctaatgtcatcgtttatttctcatggctgccagtaataaacacgaaagaagaactaaatatagtgagttatgtactcaccagctcatggtattatcctgaacttgccgcactgagaggaaattctgtagctctgtttagtagatggtacagagtaaaccccaggcagagagttttcatcttcttgtcatcccgcagaatatttctgatgactagagctctcaggtctgtaagcctacccgtcttcaccggtgctcatgagacttggactaccctaatacttggattttacaatcctgggttatattgtttcttaatttttttttgtggtgggtccaaagccagttgaacaccatctcttggctctgatgagtcaaaattgtgaccaggacaaaaattaaatggcacagaggctttagcagagaaaacaaaacattttgtagaacatgctcagcacaggatggtgtaatggaggctgcagggggtgttttgctgtgggcctgtgttagcagtcattggctaagagcttataatggcacttagagcatggtacaaatgtatatacacacccacaaagtatagtgtactatatgtgcaatatactaaacctgttgtgcttgtattttatactaaatatattgttttaggaagttatttccaaaatagccaaaatacatcattagaatgattcagcactgctcaggttggcattaagtgggctgtgtgtgtaggagcaaaggagggaccagagttttgaaaactctggttttagaaaggatcttcttggctgaattctagactgtgttcctggttcctaagcctgataatactgtgtattttgcagctctttagattgcctcaaattcattgatttgtttattcatttattcaaccaacacatatggagtagctctaatatttacacagggccttttggcatgcggagtacattcatataccttatcccacctaagtgtgcttgtttca

SEQ ID NO: 4963 - DNA, 6000 bp, Homo sapiens
ttctagtcaaggagacgtgaaataaacacaataagtaaaacacactttattcaaagagaagtgtgtcaaaaaagaaaaagtagacagcagaacaagagtaccaggggtcgggtaagttgcagttttatattatgtagtcaaggtaagcctctgaaatggattgttgagcaaaagcttgaaggagttgaaggaaataaagaatgtggatatttaggggaaagagtattccaggtggaggcaacaccattgaaaagcctattaaagtgaggatatgcttactgtggtttgaggactagcaagaagatgaagtcagagaggtagcaggagccagattatccatggtcattttaaggactgcagattttactcttaaatgcaaagggggcaggggagcactgtagtgttttcagcaggggggtaacaaatctgacttttgtttttaaaggatcaaattattatgtgggttcaggaagtcaagggtggtagcagggtaggtgatgaaaagatgttagattgtgagtatattttgaagttaaagctggcggcatttcgtgattgataggaaggtgaagaagggttgagacaaactctagggttttcagtctgagtggagctgacatcactggggctgtatttggaggagatttagaggggaagattagggtacagtttgggacatgttcgttttggtgtgtctgtacgatatccaaatggagatattgaccggcaaattggatatatcagttctggagttcaggagagaggtctgggctagagatacaaattttgcagcaattggcatatagatcatatttgtggctatgagactggatgtaataattgctaaggaagggagatgtagagagagaagaggaccaaggactaagccctgggtgcagtagtaagagtttaggaagaacaggggagttcagttaagggctttgcgggggaggggaaagtatggtgttctgaatgccaagagaagaaagtgtatcatggaggatagagagattagctctgaatttttgctgatgggtcaagtaagatgagcactgaaaagtgactattggattaacctgaagtcattggtgaacttgacaacgattttggtataatggtggggcattcagaacctgaacagagctgctgtaagagagaatgggaaaagaggaattggagacggcaattatggacttgtgaggagcttggctgctaaagggagcaaagaaatggtgcagtagccagtgtggaaaatggaattaggagatttttctttcttttttttttaaatgtaagaaaaacattaactttatatgctgatggggttcagtggagattgcaaaactggcaatgcaggagaaaaaggagagaaatactgcatcgttttccttaagtagaaggaagggatatgatgtactgtacaagtataagaattgcttctaatacagtgactaatagcacaggcaaaggagctaaagctgaattcaaactgatgctttgccgcttactatgaccttggttaaatgattcagttcttcagcttctgttcccttaatagtgaagcaaggattatagtaccttgcagagctgttggggaatttcacgttgatataaagcacctagttcagtgtttggcacatagcaggtaagaggcagtattgttggtatagttatttatctccagttgcattctaaatttatgacaaattgagggtgcagcttcaggattagtgacactagagggtgctggcatgcagcattagtagggttagtaaacccctttgtgacaccaggtttctttatttttaagaagtattttccctggtataataatttcacaattatacaacatctcataatttttagaataaaggaatattacaaaatttcaggttattactacattataatagtgtatatcttagattagaaaatagcagagccttgttagaaattacaacattttatgtgtgtctaattagtatagttactagtaactatataaaacttcttttattttaaaaaatttgataaattgactaaaagatggtatgtgtcatttttctttccctcttgagcttttctgggttaacatctcagggtgggaacaaaatcaaatctttggaaaatcatagactgcttttatgaaccttaaatgatacttttacaataaactcagatttatataaccttttttgagcaaacatttcaaaaaacaatgcatttcttggttcctttataattttactggatgctcaataaataaattgttgaatgaagtaaggaatagtcttctgaagaggctgtctcctgtttttcaagaagatccatagagtttatctcgttcctgaaacctcagggtggataacagagcctggactgcccttcagtttcatgcacatattcagcacgttagcccaagttaacatatgtcctaatcatacacagcaatgcatatgtatgtacctgtagaattttagagcaggaggatatctatgaagaaccggaatatgtagataagaggtttcatggaggggaaggtacttgtgttggaatatgaagactgggtagaatttgctaaggggagtagaagtagatctatgtgagaagaaattataagaaaaatacagaggtggaagtgagtatgctgtgcttgtggattcttgaagagggataaggcttattggaatatagaatataatggaaagaaaagttgactagataaggtgagatggccatattacaggaagtatagaatattggagaaaatagtttagatttgatatgagagaaatagggtgtacaactgtaaattttagaatagaggagtgatatatgaacctgctttggaaagatttccttgatagctttttacaggataaattgaaaggaaggggagagaccaaaaaaaaaaaaggccaaccaggaggccattagtgctatcaaggtatgaggtgatggcatgggaatgaagcagaatggatagatacaagtcattttgaagaaaaatacatgcttaatattacctatgaagaattaaggagaaggaagagccagagataattgtaaaatttcaaagccacatgttagtaccattagcagaagttagagaatcagaaacaagtgttatatatgaggtggaagattatgagtgtactttagggcagtctgagtctgcaattccagaaacattcaagtggaaattattgtagttagcaaaagcctgaaacatgagtgagaaagaagactagcaatttggggtgggatgggaggtgggggcgagggtgttatcatcatcattggaatgctggttaaaagttctgagagcctaaagaagtcacagcagagtactaagactggagcttttggagaagttcacaaaggatgggaggagccagcatggaagatgaaagaggagaagcagcggtcagtgaagtaggatgctgtagtgtcaggaaaggtcagatgtggcagagagatcaaggagagtgaggcagataattggctgctgaatcggtttagaagttcattgcaggcctttgagagaaattttgtggggcaaaagtgagattgtattgtgttttggaggaagtgagggaagaactggaacatgtcttctttgaaaagtattgacattgaaaggatcgggaggtgagaagatgaaaagaatgagggacaaaagatgaagcaaacacttcaaaagagaataatagcaataacaataacttttaggttttatttagtgtttatgatgtgccaggcactatactatttgctttacctttattgtttaaactctatgacaaccccagggagtagacatcattgtagataaggacctttggagattgctgatggctggtgaaaggtggaggggttgggatgcaaaatgagaggagaaaaaacacctcaaaactggatgtggaaaggttgtgtcatagaagacaggatttgcttcaagggaaggcagcagaaaggatggcattggggccttgaagagaggagagaaatttggggactatccctaaagatcttttgggaattaaaatgtaaataaagaaataactgggcagtgccacagacctagttcaaatcagatatgctacattttgagtagtaccttgtgattatgaatcagaatctagatgtaatattgaaacaaatatgtggataaaatcaaagccaagagcttcaagaacattgaggaactaaaggatacctcaatatgctatggaaaatggatttggaaagggctgaattatgatggtgacagggtgaggatgaactaatctggagcaagtgaagcaaatcattcaggatggtgacctaagtccatggcagccagctataatagtttagtcttagtattttaaggaggttttcagattgttcaattagggggaagggaactaacatttactgagtatctaaggtgccatactttatatatacattattaagccctacaaatcacttacaagataagtattagctcctccattttccagatgagaaaaccgcggtcacatagtcagaaactggcaatgtttgactccagagcccatgttttttccatgtaatgctgaatagcataggttatatggccaaattgtactttttgtttttaacaataaatttgattttgaaaatttatataaatgatagcatgttttcaacatatgggtgcttattgtaaagaaagccaatccccttggcataatgaatactcatcctcaaagtgtctgaaatttggatttttgtctaaaggatttaattaaagacttttttttttctttgcattaacatccggttgtcctcatggaacctatgaattttgtggctgatattgcaggttggtaacattttattttctgttattttagattcattggttttcaattttcaactccttcatgatggtgatcttcttggtgggcttagtttcaatgattttaatgagaacattaagaaaagattatgctcggtacagtaaagaggaagaaatggatgatatggtgagtaaacatttacattatatttgtagaaacattttaactgagtgttaagttttaaatgttgggaggtaggtcataatttcttaccggaagtctttgagtttccacaattcaggatttttagagttaagaaagatgtaaaatgcccagtgtggtctgtaaccatgccctgtaatcaaataatattaattttttttcaggaaaacataagaacattcacccgaagtgggataaataaatagtgtaacctcttgttagttcaagccaagttttgccaccaagtaagaatatgtctaatactgttaaatactgcttaaaattcagggaatgggtagaaggattaatttatgttcagtttagtgggttcagaggaaagatttgttttctaagttcttttactaagttagagaacaaaaagtgtgttacatagagtgctagctaatggatattcggtataggtatactgtatcattaaataaatttaggaaatttgttttaagagacaggctggagtgtagtggtgcgatcatagctcactgtaacttcaaactcaagagctcaagtgatcgtgccacctcagcctcctgagtagctaggaatacaggaacaagcccccacccctggctatttttttatttattgtagagataatttcactatgctgcccaggctggtcttgagctcctggcctcaaacgatcttcctgccttggcctcccaaagtgctgttattataggtgtgagccaccgtgcctggcttgggaaatagtttcaaattttaaattttaatatactagggtatattgtgaagtatcagagggtggataaagcatttggtacctcttaactgtatctgattaggattctccccaccaaaacagattaccttgagggacttctattccttaggaaatattgttttagaaacaagctgtgttagaaactgtttaaggagcacttgcttactaaggttgcaaagtaaaaat

SEQ ID NO: 4964 - DNA, 6000 bp, Homo sapiens
ttaacttatgaaaatacacttacatcaagaaatgccagaaaattgctcacttcacgtgcttatgggtagattgaacctaattttgtggcattaaaaccaattttctgctgagcaacatgtcacagaggattacatgaacctttataattatcaataatatttgatactttgatgtcacctttcatcctgagatcagtcccatacacataggaacagataagctccaaggaaacagagatgatattaatacattaagtcacaatgcttttctgtcttcgatattccaagggcagtgtgtttctctcacctttagaagttagtggatgtaggccgggcgtggtggttcacgcctgtaatcccagcactttgggaggctgaggtgggtggatcacaaggttaggagtttgagaccagcctggccaacatactgaaatcccatctctactaaaaatacaaaaaaattagttggttgtggtggtgggtgcctgtaatcccagctacttaggaggttgagacaggagaattgcttgaacccaggaggcagaggttgcagtgagctgagatcatgccactgcactccagcccaggcgacagctcgagactctgtctcaaaaaaaagaagaaaaaaagaaaaaaaaaagttaatggatgtagttgtaaagcagtgatttttttaattattatttttattagctcctactacgggaagtcttaggctacagtatgggccacatctttctgttcacagctttccttggaagatcagcttttgacatatagattctcctactccctggcttctttgcctgctgatctcatcctgacataccagaagtgggctgtgtcttcatcgattctttgacttctacaagagactaacaaggcatcatcatcatcatcatcatcatcatcatcattatccttccaactacaacccccagtactgctgctgcttatgaagtaagcactctatgcactattctactattctaaaaactttatatatgtgtatataccacattaactaattccacaccaacattatagggtagtgctgtccagtagagcttgctgcaatgatggaaatgatctatatctgtgttgtccaatatggtagccaccagccacatgtagctattgagcacttgaaatatggttaatgctactgaggaactgcatttttcttttatttaattttaattaatttcattgacatagccacatggctagtgactattgtattggacaacacagttacagcctctgggggtttattgttacctttttaaaaacaaagctctgtattcatcagcagcacaaacttaataaggacaagtgtgagtgaatggttcagaaatacattattgaagctaaaaatacagatgatccttgacttccaatgaggcttatgctctgataaactcatcaaaagttgagaacatcataggttgaaaatgcatttaatacacttaaactaccaagcatcacagcctagcctagcctaccttaaacatgctcaaaacacttacattagccggcagttggggaaaattatctaacacaaagctattttatagtaaagtgttgactatctcatgaaacttattcaatactaacctgacagtgaaaaatagaatgattgtatggtccatagtcaaaatacagtttctactgaatgtatatggcttttgcaccatggtaaagtctaaaaatataagtagaagcatcataagttggagatcatctgtattttaaaaagaagtcccatattctacactgggagagcttttagttcacccttcccccaccctgttaaaatttgattcaaaagaattccgtggaatatatagggtaacatgaagtcatttctaaacaaagaacatttacaaaagatgtggatgatgtcttaaacctcattgtaatccaactatcccaagtaatcagcaccggtaagcactagtccctctattgaaaattgaaattccaattactgattttccaaaagaagacattctcctccacttacgaaatggaacaatgaaagaggattttctgtttggggtgaccggggagaaacggagtcttcacacaaagtcttagttcatattcagccctcctttccttgaaaccacatccccaggatttatctggcttgtttgtgaaaatatgggaaaacattttaagtcgaagaaactgatcagatgacttaattacatttctgcttagttcagcctgtaacttagactgttagagagagagaacttaagtagcccttggtttgaaccatctgtcgcgaaaatgtgacatatgtttgctttgtttactcaacaaccaagtgtaaactgatacactgaactagagtatccctgaatgatgtggctatgggtgtgtgtgtgttggaggaggggtgtctgatgagggcgtccgtctcctcatacttaccctggaggaacacgcgtacagcacaagagaagtgcggatccgtaggatgtcccccgggtttggggcgcgccccgaggcgcagaccctctttggcgactccacacaatatgcagcccgcctgcaagcagccgctgcagccgaggggcgcgcctggctgatgtgtggttgaatggagagcggcccaaccctcctccttcctcctcttcttctccccgccctgacacccgggcctcaaacttcaaccaaagcccgtgcccttttcaatttacccccctcgatcaaaatgagccattcttgtctgtcctccgcggcggcccattgtctggcgtgataggtttgcagatttgacagctgggcgcacgcagatttgattcaaactcggtctccccgagagatgaacttggacatcagcaaagatcccgagcactgccggctggctcctagaccggtctcccgacccagtgtagacttcggtgccccgggcgccccccggcgtgcgggaaggggagcgtgtgtcaggcgtggggggcggggggtgagcagcacgactgggaaccagcggtcccaggggttggggcgaagggctgtgtacatgttaggctttttttgttgttgttaatttactctcgaaacagccaaaatggaggtcagcttataaattttctaaagccaggtctggccgggtttaaatgcagtgggctgggggctccgcttttgtctccttgtcggagctccaggagagaggtagagactgcgtgtgcatgtgtgcgtgtgagtgtgagtgtgcacgcgctggcgtggacgaacggatgggcgcatcccaggatcgccgctccagcgtcctgggtctgagtgtgtcttgaaagcaccaagtcttgaatcacagccactagtgacgtgggggaaaactttgtgttccgaagaagggtctggctcgattgccctaagaagaaagagcccttgtgcccgtgtatgtgtgtgtgtgtgtctgtgtgtgtgtgtgagagagagagagagagagagagacagagagagagagagagagagagagtgtgtgtgtctggcagcacccgcggccggctgcagaacactgcgtgtcctgtgcgcgagtacgggtccggccgcgggtcccaccgcaagcgggcgtgtgcagctgcggctgcctggcgggcgagcttaggagggagctggagctgcggagcggcgggaacaggagcaggccgagggtcctctggccagaagaaatctggcctcggaacacgccattctccgcgccgcttccaataaccactaacatccctaacgagcatccgagccgagggctctgctcggaaatcgtcctggcccaactcggcccttcgagctctcgaagattaccgcatctatttttttttcttttttttcttttcctagcgcagataaagtgagcccggaaagggaaggagggggcggggacaccattgccctgaaagaataaataagtaaataaacaaactggctcctcgccgcagctggacgcggtcggttgagtccaggttggtggcatttggagtttttttcgttctgtttgggaacccattgccgcttcccgtccctcttccccactccttcttcccccctcctccggccacccctttctttttgctggcgtctcccaactttagggcccggggggcgctcgtggcgccgggctgcacctgccggggcacgccgggactgcgggccggcgcgctcgccctgggctggggtgcggaagcgcccgagtcctgggcaccgggcgagagtgtgagaggagcggacgcccaggagggagccgaggacgcgcggcgggtagggggtaggggcgcaggaaccgggtttcagccccagtcgggacatcggttccccctggcttggcggcctctggagggagacgagtcccggggagaaggagggcggcgactggggctagggattggcgatcggagtggggagggccggcggctgagcgagctcgctggctgacgcgaggagggggaggccaacttcccgggagaaggggctctttcggcgccagggctggctagggagctgccgccgccgccaccgagggctcggactccaggcagctgcaggctccgctcgcgacgctcggaaagtaccgtttatttatttatttgcttgcgttcagcgtctcgggttgaacccaacagacacccccttggactttaggaaccctcttcagacctctccagccctcacctccatccccgtgtcagcggcccctggaaaacacgcacatgcaccccgacctgggtgggggtgggtcctcaccccggtgttggaaattccccaaaggcgggaacgggggaggggagagggttctgtggggggagtctccggcgctctccgctctcatctcaaagcgcgccctcccttccaggttgggtcggacctgaacccctaaaagcggaaccgcctcccgccctcgccatcccggagctgagtcgccggcggcggtggctgctgccagacccggagtttcctctttcactggatggagctgaactttgggcggccagagcagcacagctgtccggggatcgctgcacgctgagctccctcggcaagacccagcggcggctcgggatttttttgggggggcggggaccagccccgcgccggcaccatgttcctggcgaccctgtacttcgcgctgccgctcttgggtaagtcgaggcccgccgcgggctttcttaccctctgagtctttcctagggtcgcttgcagcagcccaccccgccctccgcaccaaaattggggcgcgggtgtggtggatgtggaaggaagaagtgtctttttggggaatgggatcgcgaatccccgggttagggaggcggtggcggcgcggcgctgcctgaagcttttcgggcttggttttgatttcctgtggtttttaatgacccaacttggcgggggactaagaagccctccagcccagggccctgcacccccagagagtctctgggagctcgcggagccgcggcgggcaggtggagttggggagcattggggccgggagagcaaacttggaagagaaaagtttttcccgagtagcttctgggcactctccgcccggcggaccgctgaccatggctggcctgccccgcgcccagcgcgcgcccggtgcccagtccgccgccgcacttctcctcggaaagcgcctgagtttcagccgggcggagcgggtggctggagccgggggtggcccgggagcccgggtcgttgctcaggccaggatgccccggggcggagggccgacgtgcgcggtgggcagcgcaggctctggagcaaacccttgaagcccgcgggctgagcctgcgccactcttccttgcgggcccgggaggaggagagaggagctggaattccagggggcgggaaaatggactcccggatggtcgagaggtggacccgctcccagagcagggcgcccccgaaggctggtcaagcatccctgacccgggcgcgcgccctcgcccggagcaggggcggccggggtccccgcccgccgcactca

SEQ ID NO: 4965 - DNA, 6000 bp, Homo sapiens
ctctccagttgccttagaagtggtgagatgggaagctgcagttggaagaccctggaggatgcctgacaaggggatgtctgacacatgattggagctctttttgaaatgtttcttgcccttcctggagcagaggagccattatttatgcaggtaaaataagatgaactgttacttctcttgaatcatgtgagtatgagaagaatgcctcccaagaaatgagaggttgatttgacagactcagtcttgtcacattttgtggaagttaagcctgtgagttagagggcaaatcccagagcccagtgcgtggcagattgtgatcttcctcatcgtgcctgcaccgccgggggatctgcatggatcacctagacaggcactgataaggtagaacatggtaattcatcactaagtttgcagttttttctctttggttcttttaaaactgattttacagtcataaagtttggtgagggaaagactggatgggaatttcggagatgggaagagaggtgtaatctggttctgggacgtatagtaaaatgtgccatttggattttacaaagacacagaaactgtcttcaaaccttggcagttcataaaatccgattgcatattgttcaccacaatctttatttctctgagaataaaagattcagttaaggagatcctctctctggggcaaaacccaactcttctcatggcatttgccagggccatagcaaggtccccatctgcaccaagagtctgaaggtaaagataagtttcccgggagcggagcagaaggagctgtggaggaggcacagagatgggaactgggtcaagtagggagctcacaggcttatgtagttttggatccaggatgcttctgtcaccagagatgcaatttagcaggcatcggggtgtttgcaccatttgttagtggttagtcacaggtgttagtcacaggatgggcagttcgcaaataactgacttgggtgaaagtccttgtggatgtgtattacagagaatttccatagagaaaaggccagcccctgtattgggaatcgcattttgcaaagttgaactcactgattctgagcacagttgctgcctaccttttgccatctggaacacatggccccatccctctcaatactcttaagcagtcaccacatgtgaatcatcagtgagatattgcttcgaatgaaaacatcaacacaaaaatcagccccttccttaaatgaaatgcaacgggatttatttgcagatctttcagctgacagccaaaatcatggcctttgaataatagagttgggggactgggaatggggaacaacacatcatttcagaaggttcaggaaggctgggggtggaagagcattggacttgggaagcaggagatggagggaaggattatagaactaggtcctagtttctttgctgccagtgacttgctgtgtgacccaagggagtcacttccactctctgagctttagtttcctcatctttcaaacagaggttttagttgttgcctcctggttgccttcattgcaactcagaaagatattactaaaacacattggaagtagttaaatgttggtgacttacaagcaatgtagaaagtatgcattctttttaataaatgaaataatattggtcagggtttaactgctatgtctgagtcactgcactgtctaaatttagaggctcagtcagaaaaagtgagtaccagactgacaaaattcagatttcagtcattgatcataacatgtgccagcacctaataggttctaggttctctgatacctagggttgcagagctcctgcccccacagagctcacagacaccttgaaaaagcaaactttaaatgcacaagcccacagactatcaaacagcaatcaggtaaccacagaaatagagggaaaccgagagatgaagtagtcacccccatggggagggtccacagggcctagctccttaatgatgactaagcttatttagggttatatccctctgaacccaagtagggactacagacatctgctaccacacctggctaatttattttcactttcatttttaaaattttttgtagagatggggtctcaccatattgccaaggctgatctcaaactcctgagctcaatccaatcctcttgccctacccttccaaagtgctgggattacaggcatgaaccactacacctagtcaacaattcaaatttccatataggcacaaacaaagggcatggatacatagggagaggagcaattaacacgggagggagagaggtggaaatcagtgaaggttttataaggacatggcattttattgaagtcttgcaggattggtgtttcagcagatagaggaggcgagggacagggagggccatctaaccaggtcacaggcatgaaaatacatggggtgtgggataatggagagggagatgaggctggaaagatgttatgttgagatatgggctggataacacatgcgaagggcccagggtacaaaatgtaaggaaacactcattttcaggattgagcaagtgtagggttggtgcagaggctgtggcttttaagcagaggactgatttaaaaatttcccatataggggacttccacttatgggaagagatactttttcttattcttcctaagtacaactaaaatccatggacattatatataaaacaaacataagacttgaataggtggagagaagaaggaaggctagctagggaccttgggatcaaagtaatagcatggtagtgagttccctaagttttgctttttgtctcggattcctaaacttggagctgaagaagtgagcaacttggaaacaccaatgggttcagacaaaagagccccaccaagaaactggtttttctggccaaaagaccaggaaatgggcaactcaacaagacagaaaacttttagacaatagcttctgcattctaggcaaacaccatagaaaaagctatggccctatcccaactccaccagcgaagactgagtagagagcctagatgtctactgttaccaagctgtaaagaagtgtcccaaagcacccctccaccagggtggtgtcagagaaggctgaataaagagcagagactcacctctgacccctgtggtatcagtggagaccccttggggagtctggatttcttctctgactcaatagataatggggcaactttccacttaacttctggggtggcatcagaggaggcctggtgaaatttcatgacttttattatctcgcagtggtaataaggccacctccactgcagtgtcagtggagactaaaacagaaaggaattttcctgttgtcttcattataagaacctggtgagttcctggagatatgactcatgaatgtgtgcccccacccaacaaaacaaaacaaaacaaaattgggccctcaggagtttttaaatattccgctagtccctattcatcatccaggaagacatcagttaccatgtaagtgttcttaccagttgctggctctggcaatggcttctgctcctaagctgggattctctgtattcacctctctctttagttttgggggtggctgtttgccctgtgacttcaattttctggttgacttaagagttgttgattcagcttttattcagccactttattcagctttttacttgttgtgaggatgggaatgatgactcccaagcccttcacatgtttgtgcagaaaccagaagtcctgtgttcacttttacccatttttttttctttctgtattgcagtttggataatctcaactatcttcaagttcactgattcttctgtcaatcccaatctgctatgaaagcccttctagtgaatttttcatttcagttattgtagtttccaatgacataatttctatttggttattttgataatttttatctttattggtattttttatgatgagacattattctcatattttcctttagttttttggacatggattcctttgaacatatttaaaagactttaaaagtattttctagtagggccaatgtctgggcttcttccagaaacagtttttatttattgctcccccactcctttatgggccatactttcttataggcttttttgaaaactggacatttaaaataatataacatagcatctctgggaatcagactcttaactaaaacttttctctgagggaaacaaagcctgaaaaggggagattgagtattccatggcttaagagagtatttaggcatatctacttccattggtgctaaaatatatctggaagtggaatggaattcagaactccatgaaagagagctggtgtccagagcgttgatgtcacacagcgtgtgtcctgattggcacagaagttggaactagattgtggatatccattctgctagctctgctggaagactgcttctaaaagcaagctcttcaactttggatgttaatcattagaattttctttctcaaattaaaggtttgagaaattcgtgatgagatgtcctgttccctaaagtttactttgattgtaatttttttttactgttggctttcatccagccatgaggagttagaaggtggtaagtatgctttggcaatcagattgtttattcttctcccctgactcactttttcccagtttcagaaagttaaactaatttattatctcaaattggatttcttgggagaatttaagatttaggaggaaaaatgccagttgtcagaggaagaattgtaaagttcttttcctaaaacatgcatcatttacaaaatggatttgcatattctcagtattgttgggacagtaacatttggaaacagtcatttccacagaagagctttgagcctgatatccagtggggggtcatttctgactctgaaaatgagtatagctcaggaggcccaggtgctggggagtgacgccatcagctccactgcaggcctgcttgttatttccagccgcatatcacacctgtgaaagggaaagattcttcccactgtttgtccttctgatagccttctctctggactttgcatttccattccttttcattgacaaactgactttttttatttctttttttccatctctgggccagcttgggatcctaggccgccctgggaagacatttgtgttttacacacataaggatctgtgtttggggtttcttcttcctcccctgacattggcattgcttagtggttgtgtggggagggagaccacgtgggctcagtgcttgcttgcacttatctgcctaggtacatcgaagtcttttgacctccatacagtgattatgcctgtcatcgctggtggtatcctggcggccttgctcctgctgatagttgtcgtgctctgtctttacttcaaaatacacaacgcgctaaagtgagtcacaagttcaaaataaacaacgtactaaagtgagtcacatggggaaaaggggatagcacttcctcagtgggatacctgggcttcctgttggagcaaggtcattccttgctgctgtggccataccctgggtgaagtcaagaagaacaggcagctttgtaaaagcaaagacagctgagtgtagaatcttattttttttcttcctggctggggttggtagaatgttctcagctttggcctgtgagtgtcagcgctgcttggctgtcactggacctcactaagtttaccatcaggtgtttaattcagcaccttggccaagactccctctgtcctgggcactgtaggctgcagattctgtgggggaggctgcatgaacgagctctgccttgtgctcatgtggaggacgggctggattgatctcttcttgcctgaattgggagctctcaggatattcctccatttgtttctggaggccttggggaaaatgactggggctctagatctcagggacagctgaaccgtgtgaaaaacctggggaacagtggacaagggagggtaggtcagataagattgcattttggggagaagaccctttaagtaccagagagattggttgtcagatgcaa

SEQ ID NO: 4966 - DNA, 6000 bp, Homo sapiens
ggcaggcggatcacctgaggtcaggagttcgagaccagcctggccaaaatggtgaaaccctgtctctactaaaaatacaaaatttagctgggcatagtggcaggcacctgtaatcccagctactcagggggctgaggcaggagaatcacttgaacctgggaggcggaggttgcagtgagccgagactgcaccactgcacttcagcctgggcaacagagtgagactccgtctcaaaaaaaaaaaaaagtgataaggggttgtggagaccaaggttttatacagatgaagcctccagatagcaggcttcagagaaaagattgtaaatgtttcttattagacttagagagtctgttctattctatcagtctgttgatgttaatgctggtcggatgggactgaattccaaaagggatgaaggtatgatgaagtatgtctgacacccccattccatcatggcctgagctagtttttcaggttaactcttgaatgccctggctgagaggagaggttgaatcagatgatgaggaggatggtgggttagaattttatttgtggtttacaatgctaactcgaaggaaaggattgaggactttttcctggccctgtgaaggtcgttgtgtgtgggtgctgggagaactatcccaggaaactcagggtaactggcaaggtgatttgagattgctctggtccaaaagataacgatttcatttggggaaaccatttcctttggagagctggctgagataaggagctagtctgaagcctgggaaggcctcaacaatctggttaacccttcctcctccaggatacaattctttctttttttttctgagacggagtcttcctctgttgcccaggctggagtgtagtggcacagtcttggctcactgcaacctccacctcctgggttcaagcaattctcctgcctcagcctcccgagtagctgggactataggtgcatgccaccacgtgcagctaatttttgtgtttttagtagagatgggatttcatcatattggccaggctggtctagaactcctgacctcgtgatccgcctgcctcggcctcccaaagtgctgggattataggcgtgagccaccgcgctcggcccaagctacagttctttacgcctatgacttttgtcaggctcagaggcaatttaatgaggatgggatgtctagaaagggacagggtgggactcggatttccttggctcttctgaggaacttttaccttcaaaggggagtagaagccactgcagggtggaaggaaaacttccgcttccccctccgtgaatttgctgaaaagtcaacagacaaaagacgattaagagaaaaggcatacacattttctaatatgcctagaagaaaacacagtgattaccctaacccttcaatggagtacagaagcttatatagccttttatttctgagacagaggctcactctgtcgcccaggctggagggcagtggcatgagcttggctcactgaaatctctgcctcccaggttcaagtgattctcctgtctaagcctcctgagtagctgggattacaggcttgcaccaccacgcccagctaatgttcgtggttttaggagagagatggagtttcaccatgttggccagcctggtctggaactcctgacctcaagtgatccacccgcctcggcctcccaaagtgctgggattacaggcgtgagccaccgtgcctggccatatagcccttttttttttttctgaagctggtaaggagatggggaatatgctaattctgtaattctgcatgatttctcaggagaaagaagggatcagagaattgagattaacttgtaaatggctctctttggaaactgaataagcccgagagacagacaggcattttatccctctaggggtggtgacattcttcagtcttcttttctgcaatagagaatcagataacgggaaggggaagggaaaaaattgttcccccaggggcatccttctggtcttttggtctttcccctttggaggtggggcagtctcttccagtgtctgttgatctttaagggcctttcattcaaaatactctttacacaagggagccgtattttggggtgaattatgttggtttccttcacctccttgggaggtgggaaatgtgtcctgaaaggtcagggcctctctgagtggagatgaacaggtcagggttgagtaaggaggaggctggcaggggcctttatgatacctgagaggactggggcttggatggagcaagagaggcactgatggagtaagattcaggtacaagacttaagtcttgcatcctaggcacggctcttgcctcatcctcatcccagccctaataatgggaggctttttgccggtaaattcccattattaggagctgaaaatgtcaatgccttacaggcgccagtcagcagtgtcaagcagtgggctgggtggggcctgggctggctggagctcccctaccctgtctaaagggggcggtggctgctcagctccagcatatgcggggaaggcgctggctaagataaggagctagtgccatgatgaccacgttgccacaggatcaagtgggtcctgtgtggtgtcacctttaggtgcctgaaatctagattttattttatttattttattactatacatattttttgagacggaatttcgcttttgtggcccagactggagggcaatggcgcaatctcggctcaccacaacctctgcctcccgggttcaagcgattctcctgcctcagcctcccaagtagctgggattacaggcgtacaccaccatgctgagtagctgggattacaggcatgtgccaccatgcctggctaattttgtatttttagtagagatggggtttctccatgttggtcagtctggtctcgaactcccgaccagatgatccgtctgcctcagcctcccaaagtgctgggattacaggcgtgaggcaccggcctgaaatctagattttaaagtgaaatttcttaatttttttttaagggcaggcacaaatttataaaacatcaggtgggccaaataaaatgttacaggccacagttttagcttggtggttgctgatttactgaccctgttataatattggaggtcaggactttgggcaaatgaaagagaaaaggaggcagactgagaatgtgattttacaactccagcctctccaggggctgggtggccagtgtctcctcagcagccttctcccgcaggaagcagaactgtctgcaacgctgatggagtcacagtaaccttcaccccactgagctcaggatctgcagagccactaagaccctggagcaactgccttcagcatccaacagaagctgctaaaaggattatgggtcaattcattttagacatttcttccagatgttcccatggaaagctagggtctaaatcagtggtcctcattcctggcagcacctgagtttcacctggggaactgttagaaagtgaaacttggacggcattcacattagtccagtctctgggtggggcttggacatcagcatttgtagaagctccctaggtggctttggtgcagccaggttggaaaccactgatccaactaatagaaatgctaggttgggatctcttccgaggcatctctttaggacaggctgtgcatgacagtcccatagtgtcagggttctaagatgctccaatggtttaggcactggtcttaattttcgttttttcgctctctttgagaccttaacaaactctatagggctgggcacaatggctcacgtctataatcccagcatttttttctttttttctttttcttctttccttttcttttctcttctcttctctcttttcttttctttctttttttctgagactgtctcactctgtcgcccaggctggagtgcagtggcacaatcttggctcaccacaacctccacctcccaggttcaagcgattctcttgcctaagcctcccaagtagctgggactacaggctcttgccactatgcccagctaatttttgtatttttagtagagacagggtttcactatgttggccaggctggtctcgaactcctgaccacgtgatcctcccacctcagcctcccaaagtgctgggattacaggcgtgagccactgcgcctggccaattccagcagttttagaggtcaaggcaagaggatcccttgagtccaggagttcgagaccagcctgggcaacatggcaagacctcatttcaatttaagaaaaaaaccaaaacacccaagctctataaccttcacatcctcattgactgattaagtgcagataatgatatttgcccttctaacctcaccaggctgttatcaggagaaatgaagcaataaatgagaaattgctctgcaaactgtcaacgttatgtaaacattgctattcagagtgtgctcccaggtgcgggaggtacagctgttatctgttggagatcactcctgaagtaacattcctagtgccatgggtcagatgggaattggtacagacattccaacttagaaggcagcctttattgtcttataagcaggtgcgtttcctggggtggcagcctggcactggtcactccaaccccaacttgtgtaggaggtaccacagtaaatgagtagagagagttcaggggacttgaagggaagtggagggccatctggagagggagggaactaaggactccctgtgggttggggtcttcctgaggatccagggagtaactgtcaaggagccttagcagggatctaagagctatgcaagagcaaaaagaggcaaattattaaggaaattagtgaagtcagcactggaacaacagagaggggacacagcagtgcagcatgggccctggcctcaggaagctgtctgattggggcagataggaccagccccctagaagacagtcacccatatcagttaggcagtcatgactcagtgttacttatctgaggcccaggttgcatgaggggttgggggtgggatggacagagcactggctgggcatcaggactaggctggagtcctggctcaaaactctaccacaacctgacactgggcaagatggcccacctgtggcatcccaggttcctgccctgtaaagaggagtctgggtgtatatccagatggactgtgagcacagcctgagtttgccctgtcgaggtgctgaggcctgggagattggggtgagtagctgtggtccagggaaggttggcaagctgggccttagatgagaggggatgcttggtcaggcagaggtgagtggagaaggcagggcaaggaagggaatatgagcggcgaacaaatggagtggacatggtgggggcagaggatggtgggaagtggccttgttgcggccagagtggaggaagagataagtgggaaagagtggagtcgattacagaaggcctcggaaaccaggcagagatgtttaaattggctctctcaggaaggagagggccatgaagggatttagggaagggtcatgacatgattatgctgcattttagcaggattaatgtgacctggtgctcagaatgacttggatggcatgaggccaggagccgaggaggacagttagaagactcttgtaatatttctggcacagggagatggactgggagttgggaggtggcaataggtcaggcctagagacatttctcaggaaatattgacaggccttggggcctggttgcattcatggagtggggaggaatgagtcaccttgagaagcagtttccctctcaaaggccagggaagacaaagcagaggcagctttcctgcctgcaaacaggacatttcagggtaacctggctcttccaagcgtcagcttctccctggctccagctcagataggagttgtaacaacgggttgggcatgggtgatggcaccggctggtggctgggttaagggccatgtttttgattatgcattaggcttattcagcctgccaagtgccaggccctgcgcttgtgtaggagacagagcaattagc

SEQ ID NO: 4967 - DNA, 6000 bp, Homo sapiens
accggggttagcagtggagggagctggttggctggcgactgttgcctgctggctctgtctcctggagctgagcttactggtgggatgcccgctccgagaagcacccttcttctcttcttaggagactctggacccccttctccaggtttctctccctttagaggcacattttcctccaagccttcaagccccttctctttctccagatgtggatggtggggaagggtatcttgagaaagttgggctttaaatctctggagacctgaaaggaaacagccagggagcctttggtcagacaggtggtgcgatggcacagtgcccagcgaggggcagaggctgagaggagctgacgagcatctcctggagagtcctccttgcctgcctcctggatccctcgttcccaccctgctttgccctgctccttaccagagctcactaggggatcaggtggggacatcgtgtgtgccaaaggctcagacccctgtggtgttttcctgcagctgaagagcaagtgggatgagtccatcttcacgaaaggctgcatccaggcgctggaaagctggctcccgcggaacatttacattgtggctggcgtcttcatcgccatctcgctgttgcaggtgtgtcccaggagcctataggattggcaggtggccttttttcatttgagattgggcccttaacatagagtgcatgggtccagtttgggtatggtattaaggaagcttgcagaagaaaaaaagggattcaactggatgtccaaggctgagagagtgtatgcgtgtaagtgtattggggaggagaatggtggcttccataaacgctacctataggggggccctctgggcgggggcaggctgggaggggcttgtggccctgcacaggtcctggtggcagccctctccagagggcccaatgggctgcagaagggtcactgcctatctggaggtaggtcaggagtgtgctcggggtgggccatcaagtgctgcagatggggaggtgaaacccttggtcacctggggcctgagggtggcctgaggctcacgtgtgtgcacttgccccaggacctctcctcctgtctctggcccctgggctggagttgtcaggtatcttccctgtccatgagacatcctctgaggcctgctgccgtttgtggcatcctttcctctcccaggctgtgcttgttcatttgaaccaggttgcacatgtgggaggatgttggtggctgagcaggcagtgaggcctggggtgactgggctggttggtgactgctaggagaagaactggcagagaaagtcaagaattcagtgatcagagaaaccaggagtctttccagtgctgttcagggcttccaagaagccgcagcttctgggtccactgatgcatttcttgtgtggaaaataacaccatttagaaagtgtttgactctgtttttgccttgaagagggtgactgaggtagacccagggccaccagccacccacacatgccttcctccttcaaggaagactaagaaataggaggaagcaactggaaaaggaaagaaaaaagttatttgcaaaataggcaagggaagaatcagacttcagaaggactgactagtcaaattagaaccacacaagaatttaaagggaaaaaaagccatttccagaggtcaccaagttcgtgttcatctgttcacgttagaagaacatcagtctcctctcatgatttccctgctcaccaaggttgggatggatcttcagacattattagcacagccaaaattggggatggccttggttttattatggaatcgacgtttacaggaaacattcaagatttattattttgggaatgagaaccagtcagcgtgaccctgttatttttggtttaacccagggacaggcgtgtcctgccccatggcttgtgacatacttaatcatgttggaggcaggacagagtgtctgttttgcttgtggtgcctgtggtttgcctcttctaggctttgggaatgtaacagactagaccccaggaccccttttttgcgggaggggtggctgtgctgtgccactcgctctgcggtgctgtctctacgtcttcagtcgcagctggggggtgaggagaggcgtgcagtgggagctcccaaccccaccctccgctccctgccctctgcctttgggccccagcaatggccgctgactctgctggtgttggtttcagatatttggcatcttcctggcaaggacgctgatctcagacatcgaggcagtgaaggccggccatcacttctgaggagcagagttgagggagccgagctgagccacgctgggaggccagagcctttctctgccatcagccctacgtccagagggagaggagccgacacccccagagccagtgccccatcttaagcatcagcgtgacgtgacctctctgtttctgcttgctggtgctgaagaccaagggtcccccttgttacctgcccaaacttgtgactgcatccctctggagtctacccagagacagagaatgtgtctttatgtgggagtggtgactctgaaagacagagagggctcctgtggctgccaggagggcttgactcagaccccctgcagctcaagcatgtctgcaggacaccctggtcccctctccactggcatccagacatctgctttgggtcatccacatctgtgggtgggccgtgggtagagggacccacaggcgtggacagggcatctctctccatcaagcaaagcagcatgggggcctgcccgtaacgggaggcggacgtggccccgctgggcctctgagtgccagcgcagtctgctgggacatgcacatatcaggggttgtttgcaggatcctcagccatgttcaagtgaagtaagcctgagccagtgcgtggactggtgccacgggagtgccttgtccactgtccccctgtgtccaccagctattctcctggcgccggaactgcctctggtcttgatagcattaagccctgatggcgccggtggcgcggtgggcatggttcttcactgagagccggctctccttttcttaaagtgtgtaaatagtttatttataggggtaagaatgttctcacaccatttcacttcctcttcctctcctccagcattctcctctgagcagccttagatagtgtccatggctggagccgaccctttgagtccccttgagtgtcttaagaaccagcccacaacagcctctctttctcctccacatactgcagcctccctccatgcatcccacatacaagcactcccccactccccagcgtggcctcactgtcttctggtcttggtgctactgaaattgtcacccagaatttgaatcctgaccctccccactgcaagcccagggagccccagcccaagatggccagcctgaaactgttggccagggctcctcttgtggccatgtacccagggctggctggcctgccatttgcctctccccggagacagccgttcttctgcaaccacaccccgtgcctagccacaaccccaggctgcagctgctcagaagctccaggcattttgtttctggtgaccgcccctaatgggatatcggtgatcactggtccacccttcctgtcagggcttttctggggctgctcttggaaatgaagtcttaagtactgaataactcccctggggatagctggggcatttgtctagctgggctactttctaacactttgccatagctcagaccacttctcatcgttcagggatggactgcaaccttaatttacttgccggagtgtacattctagtgtggtgtatactggtggctgttgatgatgatttttttttttttacacaattctctgtagactaggagaagaatgcttgtgtttttcggaagtgtgatgcttctctttgactgccaaactcttttatggaatatatctttatattaatgctgttttggtcatttttgtttggggtcactattgagatattgctaagcatctcagtggtaaacgcggctgccagaggaaccaagggatagggtatgtagaccttacagaaggatggatggtaaaggcagtccatcatcagcacaatctgacttacatttcattgagtaattttttttttttttaagattctgtatggcagcactttcagttgcccttgtgtgccggccacagccgcacaagttggcttgtggtttatcccccgctataagtgagagctggagaaacttcaactccataggtctagaggaaacattgttttaggttatttctgtccacccctgtgcgatactatttattgatccaagcagaagagcttggggacactgagtcgaagtggggacatgggattgaagcctgggcactgctgctgcatgagctgtgtgtcctgggtgtgccggcctttctgtgaagggggttggtggcagtgcccacctcactagatgcctctgacccagcctcccctgggggagtgggtggccacagaccctccctgccagagctcctggaaggctcctgcaggcctgacccatctattcctgtagacctggtttaggatgaagtctcggtgcgatttttgcagagttgggtttatctttcaactatagacccttctggctgttctcagccatatcatgtgactctgaatagttggatgaggaatggaaagaaagcaaggatgagagccggtcacgtggcagtctccgcccagcatcggctgtccgcacagaggcacagggcaggcctcctgtgcactccccacctagcactggcctgtcctgaatccccgccttccctggttggaggccagctgtggcatttgcaccctcttctcacctcaccatgcacatgctaactttaaagccttggggtctttcctgtaccccctcctcaaccctggtccaccccctctcaggatcttgtcaacgttatttttcctgtcccgtcttcctatcgctggccttcctttcccatcctaaaaacttgccgaggccctatggctccctccctttctttcccaggcagcttcttatctgggctgtctgtaccccttcctttgcaccacccaccatgccccacgtagctgaaagctgcttatcccaattgtcaactctggccttcttcagcctctgtagcaccagacactgcacctcctgaatgtcctctgcttctctgcttcagaggcccaggctcgccagttctctgacctctcccatatgtctgcttaggactctgctgcagctgtcctcaccagcctccggggaatcccactacccacagggcagggctgtgggctgggctgaaaaaccatctgcatggtccacaagaagcctggcactgggtttccccatgaataacaatgaaaattaatggatgcacaaccttcctggaacgtggaatttctctgggagattccatgcagaggccactggggaggtggcaggcatgcatgtgactgtaggtggctgcagtgttggaaggctcccagcagagcagagagggtgtcagtctcatcagggaacccacctgatggcttctcagccagcagtctcagaggaacatagacgactgctgagaaaggagggaggcagcagtggtcccagcacctgaggcatcctgctgtcatgggaaggtctccgcccaaatgtcagatgcatcagcctgtcacccgctggtccagagctttcagctgtactggtagggggtgggtggtggagtgctgaatgaccttcacaggtgggcctttccagctctagggtcttacgggtgtcggtccacagaaccacggtttttaggttgtgtgtccggggctatgggaacctgtcccccatgatggatcttggtagagacacttccctctgtcatcgtgcccaggaggatgctgcaggtgactacctgcagccctgttctcattcatttggatgccctccagaaatctggggagccatacacctttagagccttttttgctccttatcaagttggcaaggcttggccaattcctgttcaagg

SEQ ID NO: 4968 - DNA, 6000 bp, Homo sapiens
actggtggcctggccctcagctttcaggccctccatggcctgaaggtggtgccttactggggaccccacccccttctgcccagcaacctgtctgccttccgccgccattcatggcccgggtgttcagcccaaccccacttggagagatccgagcaggcgccgggagagaagagaggtcaggcagtgggagcagacgctcctaagcctgcagggactgaggggggtgccttcctgggcacccgagggtgcaggctgcagagatggccgggtcctgtgcctgggagggtggccacagctatacctgggagctcccgccctgccaactcagggatcccgcttgttcccaactcctgcctgctccatgcagcggggacctggtctgcagctgttggtcgtgggggctgcagctgcacccgggagggcagatcctgcctgctcctggcctcctccaagagcacagggaggctcagatgcacagccatggtttgggcagctgcagccctgcccaggagggtggagcttctacctgctccatagagcatgaggcctgggtctgcagccacagtttgggggggctgcagtggtacctgggtagctcccaccccaattcagaaagggcaggcctcccactggctccatggagtgcccaggcccagcggggcctccctgctgcagctagtgtgatggtagcatccgctgccatcagttatgtttgagaggagtagtgactgggtaggaatacaatggagatttctgagctggtggtaatcatgtcttcaaatgggctagggttacatgggcaggctcactttttttgttgtttgtttgttttgttttgttttttgagacagagtcttgctctgtgtctcaggctggagtgcagtggtgcaatcttggctcactgcaacctccacttcctgccttcaagcgattctcgtgcttcagcctcctgagtagctgggattataggcatgtgccactatgcccagctaattattgtatttttaatagaaatggagtttcaccatgctagccaggctagtcttgaactcctgacctcaagtgatctgcccaccttggcatcccaaagtgctgggattacaggtgtgagccacctctcctagccatcactttgtaaaaattagtggagctatatatacatttgatttatgcgttgttctgtattcatgtttatacttcaacaaaaaagtttacttaaaaaaagatactagatttttccaaattagattgtcaacaatgaaaaagtttgatgacatcaaatgatgatataaaaaaatgggtacactgcattaggaatgtaaactgttatagccttttttggagggccataggtcagtatctattaagtttttatatgcatatgcccctttattcagggatttaacttcttttttttaatttttatttatttttattttattttttttttttttgagacagagtctcactctgtccctaggctggagtgcagtgccgtgacctcggctcactacaacctccgactccctggttcaagtgattcttctgcctcagcctcccgagtagctgggattacaggcatgtgccatcacgcccagctaatttttgtatttttagtagagacagggtttcactatgttggcctggatggtctcaatctcctgaccttgtgatccgcctgcctcagcctcccaaagtgctgggattacaggcatgagctgctgcgcctggcccagagatttaacttcttgatagctattccggagaaatccacacaagtgtagaagaggcaaatagaagcatatatattggaaacaatgtaaatgtctatcagtagcagagtggataaataaactatgatgcattcattatggaatactctgcaatagcaagaatgaggtagttctttatttagtgaaatggaaatatctccaagacaaatacatgaaaaaaccaagttacagaacagtacacagagcatactatcatttacactaaaaaaggcacatttaaactcttaacccagtgtctaataaaaagttaaacaatgtttgtgtggtagtatgtatgttgtgtggtacttagattttgaaaaacagttaataataatttcgtgaaaaaaattctgctctggtagcaaaagaacagcggtgagagctctctcaatacaataattacaaattgagcatttcttcatttttaaaaacttaactgagtacctgtagaatcattgtcatcagctgagactttttaaaattaaattttctatttcatgatagatgaagttgtaggttatgcaacctacaaccttcaggtagatgcatgaagttataggaaattgagagtactcagagcaatcctgtgtaccctcaaaggtaacacttcaaaaactatcatacaatatcacaagtggaataatggcattgatacaacccaccaatcttcaagatttccccagttttatttgtgtgtgtgtatatttagttcatgaaattttaatgcatgtgtagtttcatgtttccaccaccacagtaaagatacagagcagttctgtctccctgaaaatctctcctcttttccttattttttttttctgtttgtttgttttttctttgtttttttgagacgaagtttcgcttttgttgcccagtctagagtgcaatggcctggtctcggctcactgcaacctccacctcccgggttcaagcgattcttctgcctcagcctcccgagtacctgggattacaggtgcctgccaccacgcccggctaatttttgtatttttagtagagacgaagtttcaccatgttggtcaggctggtctcaaactcatgacctcaggcaatccgccggccttggcctcccaagtgctgggattacaggcctgagccaccgggcctgggcctcttgtcttttcataaccaaacccacctttcttttcccactcctgctccccaagatgcagtgttttttgttgttgtttgtttgtttgtttgtttgtttttgagacggagtctccctctgtcgtccaggctgaagtgcagtggtgccatctcagatcactgcaaccaccacctcctgggttcaagcaattctcctgccttagccccggccccccccaccagtagctgggattacaggcatgtgccaccacgcccagctagtttttgtatttttagtagagagggtttcaccatgttgaccaggctggtctcgaactcctgaccttaggtgatccacccccctcggcctcccaaagtgctgggattacaagcgtaagccactgtgcacagcccccaagacgtaattttaaaccatcattaatttttataataaccatgataggccaggcacggtggctcatgcctgtaatcccagcactttgggagacggaggcggacagatcacttgaggtcaggagttccagactagcttggccaatatggtgaaaccctgtctctactaaaaatacaaaaattagccgggtgtggtggtgctggcctgtaatcccagctactcaggaggctgatgcaggagaatcacttgaacagaggaggtggaggttgcagtgagcagagattacaccactgcattccagcttgggcaacagagccagactgttttaaaaaaaattttttttaatgatactcatgattaaaataactatgtaatttatctaaattattgtttacaagcatttatctaagtaagttgaataaacggtgtctacatgtttagtagaaaacaaatgtttagtagctctggcagaattcatctccttgctttttaagagattaataaacaatgaatacattgtagaggaaagaagtatgttttcactttgaaacctttttaaaaatttttctttagccatttagtattaataacaagggaagtagtattaataacaagggaagaggggtttctactccttttctttttttctttgctcttcttcctcatttcatcccttggagactgtctatagtcccacattttgtccagttttgaatctgtgtaattttgactctatggcagaaactgtttattgctgactatacatttgttctctcttctctcaaataaacagagccccaactttttactgagcacaatatagccaaaagatgacattgcccagcctctttcgcagatagctgtggctattccaggatcccagaaaatggtagccacaaatgaaggcctctgaagcagaactgccctggatctttactgtgctggtgccctctcggactttctcttgcccttctgtctctggcctctcattctcccccgagaaatggaaactagaattcctcttcccccaggtgggtcatagaagccagcaacaaaacctaaaaatatcactttaactttctctttctcccagcctttctgtataaaaactggccataaagaaatgatctgacctgcctcgtctgactgttccagattgttgaaacccattctggagaggcttctaccccacatttagactgttgaatcccattgcagagcgggtcctgtcccacatccagaaggaaggaaggcacagaggtcaagaagaatctagatagacagcattgctgagtttctcccactcagtctatagcattagatcacactctttttttatcctgttatatttctacatggctgttcatacttggttgaacctaagcataaaagtggacaattcccctatatcttttatttattttatttattttcactttttttagggacagggtctcacactgtcactcgagctggagctcggtggcacaatcacagctcatgcagcctcaaactcctgggcccagcatacctggctaattttaaaattttttgtacagatggaatcttgctttgttcctaaggctgaccttaaactcttggccccaaggcatactccctcctcagcctcccaaagtgctgaggtcacaggcatgtgacactgtgcccagcctccccttcaggtcttcattctgcagtctcctgtgtacgtgtaaaattatgatcaaataaatttgtatgccttttctcctattaacctgccttttttgtcagcgattgtcagtgaaacttcagagggcaaaggggaagttttccttggcccctccagttttggtgctgtgaacaggataccaaagctgctctgttcttctggaagctgcaatgaagggaaccaaggacctgacaagccagcagaagggtaagaaattcttaccagtcaggctcccggcctctctccctctgtggaatctggtagagccgatggtaaaaatcactgtttgtctcattttcatctccaaaaccttgattaatgagaaaaaaggatttgtgtgactagttttgggtgtagcgactctggtgtccttttttggtatgaatattcacattgttcggtccctttccttccagaaatagtctttgtctttccgtgttgttgtgtcataaagaaggatgccatagggtaggacatgggcctaaacccccataaactctctatttgagctggcactgcagactgatcagttttgcggttctgactagacctgtgtctataaactttgctgtagtccccaaaataaaaaccagatgaagttctcctattgtcttatttcatgtccgtataagaccttgacttttgagagcattttctcttggtccttgcgattttagggagcatgattttcaggtcacattaggtgaccagtctaaaaatggctggtcacataagattttaagtggtatactttttgttccaactatgtcaagctctcaggggagtttgtcttaagttccatctgtaaggggctcctgttgcctggttaggctgggaaaattctaatcccaggagggcctacctggtgccagtggattaacgggtctgtgactggtggtccctggcaaatttgttggttactagtggcaccatatgcacaaacaccagccttaatagtctgtggtgggctgggcactgtggctcccgcctgt

SEQ ID NO: 4969 - DNA, 6000 bp, Homo sapiens
gctcaccgcagcctcgacctcctgagctcaagagatcctcccacctcaacctcttgagtagctgagaccacaggcaggtgccaccatgccaagctaatttttaaaattatctgtagaggcaaggtctccctatgttatcccagctggtcttgaactcctgggctcaaggggatcttcctgccttggcctcccaaaatgctgggatgacaaagtggttcatactacacctggccctctgctgttattttaataacaccctggcttatgggttctgagctctgcaggagtagtttgtggcccttaaaaccttagagaaggcctagatagaggtgaaaggagatagctaggccctgggagaatgcctttaagatgaagaatgagtggtaagagcactattctctctcctgcctttctgactccttagttcctgggattctttagcttatctttttttcctgggttgagaggttggggggtgatatttttcaagtggtaaaatctaagggatgtggttatccctagagttcatggtaaagccagttctcacccaaagcctgacgaagacagtttctagcatccagagagtgtctctggcatcctttcccagatggaactcacactgattggtgactcccccactgtcttctcctggcaggggtattctactattttgtcagtgccctgggcataacagcaggagctcatcgtctgtggagccaccgctcttacaaagctcggctgcccctacggctctttctgatcattgccaacacaatggcattccaggtaagaagttgtctctgctcagctgtttgtcctccacactattaatgatccggggacagaaaggagggatcagcaccagagaggagccacacctgacagccatttcactttcctctctcctgtagtcacctcaagttccagttcagtccttaagtccataaagcatgaagagacttctgagtcttggaaaagggaactggaagataattggaaaatactcctgatgtgtaggaatatttttgatcctaaggtccctgtgttgtcacacaatctggccgttgtggctcttcatcataaggggctttggcacataagccagagactgaccttagattcctgggcagacactggacaataaattcactatttaaggtaaatatcttagggaggcagagctgggaggatcactggagcccaggagtttgaagctgcagtgagccatgatatcaccactgcactccagcctgggtgacaagaccccaactttaaaaaaaaaatttcaaaagtgaataacttaggactccaccacagtgggattgaagttgatgttcccagactcgtgaactcttattttgagataatgagagcaaacacttttattgcactgactatgagcctggcactattctaagcatttgatataaagtcctcacaaaaatcttaggaaataggtactattatccccattttacagatgaggaaaccaagttacagagagattagatagaccagcccaacattgtggccctttcttgggctgccatggtggctaagtaaaacattgaggtttgttaaggcaaaaaacaaacctgggcacggtggctcacgcctgtaatctcagaactttgggaggccgaggtgggcagatcacaaggtcaggagatcaagatcatcctggctaacacagtgaaactctgtctctactaaaaatacaaaaaattagccaggcgtggtggcgggcacctgtagtcccagctacgtgggaggctgaggcaggagaatggtgtgaacctgggaggcagagcttgcagtgagctgagatcgcgccactgcactccagcctgggcaacagcaagactccatctcaaaaaaaaaaaaaaaaaagtttatagcaaagacagaatgaagggaaatggggaaagggaatgcatcatagtcattaagctgtagcaatgggcaaatgatagcatgtggcgtttggcttagcttggagcaagaggaagaaaggaaaccaacttagtggtggcaatatcccaagaacttgccacatttgcatgatcatctctgccatagcagcttataccttgaaggcttccaaagttgtcctgtggagcaaaaggaaggaagagagatattggtacattctttaagggatggaaaaagtcatgaagaagcccagaggtcgtttgaaaatgcagtcatgatcacgagttgcatgcctggccttgttattgggttgtatgagctcttttgcaaggcaccagaatggtgcaccctgcagctgcagcttatctactgattgagaccctaggacacaaggctgcctgcctcatgttccccatgcctagggattaggtaccccatgaggatcttttccaacattccttgcttaaagaattgcaatgttctcacttcttgaaactctctgagctctgtatgatttacctccgttccacccaccatataactttcaagaaacagcagttctattgctatggtcctgggactttaagttgcttttttctacttaagcttcagtggcaagttgggagaagaagggaggcaactccatgactcctttggagcccagattcctgggtattttgtgaggttgggctgagcgccttgggctcttgatacctgtccattgggattctcctaatagggtgtctatcctcaagccttacattcctcttctctctctccccagaatgatgtctatgaatgggctcgtgaccaccgtgcccaccacaagttttcagaaacacatgctgatcctcataattcccgacgtggctttttcttctctcacgtgggttggctgcttgtgcgcaaacacccagctgtcaaagagaaggggagtacgctagacttgtctgacctagaagctgagaaactggtgatgttccagaggaggtgagtgaagccctgatggaggtggggatatggccctggcacctggtcattagggaccccattttttctcctgagactttcaaaatataagctgagaaatttgctgggtttgcatgttcacaatcttaatttaaaatcccaatttttaacatcccacgggcccgtagccatagactattgctccatttctttctctctgactatcttaattaaacccattacattcaagagatgtttattgtcctaggacagtcatagattcaaagatgattatagcctagttgcctaggtttgtttgtttgtttttgtgtttgtgtttcaacagtctttctctcttgcccaggctggagtgcagtggcacaatcatggctcactgcagccttgacttcccaggctcaagcaatccttctacctcaacctcctgagtatctgggactacaggcacacaccgccatgcctggctaattttttgtggggacaaggtctcactcactatattgcccaggccggtagcttagttcttaccttcaaaaagtttgtagcctatcggggtggagagataagccaagtatccagataaccatggcataaggcagaatattttctgtactatgagaggtacaaaggggagggagattgctcaatgggcaacaccaaggaagtgatatgaaataaatagtgttggaatccaccaacggatagaaatttttacaactatgtgtggggagagacagtgcaaacagaagaaacagaatgagctaaaacacgaagcatgttccagcaatagagtccttttgcttgaagtatagggtatgggaagaagtaagactggagagactaatgccattcttgtcgagtcctaaaagcagacttaggacttaattcaataagcaataggaagccattacatcttttgaactgcaatgtggcatagttacggacgtgctttaggaaggctgcttttagaacaagtgtaagaaaccactgagccaaagtgagaggtagggacataagttaggtaatgaggacccctgctagcgaagcagtggcagaaatggagaaaagagttgggtgcagggaatgtcagtgatgtaaaagtcaaagacttgactgctgaaggaatgtagggaatcagtgcccttggaatgtcaatggcctggtctacattgagaatgaagactgagaaagggcttcctgagggacagagagctgcaggtgatcaaggacactcaatgggtctctgagggaaaagaagaccaaagaattagggagtagctagcagaaaatggaggcatgacactaaacacagactgaaaaagagtgctgattagaaagagaaaggagcccaaaggcagatgggaaaaccagccaaggatggagagacgtctgttcattagtttgtagtttggacctcacctatcttaccaatgtggtattatgctctagtaaaaagtcagcgatggccgggcatggtggctcatgcccgtaatcccagcactttgggaggctgaggcgggaggattgctggaaagttcaggcattcgagaccagcctgggcaacatagtgagacctcatctctacaaaaaattaaaaactaaatgggcacgatggttcatgcctgtggtcccagctactcaggaggctggggtgggaggatctcttggcccaggagttcaaggctgtggtgaactaaggtcacgccactgcactccagccttggcaacagagtgagaccctgtcaaaaaaaacaaacaaaaataaataaaacaatgaacttagagtcagacaagcaattcaacatggaagaaagacagcccatcccctcccaattagtgtggaagatccatgtaggtgtggagtccccctccattgacctggtgtctggtctgtcaatgtaggtactacaaacctggcttgctgatgatgtgcttcatcctgcccacgcttgtgccctggtatttctggggtgaaacttttcaaaacagtgtgttcgttgccactttcttgcgatatgctgtggtgcttaatgccacctggctggtgaacagtgctgcccacctcttcggatatcgtccttatgacaagaacattagcccccgggagaatatcctggtttcacttggagctgtgggtaagtcagctgtccaagtaagactacatccagtggtctgctgattaggggattaggctaggagccagaaaaactagataaatctgttttttatggctactttgtatctcagtttttccactataaaattagggggcagtatactggaaaacgcttttgagagtcaggcaacatgttttatgtaaaaatgaaaggataagaaacaaaacacaaaaaaacactgattttgattccaggttctaaaacaatttccaaatgccatgtatgctccgggcccggcggctcatgcctgtaatcccagcactttgggaggctgaggcgggcaggtcacctgaggtcaggagtttgagaccagtctggccaacacggtgaaaccctgtttctattaaaaagcaaaacaaacaaacaaaaaagaaaaccaaatgccatacatgatgagcaccttagagttttcctttctttcatcaactctgggctggactgcagtcttgcttgaggcaaggaatgcataaatagaacaatgggatcatctgagtggccagtaagcctggtgttttatgaacttcaagtatgcacacaaagtattttttatctttccactctactcagatatgccttgctttaagagtgtgccgtgccttactgtttggtgatgccattatgaagggcatcaaaataactgctggtggccctttactaccacctaccctcttgtctcctcttgtcctctatttttctctcttctacttctattctgggctaggaacatcccttcccccaacatgccttcaggaatctcccaataaagcagtgtgatcacaagttcctgctcaattctctaatgttgatcttatcttttctcttttctttcctttcattttctttcttttcttttcttttcctttcttttctaatgagacagggtctcaccatggtgcccaggctg

SEQ ID NO: 4970 - DNA, 6000 bp, Homo sapiens
aaaacaaaacaaaaaaccggaaagaagacttatttgggtgacatttagtgtaatctcatggataacttacagtatacagtttgctttctccagttgtttttaacagggacagaagccctggtgagaaaatgcattcccagtgggcatttgttgccgaccctatggggactgtgtgagagctaatcctcactctcaacctgcctttcccagctgaagtaggtattatgtcagcaagggaaatggaagccccctttaacctttgtcctttcttttaaattccaaattgatatgggacagctcctatcttataggaagacaaagaatttgatgatgatgacatgatgatggtaataataatgatataataacaagtactatgaggctgtggaggcaagctccatggaagaggattcttccatgaagaagggttcttaccatgaagccccttccatgttgaatactgtggcagaggacacattccaggcttaaggaatacagtaagaaagttcatggaggtggggcaagtacatggagctttggataccattctaagaagtttggattttataaaaatggtaggtcattgaaaaattttgaggagggcaattcatgatataatcttccttatgttttaagaggctatttctgtcaacagtgtggagctgtgttgtttaaaacagtagccactagtcacatgtggttatgaaatgtggtagtgaaaaaatgtgggtggtctgaacggaaatgtgctgtaagtataaaatacacactggattttgaagacttggtacaaaaatatgtaaaaatacatcaataatttttatgttgattacaaattgaaactatttttggtatcttcagttcaataaaaattaaagttaatttcattggttcctttttatttcaataaagctactagaaagtttaaaatttcctgtgtggcttacattacatttctatttgaaggtgccagtgtggaggctggctaggagaaggaaagaaccgaagaccaggagaagagaggaaactattgcaaaaccttaggcaagagatgttgagggtcagatataaggcagtgactctaggaatgaacaggagaggagtggtaaaaaaaaaaaaaaaggctttttaaaataggacgagacaagttatgggtgtggggatccaaaagagggagtcaagcttgcaagtcaagtgtctagtctaggtgactaagaagatgttggggtgatggttttaggttttgctgcatatgggtttcaaggtgaacacataacacgtatgaagcaatgaggaagtcaggtgtgaagctcaagaggggatgtggtgaagttgtagatccaggagtcaacaccaggaaatggtagtagaaggacagaaatgggcctgatctccgggctcattcagacaaggagaaagggaaaacagaatgagagccaagcacggagaattggggaaaatgatggaggctggggctcagaatttaagatgtggataaaagaggacaagcttgactgaggctggccagggaggacccagaagatcctagtaccatgtagatcaaaggagaccttttcagatgggacaagtttacacatgcgggaagaagaggttgttgagtgaggctgtcaggcgtgttggggtaggcctttgactgagtcgcctaaaagcagatgtcaaattgcaaaaagtccaggagtgaggaagaggatactgtgggttcaggtgagaactactgggagaagtttgggcactagagaaggctaatggggactcggaagcagggggttggaggcagggggctgggggtgggggcaggggcagctcagggctgagggcaaggattttcaggcaaagggtgaaggagggagaggctgcaggtggaagaagactgtaattgatgggagcaaggccaagaaaacgaactggtgcaggaggcatgtgaaaatgtcacacttgcgggagtctttccttttttgtttgttttcaaacaaaagcttttaagctacatctcctcaagcccatcccaaggatccaactctgcccgggttccatctggtagggccttcttcagacaggagagacagaaggaggcccctctcagagcgtctgcctcttttgcacccgactgctcctgctcagaggccgcgggaagctgcggggactggatggtgcacctccccagtgcgcataggacttgggagaccacactcctccgggctgtgtgagcctcgggtccgcccagatctcttatactgtggcacctccgcccagagcctgaagagaagagcagcaccgcgtccctcccgaaccccgagcttcggctcgggctgcagcgccgggcctcctccggcaggggcgctgggaactcgcggatggccggctctcgtccagcgcccgatcccgcgcccacctgggcctgcggcgctggaacttttcttaggaatacccgctactccctgtctttggaaacccacagatgccaggacccgcaccattctgggccggacgttgtcgctggcttggttctttggcccagcctcccccgctgctaattgccattttggcaccgggtggaaaggcaagttcaagagggcgggggctctcgggaatcgctggatgtcttcttccttggccagcttagattctcagtcgcctcttctgcctcctccatccctcttggctcttacctggcgccctttcgcctcctcttctatctccctcttccttttgcaccattctctcgccccttttctccttcatcttgtctttcctctctccccttttccctctattttctccttcattccttcctctcacctttctttcctctccgcgcattcccctccctctcgctccactttaaccatcttctagagaggaggaactctatctactcccgaaggggaggagcagggctggaggctgtctctctctccctaagcctcctccctcctgcctcctcctttcttaatagctcctcctctagctcctctagtctcagacttttcaacccctagaatcccaggggcttctcggaggcggcgagctacaccacatgtcctggggcctgtaaaccgcagctcgaggtcgtctgtgggtttagctcatttcccttcagcccacctgaagtctccttcttcctacggtcacgaaggatctcagctgcaccaagcgcgcaggctacactcctgcagtagcggattggggaccagataagcccacgcggctcccgcctgagtaccctcttaactggcggccgacactttgaaacaattgagtccgttcagaaacggactggggagagtgagggcacgacctcaaaatcctaggcagcaaaatgaggtctggatcctccctggaagaacagacatctcgactactctctcgccccacctctggccgggaggtcggggcaaggagaatccctcaaccgagaagatctggcaagtccccgatcccaccggggccttccgcctcttttccctcatcccctaggaggctttatcaggttctaaccgcttgtagtgggggccgtgggtgctcggggcgccaagaggagggggctgccgagagcggcctgcctagttctcagcattgcctctttgaccactcgcaggctcctggaaatgcaaacacagcccgtgcgtgatccgcacgcgaccaaaagccgagcgcacacctcccgcccccgccccacttgccatcgctcacactaacgtgcacacatgctcgtgcaaacgcgcacgcacggaaccgcgcgccccctcacacccagccgcgctcccggcccggctcagccaggtgcccccacgcggcagcgcccggtctgcccgccggccccctgcgaacccctcgcctcacgcccgcctgcctgcgcgcacgcacgcgcacgcacgcattccccacgcccccgcgcgggggcgcaggccttgggtggcggggtttggccgggagccggccgggccagggagcggcgagcagagtccagggtgcatcccgcgcttggcttccgtgcgcagcctccccgcgcggaggcacctggctccctctcggctctagaacgcgaacagttggcgttgagcacacaactcctcctccttctcccccgagacccctgtaccctccccgcgcgccatctcccgcccctcataacaggcccgaagagtaaacccccaaacgcgtccagaagcggctcccaactcttcgccgggagcacgttggaggctggatttcggagagactcgggattggggtctattgccggcccctcctggatccggcttgattttcatattttaagaagattttcttattacctttgattactcctttttaccaaatttctggaggagctcagtggggaggattggggggaatctgattttaagaaagaaagcaccgaaggggcaattattaattttcctcgggtttggaatcaccctctggacaagagaacgggcgagcgggagctaggagggaagagtggagaggaccggcgaggcgcgccagccggagccacctccttcccggccgccccctccccactccccctacacacacacgctcgctcgctcgccggcgcgcgcacaccccccgcgccggacccgcacctcggcgggcgccacacactcggcagcccgagccgcggtagccgcagcgggatggaggcggcgcgcacggagcgccccgcaggcaggccgggggcgccgcttgtccggacggggctcctactcttgtcgacgtgggtcctggccggcgccgagatcacttgggacgcgacaggcggtcccggacgcccggcggccccggcttcgcggccaccggcgttgtctccactctcgccgcgggcagtggccagccagtggccggaggagctggcgtcggcgcggagagccgccgtgctggggcgccgggccggaccagagctgctgccccagcagggcggcggcagaggcggtgagatgcaggtggaagccggagggacatcaccggcaggcgagcggcggggccggggcatcccagctcctgccaagcttggcggcgcgaggaggagtcgccgggcgcagcccccaatcacccaggaacgcggggacgcctgggccactgctccggccgatggttccagaggaagccgtccccttgctaagggttcccgggaggaggtgaaggcgccgcgggctggggggtcggcggctgaagacctccggctgcccagcacctccttcgcgctgaccggggactcggcccacaaccaagccatggtgcactggtcgggacacaacagcagcgtgagtacccacccggcggcgggtccgcctgtttcctgacaccgaaggggaatgggggggtgggtgggagcgagggacagatagttgctcgggggtcgaggcgggggacgcctcgacttttcgagataacaggtttgtccgattccccccacgcccccaacaggttaacggagtttgttgttagacgctgtgtgtgtttgtttactggagaccctaggcttcggccgccgggaggggagtggaggaaggggcttcttaaagatgagtgggggagggatctgtgctcactttctccaatacttggcttggagggtcagttttcctgtttgcggggtgcttgaattcttggatgagaaaaagggctgacttggggcgggagccgctgaacagaccgattcctgcggctgccgggctccccctacccccaccccacccccaccccccctcccgtcacgcgaaagggaacccggaaggccattcggactcccagcctcctgctcgcctcggggtcgctgctatccgctccaggcgcgcagtcctccagcccaagagggaggctcggccaagtcggcccccagccttggccttcaggtaaccccggttcctccttcaaagtccagggagcggccctggaaagccgtagcagaggccgtaaaaaaaagtttaaagcgtgaagcgaaattccacacccatccagcgctcatgccac

SEQ ID NO: 4971 - DNA, 6000 bp, Homo sapiens
agcgctaatcttgtaaggttaaaaatgtttgagtgtattgggcattaaaaaggagactatacaccaggcacagtggctcacgcctgtaatcccagcactttgggaggctgaggtaggaagatcacttgagcccagcagttcagaaccagcctgggcaacatagtgagacaccatatctaaaataaaattgttaattgtaaaaaaataaaaataaaaaagagattatcaagatagtaaaaagacaacctacagaatggaagaaaatattgcaaatcatatctctgataagtgttgtgtgtatatatatatatgacctaatttttaaatgggcaaaagacttgagtagacatttcttcaaaaaagaaatacaaatggccaagaagcacataaaaaaatgctcaacatccttagtcattagagaaatgcaaatcaaacccacaatgaggtaccatttcacacctactagaatggctatttaaacagacaaagagaaagtagcagtgttagggagaagggaaagaaattggaaccctcttacattgctggttggatataaaatggtgcagctactgtggaaaacactttggtggttccgcaaaaagttaaatataaaattcgcattgactcagcaatttctctcctaggtctacaccctaaagaactggaaaaagatattcaaacaaaaactgtatagaaatgctcgtaatagctttgttcacaatatcaaaagtagaaacaacccagatattcatcaactggtagatagataaatagatagatagatagatagatagatagatagatagatagatagagtgtagtctatccatacaatgggataacattgagccataaaaagaaacgaagtacagacatactaccccatcaatgaatcttaaaaattatactatgtaaaagaagtcagacacaaaaagtcacatatatggtttcatttatatgaaatatttagaatagataaatccatagcaacagaaagcagcctaatcctttctctagaggctgggcattgaagggtttgttaatgggttcagggtttcgtattttatggtgatgaaaatgttttggaactaaatagatgtaatggttgcacaacattgtgaatgtactaaatactgcccgattgtacattttaaagtggttaattctacattatgtaaattgtatctcaatttttttaaaaattgaggaagggccaggtgcaatggctcatgcctgtaatcccagcactttgggaggccaaggcgggcggatcacctgaggtcaggagtttgagaccagcctggccaacatggtgaaaccctcgtctctactaaaaatgcaaagttagttgcgcatggtggcaggcacctgctactcaggaggctgagacaggagaatcgcctgaacctgggaggcagaggttgcaatcagccgagatcataccactgcactccagctgggcagcagagccagactgtgcctcaaaaaaaaaaaaaattgaggaaggaaccatgtgaaattctgtgcacctcctacttgagttggatacctggtcagtggtagcaaactaagcaagctatttccattgacaaatacaaataaatccttccttcattgtcttcctcaaataaaatcccttgccaatataggcaaggtattttcattctcatgaaactgtggctttgaaatgtgtaaatatctcccttgtttgtaatgaagtggtcagtctcgttctgtttgtgggcaatatgattgaagtctgtctcaaaggagtagtcaaacattaacagaccgtgatccaaattaaactatgaaatgtgttcttgtttatcccatgccagactcttaaaaacggttgttagttaaaattgaggtttcaaaaaatgcagtcttctggattatctagggagggggcagaattctgacaatctgtgacccatagtattgttactatatggtaacaatcacctgagattgacagcaggtgcccccttgagacgccatagattctctgtcccttttctcccatatgtattaccagtcaggttattcactcttcttcctgaccccacccccatatcaccacaactgaacagaaattcaacttttagactctgattcaaagacattgtttgcaaagtctcctattaaaatataaatgtgccatctggaagaagagggcagaaatccttagtgcaaccatttttttccatagtcgaacaggagggtgttggtaaggatctcttaatttgtgggtgggattgaggcagagggaaaaagcccagataaaatatcaccagcttggggtggtcgtggtggctcacacctgtaatcccagcacttcgggaggccaaggtgggaggaccacttgagcccaggagtttgaaaccagcctgggcagcatggtgaggctgtgtctttacaaaaaattaaagaattggccaggtacggtggctcacacctgtaatcccagcactttgggaggccaaggtgggaggaccgcttgagcccaggagtttgaaaccagcctgggcagcatggtgaggctgtgtctttacaaaaaattaaagaattggccaggtacggtggctcacacctgtaatcccagcattttgggaggccaaggcaggcggatcacgaggtcaggagatcgagaccatcctggccaacatagtgaaaccccgtctctactaaaaatacaaaaaagtaggccggcatggtggcaggcacctgtagtcccagctacttgggaggctgaggcaggagaatggcgtgaacccgggaggtggagcttgcagtgagtcgagattgtaccactgcactccagcctgggtgacagagcgagattctgtctcaaaaaaaaaaaaaaaaattaaagaattaactgggtgtggtggcacacacctgtagtcccagttattcaggagcctgaggtgggaggttcacttgagcccacgaggttgaggctgcagtgagccagagttgtgccactgcactccagcctgggcaacagagtaagaccgtgtctcaaatatatatatatatatatccagtcttgtcacaatatcccagcctgaagggagtggctggtggcagactggatgggagagcacaaaacaggcacgggcttctcctcccctttggtactgccacctgctttttcaatttcacagtcttccctgaggcagtcctcccttctctgcctgggctttatggctagtttttgaatgcttttgcctcctggagtacctcatcatacaagtccaagtaaggctgaattccaaaaatcccaactctcagaatcctgccaggtggtcacaatagcacccttgtttttatgtaacctagcacccatgggacctggcttttatttttgtttttacttatttttctccccctaaatgcaatatggaaagaaccaaggagttgaggactattatcccagtttctggaagttcagttttctcctctaaaatggaaagggactctccaaaatcaggtaataactaatcgagaggcagaaagatagtaagagtggcccagggtttcttgtgactgttcctgcccccacacaaaattcctgcaccttgtggcctttcttagactagagtgaagtgtgtttccattgttaaagatggttccaggtggcagctaatggcagctgtccaaagctctaagggcaactgtgatcttgatctgatccaacttttaattgagcttgctttgttcttttgattttcagtgggcatgtgtggcctcatctctgagctattgtttcatcaggcattgcagtaaactttgaagaatgcaaattctgaacttcatttgctgtcacctggaaggtgctagacaaattcaatccccttgaattctgtgactagaacctataagaaaaaatgaattgtcgttttgtaggttttcatagagaagtagcaatagggaatgatgggtgaatttggacaagtcactttatcccaaagcgtccatttactcttctgtgaaatactactttatagtgttgtttggcctaaattaaacaaaccatgcaaaaagcccagccctgtgcctggcatacagtgagtgctcatgtgtttgctgctattatattctcctaatccagtttgaaagctgtgaggcagcaactttccaggaaaagatggcttcagccaagggtatgttcctaggacctaccctaaagttagtctctcctattagagtagtttgaagctgaacttggctgaaaactataagaaaggctggtttaggggaagcctttgttacttttagtttcttgagatctcttcttgacctaactcttcaatgctcaccacgtgtcatccattctccagcactgtttctgtgtacctgactgacagtttgcctcacagtaaaatgattcctctgggctccctaggtgaaaggatgttgggcatagcaagttgtaatgctgttgatctcagaaatccttccgatgctccaaaaaataaagcaatgagcaagacatgtctagccagcaggaaatatccttcatacaaaatggttaatttctaaaacctgtggcatcaccttgacagatctcttctgtttggtttatacgggggaatccaactggaagagtccttcctgacccttggtctgcctgggcagaggaggtactgtcctctgaccatcagattatgttgggtctagcaggctgccttcttccaggctttgtgcaccaacattaaaaaggcagtcatttctcaaaattgtttgggaaatgattaacttgtttcctttgatcctccctgctctgtgtgaggacagtcaagtagcagaggtggagaatgtgttctattattttcaacagtgctaagtaaacactgggggaaattctgccactagagaggtacaactgtgtttgagggtttgaaggcgtgcgcgcgtgtgtgtgtgtatgtgtgtgtgtgtgtccttctgaaaacatagagctattgagtacaaaaatatggccatttcctctaaattttctttcccctgttttttttttaaggtctgaatttcctgctgctgttcacaaagatgctttttatctttaactttttgttttccccacttccgaccccggcgttgatctgcatcctgacatttggagctgccatcttcttgtggctgatcaccagacctcaacccgtcttacctcttcttgacctgaacaatcagtctgtgggaattgaggtaatttaccagtcatccttttagtttgtcaaccttcctcaaactcaaactgtaactccaaacctagggatagctcatgaaggggattgggtgcagcatgggaaagtaaagctttcatgttaccaatcaacaggcaatatacaaatttaaacttctattactggcacattttcttttgtaataaggacagttgtatgatgtcagtaatctagattggagttggcaaacatagccatgaacaaaatccatctttttttgtgcatctggcaagtaaagaatagtttttaccttttttaagggatgagttaaaaacaaaaatgggaaagatgaggcatgtcccacaaagcctaaagtgtttgctgtctagccctttgcagaagtagtttgacaacccatgatctaaataatagtgtcagaactttggggacaggatgacattttcattgagatacccagtgtctgagaacaattaagccatttcctccagttaaattctagtttgagttaaatttatttttcttaacactataaaaattgaattaggctcactcccccgactttcagcaaattccccagcttcctgtatctatgagcaaattgaaagttccaagaatgttctcttcgtttatccttccttctgcgcccatgaatatcttcatctgttttcatcttctaccctcttcagagaaaaaagcattcctgttccttcacaaggctaatttcttctgttgtttttacagtcttctctttccaggatagaaggaatcttactccaagctacct

SEQ ID NO: 4972 - DNA, 6000 bp, Homo sapiens
gtttaccaccatcccaggcctgccacatgtggtcagggtaattaatgtatgacctaactagggtgtagatgcagctggaacccaccagacccccagagatcatagggttgctggggacctttagaactccagtggctttcagcaactttagatcctgtccaacccagatgttcagtgttgggctcccttccttgtctgataatcctaaggcaggaaagacctagttctgctctctacaagtcttggaggcaagcatctccccggatgcccagttttttgttttttgttttttgttttttttcctgtgtgggcctggaatttgggctggttgctgactttttcagaaatcctattcttccaccttggtaagcataaaatgtggacaatctttcgtggcaccttcctgaaggaggattgttctgccccagccctgggatgcaagaattagctccagaaggagactccagtcacctgattggtaatctgggaaggtcacttaatctgtgcctgcttggggtgattactgagaatcatgcttcccctcacttggtcattgccagttgtgaggcagggtcagaaagccagctccgactcttcacccacagaagcaactccactgactcgctgcctggagttcttgtgccatttttacactaaaaaatagggaaaagccgtttttaactctctgctacccagtttctggaggggacacaaaaagaacaaagccgggttcagagagtgttcagttcatgtttaattcttgttctatcttggttctgatttctggttagaacagaggtttgcttctggaggtactccttctgcttggcttctgatgctggctctgtccataaaggggactgtggcattcatcattcaacacatacttctgttgtaggcactaaggatacaagcaggaacaaaacataaaatccctggccacgtggaggttacagtttagagggatatgcagaaaaaaaaatatatatgcacatatataatatgtacaaaagtgaccattgctaaggggaaaaagataatgcaggaaatgctgcagacatcaaatattagagaggtgactagcattcaggagctttctgcgtgcctctgtacgctgctttttgtgttgtcagaggggctgacgtctgtctggaagccccagagcccagcactaagcatatggaaggggcccaagagctatttttgaatgaaacatcaacgtacttcacacgtgcaaagcatgatgataatgatgacagtgatactttaaaggtaaactgcaggctggggcagtggctcacacctgtaatcccagaactttgggaggctgaggaggggggtagatcacttgaggtcaggagttcgagatcagcctgaccaacatggagaaaccctgactctactaaaaatacaaaaattagcctgtcatggtggcaggcacctgtaatcccagctacttgggaggctgaggcaggagaatcacttgaattcagaggcagcggttgcagtgagctgggattgtgccaccacactccagcctgggcgacagagcgagactctgtcccttccggcagaaaaaaaaaaaaaagtaaacagctaaactatagatccttgaattcagactcctcctttttcttcagatgaaaagtagccatggaatattccagcattcctcagtgccttcagtgagtcctgagtgttcttggtttgctcccagactgtaatttccctgtactattttttttttaaatagcactgaaagcactgttatgtaataaacctctgcatccaaaaaaaaagaggctggaagaaaagcagagagctttttttttttgtctctgtatttattggctgatcgggagctatgaagttctggttatactgcaacctcaaagcagtcctgggattatcttgttgtgtgtccttgggcaaactgagttacttttctggctttctttactgtatgtaaatatggctctcaatgataaacagttttggggacttgttatgcaaaaagaacaaaggagcaatttttttttcttgagtcccgttctgtcccccaggctggagtagagtggcacgatctcagctcactgcaacctccatcacgtgggttcagttgattctcctgcctcagcctcccgagtagctgggactacaggtgcccaccaccatgcctggctaagtagagggggtttcaccatgttggccaggctggtctcaaactcctgacctcaagtgatccgcccaccttggcctcccaaagtgctgggattacaagcaggagccatcacattggccaaaggaacaatttcaaaccactcatcaatgatgtcaaacaacatttaggagagagatccggcgggtccagcctggagagggtgagaggctcttggcctaagtgttctattctcaggaccagtattttcagatcaaataaaagatgtgaatttgactttgaatttcaaataaacaaatttcccatctggaatcttctaggattctagcactgacaagctagagactccttccagaccttctagccagggaaggcaaactcaaatgcctacagggataagacaggtgacacctagatttttatttttaaatgttaaccacacattcagttaaatcaacaaaaacccactgtgtggaccaaaggaaacaatctgctctggctactttataaactatagtgaggccaaaccctttcaaccattatacagatgaggaccccaaaagggacagatgtcagcaaggctgcatagctaaggtttctcaaaagataaccaaaatatcacgttggatgaaaggcaattgaaaatgctaagtctcaaagaggcagtcagagagccgttctatgcagtttgcaagatgttttcacctccatcaatttatcagactctgagaacattctgcaaggcaggcagggtggatgacactcatttacagtcgaggtcactgagggtcagaagggcaaagtgtcactctctgcataaagtcacataggtaagtctacacaggaaaatctagggctgttcttcactacacctctgattcagataacaggtaggcttcctctaagattttaataaagacaaactcaaaatcctgtatgatgccccatgaagagaaacaagtcaggaggccaggctgagcccccagacttctaacccagttcgcaaataaagaaagtggcaaagtagatagattccagcctgtcaccagggttgtgtcttctgtcctagcagctgtacagcttgtcttaccactggacatttgtttcatgtacattttcacataggaaggatattctaaaagatgttgataaagattttttaaagggtttgaaggggataggatgtgatctaaggttgtgcaaggagaggaaaggaagaagcacacaaaaagaacaaatatttattaagagcctagagtggcatgcgctgtgaaaggcgtggcatgtaattctttcccagttctttgcctgtctgaatatttctcattcttcaggtttcagctcagatatcacatcctcagagaacttgccttgccactctctctgaagagcctccccccgtccccgccaccgctactgtctcttgaactttctcagtctggccattctattaaaatctggaacgattttgctagtttgcggacgagtttcccccaagctgcaggctccataagggcagtgacagtgtctctttctcagatgaatgccgggttgcctatcgcgtacttggcacacagttaagtgctcgagaaattgctaaacactcaacgaatatttaccagaatacatatttatgctccaccgttgctgaaagaatttcgactaacccttctttaagtctctcttaccctcctgtactattaacaccattgtaagtaggcagtggagctacatttgcagggagagagaagagcgaaaaattggcgcgcagagctgtaaagcgtttttctccaggtcacaccgcagcctgtaaatttgtgacacttggaccgattatgggacagcttgcaaacaaattatctgcaaactaacgaagcctatttttaaagatccctgttcctcgcagctctaggcgatgacatcagagaacccggagttctacctccgagccaagcccagtggtggtcaaaaactacgaataccaggaagcaccgcggcgcggcggcccagagctccgcgcgcaggcctccccggcgcgccgaggccgccgccgctggaaccaggaagacgccagaaactcggcccgccacgccgcagggacccgcgcggggcctgccgggactcgtagtctctgcgggctgggagcgcccgctccggaatctcagccgccgtctgagggctgaggcagcgtggggacgcgtgcgcagtgcgcgggctggccgtcgcggacgccgctccgggcagccgagcctctgtgggagccggggccgcggcggcgcgggtgctccgggccgaggccgcggtaaagtttagcttgaagaacgcggccgcgctggagcaggggtggtggacggggccaggcgcgaggtggcggcggctgcggggctgccgggctgctggagcgcggttcccgctgtggcgagcggggaggcgtccgcagaggggcggtgggtgctggtgagtgcggagccggcgccccctctgcgcacgtccgcgccacgcgccacagcacctggaggccgccgggccggctcacctgccctggcttggggcagcgggagggggcggcgtcttcttcccgtgggtccccgattgttttcccgacgtcagccctcagcggcgcccggcgggggagggcgggaggcccgcggcggtcgcggggccgacgagctcctcggcgtctccgccccccgagaaatcccgctcggggcgcggtgcgcgcagctgcccggggattcccggtggcgccggtcggagcgcctccctccagggctgtgcccgcggggcgcgcgtccccgggcatcctttcctggtgtttaatgcattttggcttcaggacttgccgaggccgaagccggctccgccctgggccctgaagtcgggcggtgtccgcgatttacctccgcaccttcggggcaggtggccagaggcagcgttgaaagcgacttgcccaaggtcacgcaggtggcaccggggaggcgaccagacccaggtctttcgacgccgaggccagctgccaaccgcagagctttggggccgtcttgagtggtttgtggtttgtttcagatgctttctattgacctcctggaaagaggggaaagtgtgtcataatgaaagcggtcctgttgcttatagtgtttaccgcctttggtagaattctggtgaggctgtgcccccgcgcagagcatctaccgtggtctgggcgtataaataatgaaactcctttgctctctgggggcagtacaagaagaggttcaaggaacaaataaatatccaggcagtttctgcgttttcctcgtctgtttgtttcaccttccaattctgcagtactggttttcttattttacaattgatcgttgttttaataagattttctttgttttaatgaagtcattgccccttgtgagttagttttctaaatagaaaatcttatttcctgtgtgtttaatgactggaacaaatagtgcactatgaggtttacaccattgtctttcatcttagaactcctgatcaatctgctttattttcccaagtactcagcttgcatactttctatgttaatttgatgccactgaaaccatttacagcaaagtttgggtaagagttatgtgattgttttgtgaaactgtgtttttcttcacaatctgaagaacttgaagacccgttatattaaaataataagatttattctgatcaaaatacctgtttacttttcatgctcttaatttttcctgttgacacacttgtggcaaaagaaatatttcccctagtggagttaaagtattttttatcttggccaattttcccaaggaaaattgcat

SEQ ID NO: 4973 - DNA, 6000 bp, Homo sapiens
tggggggtgggggagcggtgtagagacagagtttcactttgttgtccaggctggtctcaaactcctgagctcaggcagtcctcccatctcagcctcacaaagtgctgggggtaacaggcatgagccaccacgcctgtcctggaatgtggggatttctgagtactaaactaaagccatgctgataactaagcatagtgaaagtagacatcacaattaaggtagatccttaccaagttttccatgctaaaatgaatcaattttataattgctgtaagacctaaatttatatagagcaaagtaattcagtagcatttaccagaacaggtttgccattaggtagttcctgtgacaaatgtttaccaaatctcaaagagcttgtataggaatgtcatttccttgcctagaatttctgaatatatgggcacacttatatatatagccttaaaaatattaataagggcatttaataacttgattcattaccttgatcccattaactattttccttgatagatcttatgttcctcaagtggggattctcttgccacagaatttggagagagaatatagtttatttgagtattaaattatgtttaatctcttctttattcctacagcttaaaattggaattatatctattattttgaccaaatatattttagtcttcttttagtacatggatattatctttcaagttctcttttaataaaccagccaagtctttttttaaccataaatttcattgaagtttaacaaattcacacaacagtgcacaaatccataaattttcacaaactgtctgtgttataagtacccagctcaagaaatagaaccttagcagaagcccagaacctccttgatgcctccttctggttactaacctagggacaatttcctgtctaataccatacatgaattttccctatttttgaattttagataaatgtaatccatatagaatatcctcttttgtatgaggcttcttttattcaacatgtttgtgagatccatctatgttacttggagttgaggtttatttatcctttattgcatagtatcccattataagaatactacaacacggtgcaattacactactttagggtggacatttatttctagtttttggttcaaatacagctggtgtgactatttttatacaagtctcttggtgaacatatgtacacgcttctcctggacctaggaatggacaaagctttgttttgtatttttttaaatactctgaaaagaaaatgctatgtttttaaccattaacttgattaaaacattattacatttttaattatttaatcagaataactttcaaagatcatttcaagtctaacaaaaaaacataactttgttctttaataagtgtaatatttcctggaaatatgcctgggaatttttcttgaaataataagcgaatcttgacattaattggacattttcagaatgccctttggcgtgaagctatgtttcatgttttagaatgctcctctctaggtactttctttttaaccctgtccaatgtacttgacttttgttttctcactgagaaaatgaaagttcagaatgatttttttggggatagtaaggagactttgcataatgggaaataatggtcaggggaaaaccctttgttttataaggggccatttttgtatgctttttttactgaaacagagaaggtcaggttaattccatatccaaattaaatttatgattttcaaaagggaagccttgataatctaaccaaacgtgtccattatctaaagttatttggaaaattgtgtcactttaggtggaggaagctaaacaagaattacaggaagttgttgaattcttgaaaaatccacaaaaatttactattcttggaggtaaacttccaaaaggtaagatatcttttctttatcatgatttgatggaaaaaacaaaaacaaagaaacaaacaaaaaaaacctatattacttatttaattttaactgattaaagtttaagtcttaattgctattttacaaaatagatgttcattctgaacatacaattccatagccttttttttttggtaactgcaagtttttatatactttcaaatttaaagttacaagaatagtacatagaatgctcctcataccctttacctagactcacaaatttttaatatttagtttcctttttagacccaggcttgagtgcagtgatgcaatcatggctcgctgtagccacaacctcccgagttcaggcggccctcccaagtagctgagaccacaggtacacaccaccatgccggctaatttttgtattttttgtagagatgaggttactccatgttgcccaggctgctcttgaactcctgggctcaagcgatccactcactttggcctcctaaagtactaggactgcaggcatgagccagcgcactcaacctaactccattttaaaaatcattcactttgtctctttatgtatatataaatataaaaattatttgtaaataaataaatttttaactatttgagagtaaattgtaaacaatcaccccaagtgtgtatttcctaagaataaggatattcttctatgtaactccagaataatattaaaattaggacattactgggtgtggtggctcacgcctttaatcccagcagtttaggaggtggaggcgggtggattacttgagatcaggagttcgagaccagtctggtcttgaaccaggggccattggagttccaaccagcctggccaacatggtgaaaccctgtctctactaaaaaaagaaattagctgggcttggtggcaggcgcctgtaatcccagctactcaggaggctgaggcaggagaatcgtttgaacctaggaggcagaggttgcagtgagccgagattgttcccactgcactccagtctgggtgacaaagcaagattctgtctcaaaaaaaaaaaaaaaataggacatttaacatacatacaaaaccattatcaaatttagagtctatattcaaatttcagcatttgctccaatagtatcctttgtagtgttgccctgatccctacccacttccccagttcaggacctaatccaggatcacaggtaacatttaggcttttattgtttttttttttttttttttcaaatgaaacaatgaaacaattccttagccttttgtgagggagtggagagaagaggatctttcatgatttttacagttgcaaagagtacttgcctaattatttatagaatgttctcagtttagctttgtctgatgttttctcatggttaacatgacttttaatgacttcacagtatccttctaatttatggttgtatcacaatttaaccatttatattgaatttttatatggtttccagtttttttgctattaagaatagtgctgtgtttcatcttaattcaaggctttgcctgcatgcttaattatttctttagaataaatttctagaaatggaattgctgagttaaaggatgacactcctttttaatgcttgtttttatgctgccaactatctccactgaaaatacagcagtgtatgaaattatttgcagtaacctttgctaatttagggtacatttattaaatcagtgcttaataatgataactttagctaatatcactggcaaaagccttatcaacatcatgtacttcctgatgctctagaaaggacccaagtgatggcttatgtggtgtccacgcaaaaaggaattaaaaaagagcacaatctcaatacaatcatgagaaaacactggaaaagcccatatcaggagacattccacataccacctttacatttatttaaacatcacagagtgaatgtttaaaaccatagaagtattaatagttacactcttcctctttctaatcacaaggagtattttaaatttgtagaaaatttgagtagtataaatttgtagaaaaatcttcagataccaagatgtaatccacagaaattaatatgatttaaaccagttaagtataactaaaacatgacaatactaggatagtcttaaagctatttttgagcttgagctttctttaaaattttttttatgttaaaatgcagcaaacatgtatgtaaagaagttttgttgctttttaaatgtaatatgtatatttataaaaacatataaatcaggtaattctgtttttctaacgtgaaaatctttggtgttatgaaaatttgcaaacatggaaaaccttgaaagaacagtacaattaacatccatatcctatccacttagactcaacaattgttaacattctgtcatatttgctttctgtgttatgtgtgtatttttccccctgaacatttgaaagaaaactataaacgtcaactacttgacatctaaagactttcttgtacatcacctaagaataaggacagtgtcctaaataaacataataaccttatcccaccaaaggaaattatgcctatttccttaatatcatgtactctcagtcttgtttaaatgttttcaccagatgtctctagaattttttgttctttatgaaaaagcatcaaatcaggattcactaattacatttggttgtttagtcttttaatctatttttacatgaattttatcttatttagtgataaatgggtttatatttttttgcctcaagattctccctgtcatgtctcttgttgatatggaaacaatatttatataatacaggaacattaattttggacaagattctgaagtgaaccattagcagagacaagtacggtttgctgtgtttcaaaatattggttattggtgtgacctcagcctgaaaattatataaatgaataattatttattttataggttcatatcgagggattttttaaaaatactttgaatcattctcgttttcattttcttttaggaattcttttagttggacccccagggactggaaagacacttcttgcccgagctgtggcgggagaagctgatgttcctttttattatgcttctggatccgaatttgatgagatgtttgtgggtgtgggagccagccgtatcagaaatctttttagtacgttttggtgtatctttgatgcagtgctaaattttgttaagggaagtgtgtatcttaccctttctttgctaattactttttttcttcctttttttaatttctattttttggggcctccagctttgcatgctaattagttttgattgatagttaaaatagccattgtgggaccttggtttgggtaacttactatatgaattatcggaagagctagtggaagtgcaagatgaagttggaggctaccaaaaatctcttagtgttttttcattttattcatcaattttgtagtatggaattaaggagtaattagcttcaaacctgattgtatatatttgtatagctggaaagaatgaatgaatgcccaactgttttgttttatatcatttctttggtatagttttttcccccctgaagatactatttttaagtcagtaaaaaatgacgtccttttctttcagtgaatattttttgttggcttttgacagttgtataggattttaatatttatctcgttttgttcaaaagtgttgactttctttcagcttatttgaatgttttttgttttcttaggggaagcaaaggcgaatgctccttgtgttatatttattgatgaattagattctgttggtgggaagagaattgaatctccaatgcatccatattcaaggcagaccataaatcaacttcttgctgaaatggatgggtaattgagtcttcttttttcttagaatatggtgatgcctcccagcatttgatatacgtagaattgatcttatgcaaattatttccataaggcatttcatatctagagatatgaaaaatgtgatgtgtataggaaacagagtagtccctcatgcaagaactcaagacaagctttttctctcagtattgtattgttttcattactaactggatatttgaatatcaactcatcttatttaatttatggtat

SEQ ID NO: 4974 - DNA, 6000 bp, Homo sapiens
gctctttcgccaggctagagtacagtggcgcgatcttggctcactgcaacctccgcctcccgggttcaagcgattctcctgcctcagcctcctgagaagctgggattacaggagtatgccaccacacccagctaatttttgcatttttagtagagacggggtttcactatgttgtccaggatggtctcgatctcctgacctcgtgatccacccgccttggtctcccaaagtgctggattacaggcgtgagccactgcacttggccctctataactctaaatgttgctgcattttattattgcaatgactaataagtccctaaacttgatgcagttagatttccctgttattggatataggatatttacatttttgctcttgtgaatatactagagtactatactgaatgtgtgtgtatatgtgtgtcaccttttatatatttaagtatttccttagggtaaattcccagtagctggattattagagggtagaaatttttttatggtttttgatataaattgtcaaattatttcccaaaaagttgtatcagttcacagagctaccagttggtttctcgcagccatctgctatagttttgttgggttaaaaaactttctatttttgctagttcatcttatgttgctttaatttacattttccaataacgattaaacctaaactttttttgtataaatttgcttttttgagtatttcttcttgtggagggacagatacttatatataattattagattggctgctagtccaagagcagtaagtagttaagggatcaagtcagcaaccagtggccgtagccatctttgaccaatcaaagatatagattcatatcatcgtgaaagctttgattcagagaaaatagttatatatgtacctaatggtaggaaattggggtagttgtatttagtatatagaatattacctaattttttggttagaggttctagaagacaagactttttcagtttgtcttatgccctctttttttttgttgggggagaggtggggggtctggacactctaggaaattaaaactgagtattttacttattgcatgcatagaagttgattttcttttcttttctttctttttttttgagatggagtcctgctctgttgcccaggctggagtgcagtggcataatcttggctcagtgaaacctttgcctcccaggttcaagcagttctcctgcctcagcctccggagtagctgggactacaggcacccacgacgatgcctggctaatttttagtagagctggggtttctccatgttggctgggttggtctcaaactcctgacctcaggtgatctgcctgcctcagcctcccaaagtgctgagattccaggcgtgagccagcgctcctggcagaagttgattttcttaaaaaagagagataataggaaaacaagctcaaaaatctatttggggccttatgcaggatgttggccttagcctgaagaaataaaaactgatgaagcgcattgttagcagagggatgacttgatcaggtttttgaaaacgaatgttcagcattgaggtaactgaggcatctggatatgctggtctgggcccctgggagccgcaggagataatggagatagagattctatgggctgagaccattggtaggttttatggtgttgaggaatacttaacactgattttttttttgagcgctgttaattaaatgttaaaatataatcggtttgctttagagaaaggcacgaatggattctggggctctggtatggaagttattttcgcagtgtaggtgcaaggtgagggaaccagatagggaggggagatgggcgagggtctgtggagaggggctggagtgaaatggtttgagagccatcatgtttataaaagcaatagaaggtacggtggggtaatactttctatttaatgcatttttcattttatttctttataactaatataaggcacattttacatttcagatgaatttacaaccaattttctggattggactgatcagttcagtttgctgtgtgtttgctcaaacaggtaaaaacaaaaaattttcttagttgtcttttcatttccgtatcttgtattgcgctttgaccagttaggttcatatgagaacctaagtcataatcatgctgctccttctggaagccctgcaattgttcctcttactcagagaaaggtcaagttccttcatggtcaggctcccctcacccctgccacctgggatgatgggaggcaagttggctggtgaagtactaaaatgctagggattgaacacactgcaagaagatcttttgagaacatgagagtgtgtaagtgaacagaaggcaaaagcaagtatatttagaagcaaatgaaataaatgtgtagaatggaggattatgaactgtccattattatctgcaaagactttctagaagacattctcactctttgataaaaaagtctcacaaaatgttggcatcatctaggaaagcagtgaaaataaagctgaaaatgtatttaacccttctataaagatgtggctccacatctggaataatggatacgcagttctgtcctctgaatcttgaaaaactacactgcatagagcagttcgatatcaggattggaaggacttactacaagtagtaaaaatgaagcaggagaccgtaaaagaaagtattgataagttagttacataaaatcagtaataacaaaaacattctgtgtcagaacaccgtaaacaagatgagaaactaaacaaaggttccacttcattaatgtgtatagaaatccaataaaaactgaggaacataacaaaaaaatttgcaaaagacataacaaaattataaaagaaatggttagtaaaaatatgaaacaatgtaaaacctgaaattgataggcttcaccaatgaattgatattctaatttacacttatgaaatgagcaacagttttttaacattaaagcacttcggttggaaatgtggtaaaatggtatttgtacactgccgttttgtgggagcttatattagtagtgttgccctatggtatccatggggaattggttccaggacctccttcagataccaaaatccacaaatactcaagtccctgatataaaatggcatgatatttgcatataacctacacatatcctcctgtatactttaaatcttctctagattacctgtaatacttaatacaatgtaaatgctaggtaaatagcttttacactgtattgtttagggaataatgacaggaagaaaagtatgtacatgttcagtacagacacttttttcccccatttttgatccgtggttgcttgaatccactgatttggaaaccacagacacagagggtcaactgtatattacttttggatagaaattagtgtgtatagagaattttagaaatgttaatatgctcttcaacttagtagttaattattcttttaggttttattataaggaaataatcagatgtgtactaaggtttatatataagatcatcagcatgtgtatgtgcatgtagtacagtatgtgtatatgtgtacttggggtgtttatatgtgcatgtgagcaagcatgtgtgaactgtgcacacatacatttggaaacaatctaaatttgtccagcattaaatagagtacacttatattgaaatacataatcattaaaagctttttaattctttttaaaaagaatttgtgatgataagaataaaacacttaggataaggtataaaaaacagtatacaaaactgtacaactgtatatataaagtgcatcctcagtttcatgtaaataatacatgtattaatatatatatgcttgcttccccttgctatttatctgcataggaaaaagactggaaagaaataggcaaaaatgttagcaacagtcctctctcagttaacagattcagtgagttggttctttatgctcttgtgtgttttccagattttctataagaagcatatgctggttttataatctcagaaaagatacgttggagacagtctgtattagcgcttaccatgtagaaggcatactcttccttaggtagatgcaaagaaacctaaaacatactttgaacatagagcctgagaaattctgggattatggattagatgaatatggacttttcagttatttaacatactgaaagcaaagggaaagccttgaagattcttgtgagtatggtaggagttaaatgacaagaaataatactttgcccagttttaagagaactcatgacatttatgacagtcaagaatgataaattctgaattatgtcttgtctttgatacagaagacaaggaagataacttatgtctctctgtggctttcagtgtcaaggtgatccaaaatcacggtcccaaattttgcattgttctcaccggtttgtgggagctaaaaattaaaacaattgaactcatgaagatagtagaaggatggttaccagaggctgggaagggtagtgagaaggtggggaggaagtcgggagtgttaatgggtacaaaaaaatagaaagaataagtatgacctagtatttggtagcacaacagggtgactgtagtcaataataatatagttgcatattttaaaataactaaaagagtataattggattctttgtaacacaaaggataaaggcctgaggggatgaataccccatttaccattatatgactgttatgcattgtatgcctgtatcaaaatatctcatgtaccccatacatgtatacacctatttacccacaaaaattaaaaattaaattaaaaaatcctgctctctttggggaaggtctagtttagatggtaactaggtcatagtattaatatttaacatatgtattgcattgtcattgtgattctgatttttcattattttctctctgacacttcacataaaatgttctgttctttcttctttctgacagatgaaaatagatgtttaaaagcaaatgccaaatcatgtggagaatgtatacaagcagggccaaattgtgggtggtgcacaaattcagtaagtaaggttgctcaagtcctttccatttgttctctggtcatttagtgtggctcagtgctgtatccttcagaagcacatattaatttttatgtaaatcataaaatgaataacctaatggtttggagctatgtggttcaacacagtagccactaggcagatgtggctattgagcacttttgtacaaattagaattgctctaagtttcaaagatatacaagatttcaaagacttagtattaaataaataataatggtgaaatgataatttttgtatatttaaaaataatgttataacagtgttaaaattttctctttttctttttttagtgtggctactaaacaattttaaaatacatatatttgtagctcatctttgtggcacatattagatttttatgggagaaccttcaaaaaaatcctagtcatttagtttgactgtttcagatttccccttttttgatggggaggtataaattaaccttcttaattatatttgagttaaactactggaattgatttgcatcccaatataagcttattgaggttaattagggtttggattttattcacttttgtcatctctatacttttgctaatatggtaccttccacaaagcctactaaatgttcagtgagtcaatgaatgaatgaatgaatatatcaaaagagaaggtaaggagaagtcattttgaggttgtatagtttattcacagaatgaataactaatatcagaagatcaaggggttactgattttgttttcatgcaggcatttgggcccaagtttcaagtgcctatttttgtatgcctaagtggtcaagtgtcagatatgtcgtatggtttgaccacatgaaagaaaaaatgagaggttttgttgtttttcaaaaattttctaatggtgttttctaaaagtggtgtgttgggattacattggcaacagtggaggaaatatggagtgttgtgagtttgtctca

SEQ ID NO: 4975 - DNA, 6000 bp, Homo sapiens
aaataggtaatcagtcattcgaaagagtcaattgggatttgtcacttcctctacttcctggtggatagtttcaaaatccactgcttttctctgctacagaggacaatccttacactcccacctaccagtttcctgcatctactcctagtcctaaatctgaaggtaattaaaggaaaattgtgtgcctctccgtactggtgctgctactttcttttttaccttggggtttttcctggtggctaagggctgtttcccagtcatttgcttccctctaaccttgtgttttgtggtggtgtctcactccttgctgactgtatcaccggagtctatccagatggtattttagtcctattcccctagggtttacatgattaacggggtagccagtgttagcttagttacaatgttttgaacatgtggggctctggtcaaagctgcctttacccaactacccaaggctttgtacctgaggtggtcacctgatgctggtggttgagcagtgactcagggaagctgagtcattatagcgggtgggcaggaggtagatctgtaaccgtcaacaggaaaattacccagttctcatgcctgcaactaactcttttcatgggccctcagggtatctctctttggtagggaattcctaaagaggtatccaggtataagattcagtcatagtgggagatgacatttcttgaaaataagggttttagctaagctggaaaacatttaatgaaagagctggataggaatttgtacctgctggggaagacagtcacatttgtgtctaagaaatattatttctggggaaaaagtctaaatgtcaaggaagtttctaaaatgtgagttaggggcaacatcttgagaattatcctaatagcagggattatctgatctttggatgagtaatccagatgagggtgaatagatacggtatggaggaggaagttttgttaaatactgttctaggatgagatgttgagtgctctgaacttcattcattcaagtagtattgaacacttgctgtgtgccaggcactgtcgttggaagtaatgccatgaataggacatgtaccccatcctcagaagttcccatctggcagagagttcagcaaggtcacttcagctgactgagtccagtgtgggggcagttgtgagagcgtgtgtccagaacgccacagaaaaccttgccggcacacagtgggccctcagcaatacctggaaaacagcgatgatgaaggctttggactgtggagccagagttctttcttagggatgaatgccagtgccaccatcttgatgcttctctactctaatctgctcagcagaccatccctctcagcccttctcatcattggtaaagttgttcattcaatcattcaccaaactcttactgatcagtcatatatgagatgacacactgggatgtgttggatacagttaaaataccataggccatttttggtctctcatatgccccagtaattggtttccaaccatttcatacctggggcctattttgaatgaaaagaaaggtctaccaaacaaacccagacttacagaactaaaagctgataatttaattctgatcagtgtcttcctcaaggccaagaagagtctatttggtgtagagagcgcagtctttctgtctcatgatactgattaccacacaaaagcattggtgaagaaacaactgactgagttgagttagggagttttttcagagtaattttgactagttgcaattttcgatttgtgctttatttagacttgcaaacccagccaaactcgtaagataagagtttccttcaaggcaacaagcacagagcatgcagaaggcacagtatcccacggacacaggcaaaggaaggcccacttgaagaaatcctgtggagaggaacagtggctcccatcagactggaagactgccttaggcctgccacaggcagcacccacagcttccacagtcagcttggctgttggtccaaagacagggtttcatggccgcacagccagagctcctgtgtcatcagccaccatacctagcaacccctgctgacgatcacgtctgatttttggcatgcatcaagtccagcatatggggaactggatttattttgcatagaggcataaacagtaagggatgtcatgataacttatcacatataatttagaagcaaaccttactatttttttattttcagagaccgaaaggaagaaatagtcttaaagaataaaaaggaaaaaattaggttggatataaaaaaattaatagcaaagatgattagactttaacacaagtttctaaaaagacatcctccctggagatcttttaaaaatagggtaaattccatctcacgcccccactcctgcctagatgacatatccgggcatagatcactgatgtattcaattagatcaaggcttcttacaagtgatggaaacatttgagctagatcatttaaaataatcacagggtttttggttttgaggtttttttttttttttttttaaaccatttcaagagagtctctggatttcttgatccttgatttgtggttttcatgttgtctgtgagctccagcagggcctcatcagccctgtccgtggtgctgctccagctctgtgctccccgataggtggccctgcgctctatgcacatccttcttaacataggaaagatgtatgcctttcaaagaaaggcattcaagacagatcagcaccaagtggaggctctacccacagatgttaatgtgcattaagaaacagcgttactgagaaatctgagccatcattccagagtctctctcctggggagaagtttgtttttactgctgggtttttttgtttggttttaattcagaatttggaactagaattatttgtaataaacctatcaaagcctagcctaagggctgccatctctgtctaaattctagttgtttatacagtataaaaaagacatttctaaagctctcaaagctgatcctcctcaatagtaagggactgtgtgaaagtttgtttatgctggcttagcaaccttcttttttcccccagctacagtgaaaaagcaaacttttggccagacttttagactataaatagagttatcatgtctcagtcaatgagggttaaaatgttctttttaaaaaaagaaaactttggaaattccaagaaggggcagtcacttttaatcattttgtaatcttggagactgctgtctacgggatggaagagatgttagcagaagggagggggcaaactgtgcagaaacagcttcagaaatgcagtcccccactttcttccctgctgctttaaggaacagcagtgtggtggccaacatctcagcagcccagagtggtaatcctattaataataatagtcttataatgacataaccaccacctcagtgactatgtggctgtcattaattgagcccttgccacatacaagtttctgtgctgaatatatcactattgttatctcattttcattctcccagcagccccatgaagtaactcttcattttatcaatgaggagtatgaggttcagagagattaagtaatatatgcaagattacacagtaagtagcagaaccaggattcaaacctaggtgtttggggctccattaacacaggcttttactcaacgctgctatactgccctgcagattcctttccccttcctgactctgtgttcttgcttgtccccttcttgtccagaggctctctggtatctgactgcaggcattcagcttcccctgagtcagtcctgcctcagtctgctaagccagtacctcccagatggtgcctggaaatatatagttagggacccagcacggtggctcatgcctgtaatttcagcactttgggaggccgaggtgggcagatcacctgaggtcaagagttcgagaccagcctggccaacatagtgaaaccctgtctttactaaaaatacaaaaaaaaaattagccagtgggcgtgatggcaggcgcctgtaatcccagctacttgggaggctgaggcaagagaatcacttgaatctgggatgcagaggttgcagtgagccgagatcgcaccactgcactccaccatgggcaacagagtgagtctctgtctcaaaaaaaaaaaaaaaaaaaaaaagaatatatagttaggaaaactcctcaagtgattgacagacaggattgagaaccactgggatggggaaataccactcttcccagcccccaaaaagagatgaagaaaattggccagatgcagttttgggaatatggatataggatgagaatggagaatgcagattttatagaattagcgccccctactctgaacacgcccaaatgatgttggctcacttggcacatttgatgtcaagaagagggaaaatattttcaaataatggctcagaatttgcagcaaaaccagataactggtatgttacttcatggtccgtggcttctcctgactttccgtgacctgtgaggacctcctggaccatgtcagtgagaaggcgagtccaggtgaagccccagagaccagcttttttcccatgctttgtgatgcctcttctaccacttcaggctggtggtggccactgccacctctcggtgatgtcactcaagacaccacctctaggcatccccaggttgtggtgtcaaaatggtctgtctcagtgcttcttcctcattcctagaagagattgcactaaggcaaggatttaaagaggtgcatcttctcaggcacagctgtagttgagttaaaataattctctactggccttacaggatttgtaagaatagctttgttttgtttgagttcaagcaaataattctattgtgaagatgcttggccgggatctgtgcctcctgccccagactccagccagtactgcccaggggagagtctgagtcgttctcctaatgagagcttcccaggagatctccgcctagcaagtgcaaaaggcattgactggcctgtgggacagttaagaaacggtagcagttactccctttccaccttcacggcccaggagttcgatagcagatgaagacggtgagtcttcttctaaccctatggttctcccaaactttctcctttaacttattttttgccccacctcattctcttcttcagagttctatttttttctctgtgtcttctataactactgtacaccctatcctggtctttttttttgcattctttagaacttgattgccacatctgtaatcccagctactcaggaggtcagggcagggggatcacttgagcccaggattttgaggctgcagtgagctacgatcacaccactgtactccctccagtctgggcaacaaagtgaaaccctgtctcttaaaaaaaaaaagaacttgatggcctttaactaaaacatagacagctttgtaatgctttcccccaagctctctgggcttcctgacgtccttgcccttttgtttgttcttcctttcccaccccacccagactcagtacccaactctacatctgtgtcttttcccctgactactatttttgttcatgggggtcatgtatgactatctttacccttttatcctttctcttcctaagtgtggggggtaaagccagaggaggatttaggttgagcagtggaagaaagattgtgtcaaaaatgagccattaatatttggaaaattgttttaagtttaaaggcctgagaaatgcataaaattgaaatttaattgatataggcaagtggttatgcaaatgatttttgcccatcctcccattttagtcaggcaattttttagaacaactttcaacaactactttcttcagttgtctttgagatttttataaattaaagaaaaagaaacaggaaaaaaaagtgatttggaagctcatttaaagtcactgtggttgaaaaggcaattatgtggctcctggcagttgtaggagagtggctgtccccaaatcgagctaccaaggacagattgccaaagcccaagaagaatcattgtgtaaa

SEQ ID NO: 4976 - DNA, 6000 bp, Homo sapiens
ttactataagtgaatttgtgagttatctaatgtagattgttaaatgccgtaattcgttgtcctattttcagctctactcaatgatagactgaaagtttatttaggtacaaagctatttttgagagagagtagttatctcaagagactattcaaaattacatttctaatttatttgtattagaattctgatgtgtgttttaataatttaaaggttttgaaattatgatttctggaacattattttgaagtaaacacatatatttttccccctttgtatgaaaatgaaggatagcatttgggtgcttgttctgaaccctcagtcctttgctcatctatgtaaattgtgatttcttattcagatttcacatgaccacgtcagcatattatcttctaaagcgtttctcctgataataattaattcattacctctgtcaaggaggaaaactttggtacccccccaacacataaacagtatttaaataagaggggcccaacattggtgacttcttgagaataaaggtcattccttttgagattagagtgcaaatagcttcttagaaggttttttttctttcaggcagattaaaggctcacatagaaaagttattcagtgttcaggactgtctttagttgctttgtacacctggcactgttttcatatttccttgatttagttttttgctctttaatgaatgaagctgactagggattagcaaaaatactaaccttttaaacttgatgctgattgatttggacaaattacttaacatctctgttctttagttttgtttttgtttttagtctgtaaaatggggaagtaataggacctattttatagaattttgagatgattatttaagtgttcatataaagaccttagaactatacctagctcatagtatgtatttattgttagctactgatgttattattacaaaaatggtgagatcatgtcatgttagggtttggtgagttaaggctttacttgaggatttgaaaaaggaggatttgagcatttcggaaggattattagagtttggctaagtggagaaaaggagggcattctaaatttggtggaatgacgaaagaagatgaagtggggccaggcgcagtggctcacgcctgtaatcccagcactttgggaggccgaggcgggtggatcacgaggtcaggagatcgagaccgtcctggctaacatggtgaaaccccgtctctactaaaaaatacaaaaaattagccgggtgtggtggtgggcgcctgtagtcctagttactcaggaggctgaggcgggagaatggcgtgaacctgggaggcggagctttcagtgagccgagattgcaccactgcactgcagcctgggcgacagagcaagactccgtctcacacacacacacacacacaaagatgaagcagaaaaggggaggaagacaatatcataaaccgttttggccagcgtggatgacgtaagtgtagcagtgagattcttctgagagctggaaaataagtaggtgaagaatgccggtagcctgaattggcctcctctcacttggccgtttcccagggaagcctcagatgaaagggattattatcgtgcttagggatcccctgatacactgctgtgcttctgtgactccaccccaccttcttctgggcctagcactctcttcccacagactgtggagctcaggggctttatcaaagctttagggaaaggaaagatttttgtttgttttgttttctccttcagaagttgtgtgaagtcttttggtattttttaatttcaaaatattttaaaacattttcttttgagagagaactcttgatcttgtcttggaagcacttattctcagggacaatcaaggtctgcaatgaaaagtaaacattttaagttaattgtattaaaccacagtctgcatagtaaggagcaaaacaaaagaaaaaagcattatttttgccttgctattcaccctaaactctcagtatgtgtatttctaattactgtttcagtcctcttcccagaaagaatcttagactacaaaatgatataaattttattacagtacgggcatcacatcacaactctaccactctgttaaggattcctgaatgtttaaaatgagtaacttcggaatatgtggtttaacatcgactgggacccttaaattattttagtccttatgttttaatttgtataaaataaatggatgccctatttttaaaggtatttattttcaaaaatgttgtctatttttaaaggaaaagtattggaatttatagaaaaagtatttttgtgcttattttcacaagttacatttataacatttctgcagactcagcagggttaatggcaaggtgctctttaataggtcgtctcattcaacattctgctcttaaatagatgaattatgttacctccccttatttttctgaaaaggtactcttacagtcagggtacatagcagtcatttcacatacttcaaacttcttttaccaagttgccaatgaactttacatttcagcatttcttcagtgttttcccatcatatttattaaatatctatttgccttggtgaataggttcttcttgtgagactgagtctcgccctgttacccagactggagtgcagtggcgcaatctcaggctcactgcaacctccacctcccaggttcaagtgattctcttgcctcagcctcccaagtagctgggattacaaggtgtgtgccacgacaccctgctaatatttgtattttaagtagagacagggtttcaccatgttggccaggctgatttcaaactcctaaccttaagtgatccgcctgctttggcgtcccaaggtcttgggattacaggtgtgagtcaccgtacccggccatgaacaagttttaattctaataccaactctcatcagttggtaatgattggtttagagcactgttttgagaactctgaggcaatatctatgttcagcagaaaggagtaacttggttgattagtattgtgtggcccatgagcattggatggaagagtgggggcatacatatatttgtcagtctccccaaataaaaagaatagtaatgaatggggatatactgctacattaacatttagacctttgattcattacttcctatgtgaagattatctacagttgtttttctgaactcccttgaaacagcttatgattttccaaattgttattcgtcctgaccttctctgccaaagtgaatttaatcattcctttattgttgctacaatagccctttattaccttaattataatacttattttttctttgttaatcatttacttgtctgattccactgtggattatgaacttcttaaggaaacgacagtattttacttacttttatattcttaatacctaacgcgatacttggtacctgtcacatgtgttcaaaaggtgagatcatttgttatttccttaatgacctggctgttgtcttatatgaacagtgaggcatttatgtttgaaaatgaaatgactgggtctaagtcttagggtgataatcgtgtgaatcaaaagaaaaaggcagatgtttttggtaagaacatacaagttaatgtttttgggttccctagagtgcagagagatttggggtttgagtctccatggctgagagaatggtagtaccattagaaaaatgaagctgggggaagtggatttgggtagatgagtttggttttggagatgttaggttttgattgaaaatatttatttattaactagttttagatggaggactggagataaggatttcatagtgggccagttggatcacttcttctattatgtgccccatagcaacctaccttattattattgcttgtttaatgcccatccttcccccagtaggacagggaacacatcttgttcaaagctgtatcctcagttataaacacagttgtttcacatgctaagcacttagtaaataattgttcagtgaattaatgtctgcactattagttgatttaaatgcatccaatgttgtctttaatttatactgctacttagaattattagttttaaaattaccatggtaatcagtttccatagaatcattggaactttaaacttgtcgagatcttagaaatctttgacaggcctcccacttgtaccttggaactactcaaagtcattactgaccacacttcagatttagccatgtataatattcactgatatgtagttccataattacttattcaaagaaatatgcatatagtgcatgtctttcaggctgctaacaagatagaatgttggcttgaatggacttgtggaggttctatagcagtcttcttccttgtcctctgtagtactttgaccagtggctgtgtgaaagtctcgcaaggagatgaaattttatttatgcttgctggcaacattaggtttttttttttttttaattgattaacatgaggttctggataaacttgattttgtttcctccttccttgtccatgttagcatggtgaatcatgctggttgcaggtttgccactatttgatagtgtaaatgtaaataatagacacactcttatgagctattgggcttagttcaaacactgtcttctataaaacaagtttggaaaaggtgtatctgcctgagactacaatcagaggatataattttaaaattcacaaagtttcatttttaagatgtggacattcatcatcagattaagcttccagtatttattttatagcttcctgaacagagatgatgcacttttgtttagaacacacaacaaatattcccttaatttgaattagtgtgttttttttttttaattcttgtttgcttttcttgtttcagtatcaagataaagaggaagttgtcttatggatgaatactgttgggccctaccataatcgtcaagaaacatataagtacttttcacttccattctgtgtggggtcaaaaaaaagtatcagtcattaccatgaaactctgggagaagcacttcaaggggttgaattggaatttagtggtctggatattaaatttaaaggtaagtaaaccttaatagtccttacaatgcaatttggattgtagacaagggtttcatattttggcactattgacactggtgttggataattctttgttgtatggagctgttatgtacatgttaggatgtctagcagagtccctggcctgtaccccccagatgccagtagcaccttccagttgtgaaaaccaaaaaagtcaccagacattgctaattgctgtcagttgagaaccactactttagactctaaaatgtgttttagtctgtaaatgaggtgtattgcatttaggaaagtatattagtaattaacaaagatttcctttgaatatttataagataataaaatagataattgttaataaaattgtatttccttaacatatttccttctgaaaagtgttgtctagtaaaccccctattgattagacacatgtggcccgggaagaccttcatggatatttaacaaagtaatttctggaggtctgaggctgtaatgggatgcgtggatacttaaaattcttgtgtgacgcctcaaattcaaacttgtaccataggcttaacatgtattatttatcagtgttgtattaatttatcctgttaatacctataggatatttaaattttaagtcaaagacttgttaaatttggggaaaatacttcatcgtatctagttattatgcaggtatccatttatcaggtcctttgagtgtgtttatacttttcatttttctctgtgaagtttgtcagagagtgtatttcctgcacaggcatttttagcatggtgaacagaagcttgagtaattgaatttttgcaggatctttgattaggtgtcttggtttttgaatacatcatggatcctgtaaacaggagctttggattttaatcctccttttttttttttttggtactgtattcattttagtaaaattgtttactgcagttttgacttcattgtctccatgtgtaa

SEQ ID NO: 4977 - DNA, 6000 bp, Homo sapiens
aaggagcacacattccagatgaggagacagatatagcaactaactacaatgcaatgttacaatagacatggcggaggcttcagtgaggccgtggagtatactacagggaactatgaattctgaccaaagaggtccatattatcgtagtgtcctgtttgagctgagccgaaccttgaaatatcaggatgaagcacgcattaggcagatggaaatgaatgggcaaaggtatagcagtcaaaaatgtcatggcacacttagagactggtgaatagttttttttttttgtaactaccgcggtaaatctgtcaagctgtctgatgtcaaatgttgaactttcatggactagaatgagttaaaaaaatctgaatgctttttaagcagtagaattttacaaaatggagggccaaggaaggcaatgagagaaacagacaaaatgctgcatggaataaaactgtcattctcatcctgactcatctgttaacttatgaaaatacacttacatcaagaaatgccagaaaattgctcacttcacgtgcttatgggtagattgaacctaattttgtggcattaaaaccaattttctgctgagcaacatgtcacagaggattacatgaacctttataattatcaataatatttgatactttgatgtcacctttcatcctgagatcagtcccatacacataggaacagataagctccaaggaaacagagatgatattaatacattaagtcacaatgcttttctgtcttcgatattccaagggcagtgtgtttctctcacctttagaagttagtggatgtaggccgggcgtggtggttcacgcctgtaatcccagcactttgggaggctgaggtgggtggatcacaaggttaggagtttgagaccagcctggccaacatactgaaatcccatctctactaaaaatacaaaaaaattagttggttgtggtggtgggtgcctgtaatcccagctacttaggaggttgagacaggagaattgcttgaacccaggaggcagaggttgcagtgagctgagatcatgccactgcactccagcccaggcgacagctcgagactctgtctcaaaaaaaagaagaaaaaaagaaaaaaaaaagttaatggatgtagttgtaaagcagtgatttttttaattattatttttattagctcctactacgggaagtcttaggctacagtatgggccacatctttctgttcacagctttccttggaagatcagcttttgacatatagattctcctactccctggcttctttgcctgctgatctcatcctgacataccagaagtgggctgtgtcttcatcgattctttgacttctacaagagactaacaaggcatcatcatcatcatcatcatcatcatcatcattatccttccaactacaacccccagtactgctgctgcttatgaagtaagcactctatgcactattctactattctaaaaactttatatatgtgtatataccacattaactaattccacaccaacattatagggtagtgctgtccagtagagcttgctgcaatgatggaaatgatctatatctgtgttgtccaatatggtagccaccagccacatgtagctattgagcacttgaaatatggttaatgctactgaggaactgcatttttcttttatttaattttaattaatttcattgacatagccacatggctagtgactattgtattggacaacacagttacagcctctgggggtttattgttacctttttaaaaacaaagctctgtattcatcagcagcacaaacttaataaggacaagtgtgagtgaatggttcagaaatacattattgaagctaaaaatacagatgatccttgacttccaatgaggcttatgctctgataaactcatcaaaagttgagaacatcataggttgaaaatgcatttaatacacttaaactaccaagcatcacagcctagcctagcctaccttaaacatgctcaaaacacttacattagccggcagttggggaaaattatctaacacaaagctattttatagtaaagtgttgactatctcatgaaacttattcaatactaacctgacagtgaaaaatagaatgattgtatggtccatagtcaaaatacagtttctactgaatgtatatggcttttgcaccatggtaaagtctaaaaatataagtagaagcatcataagttggagatcatctgtattttaaaaagaagtcccatattctacactgggagagcttttagttcacccttcccccaccctgttaaaatttgattcaaaagaattccgtggaatatatagggtaacatgaagtcatttctaaacaaagaacatttacaaaagatgtggatgatgtcttaaacctcattgtaatccaactatcccaagtaatcagcaccggtaagcactagtccctctattgaaaattgaaattccaattactgattttccaaaagaagacattctcctccacttacgaaatggaacaatgaaagaggattttctgtttggggtgaccggggagaaacggagtcttcacacaaagtcttagttcatattcagccctcctttccttgaaaccacatccccaggatttatctggcttgtttgtgaaaatatgggaaaacattttaagtcgaagaaactgatcagatgacttaattacatttctgcttagttcagcctgtaacttagactgttagagagagagaacttaagtagcccttggtttgaaccatctgtcgcgaaaatgtgacatatgtttgctttgtttactcaacaaccaagtgtaaactgatacactgaactagagtatccctgaatgatgtggctatgggtgtgtgtgtgttggaggaggggtgtctgatgagggcgtccgtctcctcatacttaccctggaggaacacgcgtacagcacaagagaagtgcggatccgtaggatgtcccccgggtttggggcgcgccccgaggcgcagaccctctttggcgactccacacaatatgcagcccgcctgcaagcagccgctgcagccgaggggcgcgcctggctgatgtgtggttgaatggagagcggcccaaccctcctccttcctcctcttcttctccccgccctgacacccgggcctcaaacttcaaccaaagcccgtgcccttttcaatttacccccctcgatcaaaatgagccattcttgtctgtcctccgcggcggcccattgtctggcgtgataggtttgcagatttgacagctgggcgcacgcagatttgattcaaactcggtctccccgagagatgaacttggacatcagcaaagatcccgagcactgccggctggctcctagaccggtctcccgacccagtgtagacttcggtgccccgggcgccccccggcgtgcgggaaggggagcgtgtgtcaggcgtggggggcggggggtgagcagcacgactgggaaccagcggtcccaggggttggggcgaagggctgtgtacatgttaggctttttttgttgttgttaatttactctcgaaacagccaaaatggaggtcagcttataaattttctaaagccaggtctggccgggtttaaatgcagtgggctgggggctccgcttttgtctccttgtcggagctccaggagagaggtagagactgcgtgtgcatgtgtgcgtgtgagtgtgagtgtgcacgcgctggcgtggacgaacggatgggcgcatcccaggatcgccgctccagcgtcctgggtctgagtgtgtcttgaaagcaccaagtcttgaatcacagccactagtgacgtgggggaaaactttgtgttccgaagaagggtctggctcgattgccctaagaagaaagagcccttgtgcccgtgtatgtgtgtgtgtgtgtctgtgtgtgtgtgtgagagagagagagagagagagagacagagagagagagagagagagagagtgtgtgtgtctggcagcacccgcggccggctgcagaacactgcgtgtcctgtgcgcgagtacgggtccggccgcgggtcccaccgcaagcgggcgtgtgcagctgcggctgcctggcgggcgagcttaggagggagctggagctgcggagcggcgggaacaggagcaggccgagggtcctctggccagaagaaatctggcctcggaacacgccattctccgcgccgcttccaataaccactaacatccctaacgagcatccgagccgagggctctgctcggaaatcgtcctggcccaactcggcccttcgagctctcgaagattaccgcatctatttttttttcttttttttcttttcctagcgcagataaagtgagcccggaaagggaaggagggggcggggacaccattgccctgaaagaataaataagtaaataaacaaactggctcctcgccgcagctggacgcggtcggttgagtccaggttggtggcatttggagtttttttcgttctgtttgggaacccattgccgcttcccgtccctcttccccactccttcttcccccctcctccggccacccctttctttttgctggcgtctcccaactttagggcccggggggcgctcgtggcgccgggctgcacctgccggggcacgccgggactgcgggccggcgcgctcgccctgggctggggtgcggaagcgcccgagtcctgggcaccgggcgagagtgtgagaggagcggacgcccaggagggagccgaggacgcgcggcgggtagggggtaggggcgcaggaaccgggtttcagccccagtcgggacatcggttccccctggcttggcggcctctggagggagacgagtcccggggagaaggagggcggcgactggggctagggattggcgatcggagtggggagggccggcggctgagcgagctcgctggctgacgcgaggagggggaggccaacttcccgggagaaggggctctttcggcgccagggctggctagggagctgccgccgccgccaccgagggctcggactccaggcagctgcaggctccgctcgcgacgctcggaaagtaccgtttatttatttatttgcttgcgttcagcgtctcgggttgaacccaacagacacccccttggactttaggaaccctcttcagacctctccagccctcacctccatccccgtgtcagcggcccctggaaaacacgcacatgcaccccgacctgggtgggggtgggtcctcaccccggtgttggaaattccccaaaggcgggaacgggggaggggagagggttctgtggggggagtctccggcgctctccgctctcatctcaaagcgcgccctcccttccaggttgggtcggacctgaacccctaaaagcggaaccgcctcccgccctcgccatcccggagctgagtcgccggcggcggtggctgctgccagacccggagtttcctctttcactggatggagctgaactttgggcggccagagcagcacagctgtccggggatcgctgcacgctgagctccctcggcaagacccagcggcggctcgggatttttttgggggggcggggaccagccccgcgccggcaccatgttcctggcgaccctgtacttcgcgctgccgctcttgggtaagtcgaggcccgccgcgggctttcttaccctctgagtctttcctagggtcgcttgcagcagcccaccccgccctccgcaccaaaattggggcgcgggtgtggtggatgtggaaggaagaagtgtctttttggggaatgggatcgcgaatccccgggttagggaggcggtggcggcgcggcgctgcctgaagcttttcgggcttggttttgatttcctgtggtttttaatgacccaacttggcgggggactaagaagccctccagcccagggccctgcacccccagagagtctctgggagctcgcggagccgcggcgggcaggtggagttggggagcattggggccgggagagcaaacttggaagagaaaa

SEQ ID NO: 4978 - DNA, 6000 bp, Homo sapiens
atgggctgctgaaatgccatgttctgaggactctaaagtgtcatggagctcctgtgtatggtatgtgaggccagaaggcagatttcatgattgctgttttactgatggaaatacacaagagatcgaagtgacttgctcagggtcatagagggaggcagtgcccatggccgaggcctgaggtctttcgatttctagctcagtccagtcccaccactgcagtatctccaagccacagcattgggatttggttgtctcacagtgaaagtaaacctgtctgcactcagatccttttctccctgttgtcgggaggtgctgggacagtgggaattgtgagactggaggtccagaggctggctgtttgctaagccatccaccaggaggctgagaagtaagcctgttgtgcctgccctgccacattccagggctgttctgttctccccgagggaatgggggcctgctttatttttagctagttcagtgtgacagccttgttctctttctgggcaaggacttggccacttttaccagtcaggaagctccctttagaacctccaggccctactcaggttctcctaggaagagggggccaagggaaggggagctgaagttggagtgccgctctgcttgctgggggcctggggcatttggcttaactgcacagccctaggttccacctgcctcatgtggggttcataacagctaccttacacattgtgcagatttggatggaggagcttagagcacccagcgtgggccctgtccacattcacgttgctagaacgtcagtttcttcatcaagaatggggatcctggctgggcgcagtggctcacgcctgtaatcccagcactttgggaggccgaggtgggcagatcacaaggtcaagagatcaagaccatcctggccaacatggtgaaaccgtgtctctactaaaaatacaaaaattagctggacatggtggtgtgcgcctgtagtcccagctactcaggaggttgaggcaggagaatcgcttgaacccgggaggtggagtttgcagtgagctgagattgcgccactgtactctccagcctggtgacaaagcgagactctgtctcaaaaaagaaaaaaatggggatcccattttcctcatgatttgttgtgcgtaaacagagttcattgaaacagaaccaacagtttacacatgctgagagacacatatgaacctggaagaagagaccgggcaaggctgtgtccccaggatggggtttttgagtgcctgagggatggttttggctttggtgatgatctcacacagacctgtcactgaggagccctgcggtggaattgattatcccagacacagttcctctggtagcttgcaggtgactcagcttgaatatgggagtgggaatcccgattatctttaggcccctctgtccctctgggcctcagccatgcagtggtgaagtgctgaggggaaggcaggggttagaagtgcctggaactctgtaccttaaagtgagaggccgctgccgggggagaagggctgggccattcggggaagtctccgggccttatctgagccagcaaaccctctgagacctccctaggctagtcattactggaggcctcccgcccagcacaggagccacccaacctggcccaggagccaccacgtggtgcctcctagggctcctgggcacacaaagggcccagagggcatggctcctgtacccctggcactcacggtctagctggcggtgtggaccatgcatgtgtccctgcaacgcccaggaaagacacacaccacgaagtgtctcccaggcagatcgactcctacatagtgaacacctaaggccgaggggatgctgaggagaggagtggacggtgtggggtggggcggatcatggcatgtgctcctgagaaggtgagttgggaggtgagctttgggaggaagaaggagctggggacggagaggcccaggaggcagactggacggggcttgcgaggaaggacctttgaggtgatgagccaccatcagggtgctgggggttagtggttgctttagggaccccactagatcagggctgcctcccctcgtggccatttccctccctgctcagagaccggctgccgagagcaggacagaaactaggttcccggctgccacccacactactgaggtggggctgggcagccgcagaagccatgtgcagtcaggaagaggagtccggggctgctgggcgggcacagaccacggtgcgggcccaggctctcagcttgctatggctgttgaacttccttcccagactgtgtgaaaggggaaggagcagatcggacagcttgttgtggctctgatcccagctggaggggagaagaggcctcctggaggtcacactggagtggcgtgcttttggcaaggccaggcagccatgctgttcttgggtggctggagctgtggcggtgatagcccctgtagtaccgcatctccctctccaggaagcccctggccctggctctccctggactgagaggatagagcacaggaccaggaatcagggagcttgctgtccaccccagtctctgcaagtatgtcgccctggccagttgaggaacctcctggccactcattcttgcccagggtgttggaagtgatggtacctgctctgcttctgcagacaggatgctgtaaggaccaacaggtaaacgcgctgtgccaattagagaggcctttataggtcaaagtcataggaacgcacccacttgacagatgggaagactgaggtgcccacaggatggcagagccagaagtcaaatgcaggtgtctacatggccccgactgtgccctgtcatcggaccgggaggggtcctgaggaagtctttagtacggctttgctagtttgagtcttagagagtgtctgcaggaaataggaagcgggaagtaggtttttaaagaaaaaagtgtttatgatataattccatttttgtaaaacaaaaagaaccatccatctctttatgtatgagtgtttgtttagggaggaagatagtcctagtacatagagctctaaagtccttgtacataaagcagggatatctctggggagactgggggaagaattaataatttttacttttatgcatttttatgatgttggaatatattttacaataagtatatattactgttattgcttcttttttgttgtttttttgagatggagtttcgctcttgttgcccaggctggagtgcaatggcgtgatctcggctcactgcaacctccgcctcctgggttcaagtgattcttctgcctcaccctcccaagtagctgggattacaggcatgtgccaccaggcctggctcattttgtatttttggtagagacagggtttctccatgttggtcaggctggtcttgaactcccgatctcaggtgatccaccagcctcggcctcccaaagtgctgggattataggcacgagccaccgcgcctggcctattattgcatctttaaaaaaaaaaatgaaacagtgtaaatgtttcaagtagttttgttagaatctttcatttgccatttttttcaggcatattgcctcccagctttagttttctaccaatgggtcaatagcattttggtagatgccttttttttttttttttttttgagatggattctcgccttgttgcccaggctggagtgcagtggtgcaatctcagctcactgcaacctctgcctcctgggttcaagtgattctcctgcctcagcttcccaagtagctgggattacaggcatctgccaccacacccggctaattttttttgtatttttagtagagttggggtttcaccatgttggccaggctggtcttgaactcctgacctctcaagtgatccacccgcctcggcctcccatagtgctgggattacaagcgtgagccaccgtgcctggccggtagatgtatttttcaggcattgagatgaaaggagttaggggtacatgattatgtcacttagggatgggagggagggaaatgacacttgatgcttactttgtttctgcacattaaaatcctccccataaccctctgaagtggaggatttattatctccatcttaaaagtgagactcagagagattaagtaacttgtccaaagtcacacagctaataaatcggatttgaacccagctctctgtccacagccctgtgtactttccaccatgtgaggaaaatggaaatgcttaaggtgaagccccaaatgggaggttacgagccctggaatctagacccagctgccatttctaaactccccaacttagcttgaatcatgggtctgtttcctctcctagataatggagataatgatgtctttcctgcctacttcactgggctgcagtgacaggagaaagggaactagcattaaagcacctgcttcctgcgtggcacttggcatccacaagctcatttcacttctttctacacagttcaaatgggataatgtatgtgaaggtcctgtatctgaagggccagtgcacatgtgagccattgctaattgtgatgttaataagcacccaggacccgttctctctgagtcagtgtccttagcaaagggaagtgaattctgatgttgaaatctctgtcctcccctaagctaacatctttcttaacccttcagggtgcacgccacaatttccttttgtaagtggagcgccttgcttggaaagttcattttaaaggcctgcgtcagcagcttcagtcacgcctgctgttctgcagcattctcgatcctcacgggagggtggatgagagagggagtgaaattttccatggctgtgcacccttccacggggtggggtgaaaatggctgggatggttaccagtggttactggtgcctcctgctgcgaccggcctgttcacttgggcatgtccaatcttgcgtttgttttttgtgcatgttctgttgggagcaggaggtggggctggggtcgggcacagaaatgtttgtgagttgattgcagtgctaggccattgagttctttccttggttggagggctctgagccagggaagcttggcgaggctgtgtgttctctgctgatgacatgtcctcctgctctgcgggggtccaactttgggagccgctgagagcttcaaggcccccttggtccacaagaaggagaatccaggacaagtgtctggaaagtgtttgagcaagagcgcccgccctgtgcagccggtctggctaccctcataggaagggctcttcactctgggcagcggtggacagaggccctggaggctggatgcgggttctcaggcaagagtctgagggacccagctcggtgtctgatgtctggtgtctgggactgggcgccttcccatttccatcccagcctgaccagactgaccagagtcccacatattcgtctcagacactggtttgagagggagcatttgagggcctgggtttctgtcatgactcctgggaacctctgtcttctgatagatggtccacagaccgaggcttgcagtggaagcagctggaagtggtgctgtgcggtgtcctccccaactcccaaatggagtgtggggagggattcttcgggcactgatgtttggctggagcagtaaagcagcggtgatgtggaggcagcacctaagagaaggggacaggattatggagatgtgagtgtgtgtgtgtgtgtgtgtgtgtgtgtgtaagtacttgtgtgtgtatgtgtgagtgtgtgagagtgtgtgtgtgtgagagattgtgtatgtgagagtgtgtgtgtgtagagagagagggaagaggggaaaaggaaggaggagagtaaagatctggagatgctgtggagaggaggacagaaatagaaaagttgaaaggccagactttggccaaatccccaaagaccaagagtcagcctttcttcctgggtttctggcagagatctggagcaactgggcaggagagatttctccaatgccctttcttcctccctctctccttcaacccactgcccattcc

SEQ ID NO: 4979 - DNA, 6000 bp, Homo sapiens
cagtgtggatatgatgtcaggattcaggtgagaactcccatgtatacaacttgaagagttctttaggttttattccctgtggttcaacattctgatttagcacgagtgcaaattgaagtgggaaaactcagggcagtgaagctcttgatgccacctaagctgagcataggcacagggtcacatacactgcttcctgagctggcggcaggactcctgggagcagtaatggtgattctaagccttgtgagctgcagtcccaacatctaggagttgctgcatttaaagaggtgggatggaagttttgagggacaaagactgcatttttaggaggctccttggcatcccagaagacgtctctcgttaaggggacagctgcaggagtgtaggtgccttgttctggcctccgtgtggaggcagtagtgacaaagagggaggcaggcctggggcaggggcgaggctctgtcctccaggacttcctttaggctgtagggagtgtgctcttagatgcaaagagaaggaagaccccaccccactccagtccttgttctagtggtctttggtgatatgaatgactgctgttctaaaagggaggagtctcgaggaatcttcagagaccccacctgttagccgtggatatgagggatgtgtccctacagcttggggaactgtcctcctttagggacctgcatttcacagggagaaagtgctgtaaactgaatgtgtgtgtctctccaaaattcacatgttggaacttaaactccaatgtgatggtatttaagaggtggggtcttggggaggggattgggtcatgagggcagagtccttatgagtgggatgagtgtccttatgtaagaggcccagagagcttatttgtcactccactgtgtgaagacacagtgagagggtgccatccatgaaccagaaagtgggccctcatccgacactgaatttgccagtgtcctgatcttgaacttcccggcctccaggactgtgagaaataaatttctgttgtttataagccacctaatctatagtattttattctagttgcctgaatggactaagataagaacctatatcaacatcagcttccctaattatgattttttttgccacttatattaatttgctaaggctgctgtcacaacataccacagacagaaatttaagccacagcaggcatttattttctcacagtttggaggctagaagtccaagatcaaggtgctggcgaggtgaggtgggtgccttcagagggctgtgatggaagggtctgttccaggcctctctcctggctgcaggtggctgtcctctccctgtgtcctcacgtgggctcccctctgtgcatgtctgtgtcctgatctcctcctcttagcaggatgctcttcatattggattagggggcaccctgatggcctcattttagcataattacctctgtaaagagcctgtctacaaatacagtcaccttctgaagtcctgggggttaggacttcagtgtatggattttgaggacacaatttagctcctaacacctctaaaattaggggctaatactccatcatgttgccatggaggaggctgataggtgtgagggggctggggccgattgccctgtgtggggtgggcagggctggggtgtgtgctgggatggttactgacaccccaccggggttagcagtggagggagctggttggctggcgactgttgcctgctggctctgtctcctggagctgagcttactggtgggatgcccgctccgagaagcacccttcttctcttcttaggagactctggacccccttctccaggtttctctccctttagaggcacattttcctccaagccttcaagccccttctctttctccagatgtggatggtggggaagggtatcttgagaaagttgggctttaaatctctggagacctgaaaggaaacagccagggagcctttggtcagacaggtggtgcgatggcacagtgcccagcgaggggcagaggctgagaggagctgacgagcatctcctggagagtcctccttgcctgcctcctggatccctcgttcccaccctgctttgccctgctccttaccagagctcactaggggatcaggtggggacatcgtgtgtgccaaaggctcagacccctgtggtgttttcctgcagctgaagagcaagtgggatgagtccatcttcacgaaaggctgcatccaggcgctggaaagctggctcccgcggaacatttacattgtggctggcgtcttcatcgccatctcgctgttgcaggtgtgtcccaggagcctataggattggcaggtggccttttttcatttgagattgggcccttaacatagagtgcatgggtccagtttgggtatggtattaaggaagcttgcagaagaaaaaaagggattcaactggatgtccaaggctgagagagtgtatgcgtgtaagtgtattggggaggagaatggtggcttccataaacgctacctataggggggccctctgggcgggggcaggctgggaggggcttgtggccctgcacaggtcctggtggcagccctctccagagggcccaatgggctgcagaagggtcactgcctatctggaggtaggtcaggagtgtgctcggggtgggccatcaagtgctgcagatggggaggtgaaacccttggtcacctggggcctgagggtggcctgaggctcacgtgtgtgcacttgccccaggacctctcctcctgtctctggcccctgggctggagttgtcaggtatcttccctgtccatgagacatcctctgaggcctgctgccgtttgtggcatcctttcctctcccaggctgtgcttgttcatttgaaccaggttgcacatgtgggaggatgttggtggctgagcaggcagtgaggcctggggtgactgggctggttggtgactgctaggagaagaactggcagagaaagtcaagaattcagtgatcagagaaaccaggagtctttccagtgctgttcagggcttccaagaagccgcagcttctgggtccactgatgcatttcttgtgtggaaaataacaccatttagaaagtgtttgactctgtttttgccttgaagagggtgactgaggtagacccagggccaccagccacccacacatgccttcctccttcaaggaagactaagaaataggaggaagcaactggaaaaggaaagaaaaaagttatttgcaaaataggcaagggaagaatcagacttcagaaggactgactagtcaaattagaaccacacaagaatttaaagggaaaaaaagccatttccagaggtcaccaagttcgtgttcatctgttcacgttagaagaacatcagtctcctctcatgatttccctgctcaccaaggttgggatggatcttcagacattattagcacagccaaaattggggatggccttggttttattatggaatcgacgtttacaggaaacattcaagatttattattttgggaatgagaaccagtcagcgtgaccctgttatttttggtttaacccagggacaggcgtgtcctgccccatggcttgtgacatacttaatcatgttggaggcaggacagagtgtctgttttgcttgtggtgcctgtggtttgcctcttctaggctttgggaatgtaacagactagaccccaggaccccttttttgcgggaggggtggctgtgctgtgccactcgctctgcggtgctgtctctacgtcttcagtcgcagctggggggtgaggagaggcgtgcagtgggagctcccaaccccaccctccgctccctgccctctgcctttgggccccagcaatggccgctgactctgctggtgttggtttcagatatttggcatcttcctggcaaggacgctgatctcagacatcgaggcagtgaaggccggccatcacttctgaggagcagagttgagggagccgagctgagccacgctgggaggccagagcctttctctgccatcagccctacgtccagagggagaggagccgacacccccagagccagtgccccatcttaagcatcagcgtgacgtgacctctctgtttctgcttgctggtgctgaagaccaagggtcccccttgttacctgcccaaacttgtgactgcatccctctggagtctacccagagacagagaatgtgtctttatgtgggagtggtgactctgaaagacagagagggctcctgtggctgccaggagggcttgactcagaccccctgcagctcaagcatgtctgcaggacaccctggtcccctctccactggcatccagacatctgctttgggtcatccacatctgtgggtgggccgtgggtagagggacccacaggcgtggacagggcatctctctccatcaagcaaagcagcatgggggcctgcccgtaacgggaggcggacgtggccccgctgggcctctgagtgccagcgcagtctgctgggacatgcacatatcaggggttgtttgcaggatcctcagccatgttcaagtgaagtaagcctgagccagtgcgtggactggtgccacgggagtgccttgtccactgtccccctgtgtccaccagctattctcctggcgccggaactgcctctggtcttgatagcattaagccctgatggcgccggtggcgcggtgggcatggttcttcactgagagccggctctccttttcttaaagtgtgtaaatagtttatttataggggtaagaatgttctcacaccatttcacttcctcttcctctcctccagcattctcctctgagcagccttagatagtgtccatggctggagccgaccctttgagtccccttgagtgtcttaagaaccagcccacaacagcctctctttctcctccacatactgcagcctccctccatgcatcccacatacaagcactcccccactccccagcgtggcctcactgtcttctggtcttggtgctactgaaattgtcacccagaatttgaatcctgaccctccccactgcaagcccagggagccccagcccaagatggccagcctgaaactgttggccagggctcctcttgtggccatgtacccagggctggctggcctgccatttgcctctccccggagacagccgttcttctgcaaccacaccccgtgcctagccacaaccccaggctgcagctgctcagaagctccaggcattttgtttctggtgaccgcccctaatgggatatcggtgatcactggtccacccttcctgtcagggcttttctggggctgctcttggaaatgaagtcttaagtactgaataactcccctggggatagctggggcatttgtctagctgggctactttctaacactttgccatagctcagaccacttctcatcgttcagggatggactgcaaccttaatttacttgccggagtgtacattctagtgtggtgtatactggtggctgttgatgatgatttttttttttttacacaattctctgtagactaggagaagaatgcttgtgtttttcggaagtgtgatgcttctctttgactgccaaactcttttatggaatatatctttatattaatgctgttttggtcatttttgtttggggtcactattgagatattgctaagcatctcagtggtaaacgcggctgccagaggaaccaagggatagggtatgtagaccttacagaaggatggatggtaaaggcagtccatcatcagcacaatctgacttacatttcattgagtaattttttttttttttaagattctgtatggcagcactttcagttgcccttgtgtgccggccacagccgcacaagttggcttgtggtttatcccccgctataagtgagagctggagaaacttcaactccataggtctagaggaaacattgttttaggttatttctgtccacccctgtgcgatactatttattgatccaagcagaagagcttggggacactgagtcgaagtggggacat

SEQ ID NO: 4980 - DNA, 6000 bp, Homo sapiens
gaagagcccctttgtcaggatctcagtttttctaggtaccacctgtgggcaacagtacttttttaggatggggaaggtagcattccttgggttacatatgtgtcacagccgcagagacagaacaggccaggtgcagatcagttcatctgcataccaggaagagctcttgtatttgtgaggggagggcgacatctgttgtctagcccctctgaggatccagcagaacttcagttgcagctgagggatgaggagcagggatagcattccccaggcagtctgtggatgcctctctccaccctttctccccaagaggatagtcttcacaagtagttttctctcctgcaagctccttccagcctcagcaccccctgtaggtttcctgaagcccagagtttgacccgattgcctctgcttggttatcctcagttgctactgcaaggagcagaattccatcccaaagtgaaggctgtgcctgctacatttttttggtgacctgcccatgggtgtgtgctgtgcccttgggcagataaatgtggctcacagagactagatggtaacttattttactgggccctttggtggatggcttagctgaaagaatgaccatgtcgatgtggggatatcagaactcctctgtcttgagaaacaaggagggtgaggggaggagggtcagaggtctcaacttggacatcttctcttcccaccttcagaatttaggagcttcacctttcttgttttaatccctatggacaatgttaaattagcaactggtcgtgattccagcatttcttatgactgagcacttttgagagccttaaatctctttcattttggagtctcccaaagaagcccttaggagaatgcctctggcaacactgagagccagaggcaaaaccattcaagtctctttcttaaggccagagcaatgagatgttgcttaaccatcaatctggacattttcctcccctggggaggagagaaggaataaatctccaactgatttaagcccttctatttgataggcttagaggtgtttctagaaaaggcaccagagtgcctgagttctttccccaatttccctgttaatataggatcttatatacgttctgagtcaacactgccctagggtcttgcagcaaataacaaccctagaagctcccttgctcattagagagagctctggctcaactgatggtttcccgagtaagatgcaggtagatactgtatctggggagatgtcagtcaccacttggcttgagggcagatcacctggggcctcagtccccactctgagggaatgtggagagagctcttgttggggctgactggctctgtggctctcctggagatcttataggaggaatagaagagaagaaaggaggtagggttggggggaaaaggaggttgtttaggaaacagctatcaatggctgcaaaagaacacaggacaatttgttacaatgtgtggtgtctccaactgcaactaagttctgtggccactgaggatctattgtttctagctgtttccctaggaatgaaacattgttaagagtttctatcaaggccacagcttctgcctgctagagctactgaacagaggaagatatggggacgcccagcagcccacttcccagttagagattatatctggcacctcctgagcctgcaggcctccaggaaggtgagggaagacaatggtggggtgcttcactgacagcttgaagaatatcccaccattgtctagagagcgttgcccggtgagagtatgggctgacagggatgtggcaaaggcgagacagaggagttgtgcatgtatcttgggggaggtggatggtatagctggaacgtgaaatctttggtaaagcttaagacactgtacaaattggatttatgcacagggctaatttttccctgatttggccacactgactgcttgaatatttaaatgcttttttgtaccagttgataaatggccatagtctgaatgccctaagagtcccctacaactaagggcttctcaaattggtcagtgcccagattgtactggctgttattttattttttgagataaggtcttgctgtgttgataaggcttgagtgcagtggcgcgatcttggctcaccgcagcctcgacctcctgagctcaagagatcctcccacctcaacctcttgagtagctgagaccacaggcaggtgccaccatgccaagctaatttttaaaattatctgtagaggcaaggtctccctatgttatcccagctggtcttgaactcctgggctcaaggggatcttcctgccttggcctcccaaaatgctgggatgacaaagtggttcatactacacctggccctctgctgttattttaataacaccctggcttatgggttctgagctctgcaggagtagtttgtggcccttaaaaccttagagaaggcctagatagaggtgaaaggagatagctaggccctgggagaatgcctttaagatgaagaatgagtggtaagagcactattctctctcctgcctttctgactccttagttcctgggattctttagcttatctttttttcctgggttgagaggttggggggtgatatttttcaagtggtaaaatctaagggatgtggttatccctagagttcatggtaaagccagttctcacccaaagcctgacgaagacagtttctagcatccagagagtgtctctggcatcctttcccagatggaactcacactgattggtgactcccccactgtcttctcctggcaggggtattctactattttgtcagtgccctgggcataacagcaggagctcatcgtctgtggagccaccgctcttacaaagctcggctgcccctacggctctttctgatcattgccaacacaatggcattccaggtaagaagttgtctctgctcagctgtttgtcctccacactattaatgatccggggacagaaaggagggatcagcaccagagaggagccacacctgacagccatttcactttcctctctcctgtagtcacctcaagttccagttcagtccttaagtccataaagcatgaagagacttctgagtcttggaaaagggaactggaagataattggaaaatactcctgatgtgtaggaatatttttgatcctaaggtccctgtgttgtcacacaatctggccgttgtggctcttcatcataaggggctttggcacataagccagagactgaccttagattcctgggcagacactggacaataaattcactatttaaggtaaatatcttagggaggcagagctgggaggatcactggagcccaggagtttgaagctgcagtgagccatgatatcaccactgcactccagcctgggtgacaagaccccaactttaaaaaaaaaatttcaaaagtgaataacttaggactccaccacagtgggattgaagttgatgttcccagactcgtgaactcttattttgagataatgagagcaaacacttttattgcactgactatgagcctggcactattctaagcatttgatataaagtcctcacaaaaatcttaggaaataggtactattatccccattttacagatgaggaaaccaagttacagagagattagatagaccagcccaacattgtggccctttcttgggctgccatggtggctaagtaaaacattgaggtttgttaaggcaaaaaacaaacctgggcacggtggctcacgcctgtaatctcagaactttgggaggccgaggtgggcagatcacaaggtcaggagatcaagatcatcctggctaacacagtgaaactctgtctctactaaaaatacaaaaaattagccaggcgtggtggcgggcacctgtagtcccagctacgtgggaggctgaggcaggagaatggtgtgaacctgggaggcagagcttgcagtgagctgagatcgcgccactgcactccagcctgggcaacagcaagactccatctcaaaaaaaaaaaaaaaaaagtttatagcaaagacagaatgaagggaaatggggaaagggaatgcatcatagtcattaagctgtagcaatgggcaaatgatagcatgtggcgtttggcttagcttggagcaagaggaagaaaggaaaccaacttagtggtggcaatatcccaagaacttgccacatttgcatgatcatctctgccatagcagcttataccttgaaggcttccaaagttgtcctgtggagcaaaaggaaggaagagagatattggtacattctttaagggatggaaaaagtcatgaagaagcccagaggtcgtttgaaaatgcagtcatgatcacgagttgcatgcctggccttgttattgggttgtatgagctcttttgcaaggcaccagaatggtgcaccctgcagctgcagcttatctactgattgagaccctaggacacaaggctgcctgcctcatgttccccatgcctagggattaggtaccccatgaggatcttttccaacattccttgcttaaagaattgcaatgttctcacttcttgaaactctctgagctctgtatgatttacctccgttccacccaccatataactttcaagaaacagcagttctattgctatggtcctgggactttaagttgcttttttctacttaagcttcagtggcaagttgggagaagaagggaggcaactccatgactcctttggagcccagattcctgggtattttgtgaggttgggctgagcgccttgggctcttgatacctgtccattgggattctcctaatagggtgtctatcctcaagccttacattcctcttctctctctccccagaatgatgtctatgaatgggctcgtgaccaccgtgcccaccacaagttttcagaaacacatgctgatcctcataattcccgacgtggctttttcttctctcacgtgggttggctgcttgtgcgcaaacacccagctgtcaaagagaaggggagtacgctagacttgtctgacctagaagctgagaaactggtgatgttccagaggaggtgagtgaagccctgatggaggtggggatatggccctggcacctggtcattagggaccccattttttctcctgagactttcaaaatataagctgagaaatttgctgggtttgcatgttcacaatcttaatttaaaatcccaatttttaacatcccacgggcccgtagccatagactattgctccatttctttctctctgactatcttaattaaacccattacattcaagagatgtttattgtcctaggacagtcatagattcaaagatgattatagcctagttgcctaggtttgtttgtttgtttttgtgtttgtgtttcaacagtctttctctcttgcccaggctggagtgcagtggcacaatcatggctcactgcagccttgacttcccaggctcaagcaatccttctacctcaacctcctgagtatctgggactacaggcacacaccgccatgcctggctaattttttgtggggacaaggtctcactcactatattgcccaggccggtagcttagttcttaccttcaaaaagtttgtagcctatcggggtggagagataagccaagtatccagataaccatggcataaggcagaatattttctgtactatgagaggtacaaaggggagggagattgctcaatgggcaacaccaaggaagtgatatgaaataaatagtgttggaatccaccaacggatagaaatttttacaactatgtgtggggagagacagtgcaaacagaagaaacagaatgagctaaaacacgaagcatgttccagcaatagagtccttttgcttgaagtatagggtatgggaagaagtaagactggagagactaatgccattcttgtcgagtcctaaaagcagacttaggacttaattcaataagcaataggaagccattacatcttttgaactgcaatgtggcatagttacggacgtgctttaggaaggctgcttt

SEQ ID NO: 4981 - DNA, 6000 bp, Homo sapiens
cgcgggccctgcactcagagcggccggctggccctgccggccccaggcaatgaggggcttagcaccccggccagcggctgcagagggtgtgctgggtcccccagcagtgccggcccaccagtgccggcccaccagtgctgtgctggattttttgccaggccttagctgcctcccggcggggcagggctcaggacctgcagcccgccatgcctgaacctcccccaccctccgtgggctcctgtgtggccggagcctccccgacaagcaccggcccctgctccactgcgcccagtcccatcaaccaccccaagggctgaggagtgccggctcatggcgcgggactggcaggcagcttcacctgtgacccagtgctggatccactgggtgaagccagctgggctcctgactgctggggacttggagaacctttatgtctagctaagggattgtaaatacaccaatcggcacggtgtatctagctcaaggtttgtaaacacgccaatcagcaccctgtgtctagctcagggtttgtgaatgcaccaatggacactctgtatctagctactctagtgggtacttggagaacctttgtgtccacactctgtatctagctaatctagtggggacgtggagaacctttgtgtctagctcagggattgtaaacacaccaatcagcaccctgttaaaacagaccactcagctctctgtaaaatggaccaatcagcaggatgtgggtggggccagataaggaaataaaagcaggctgccccagccagcagtggcaacctgctggggttcccttccatgctgtggaagctttgttctttcgctctttgcaataaatcttgctactgctcactctttgggtctacactgcctttatgagctgtaacactcaccacgaaggtctgcagcttcactcctgaagccaacaagaccacgaacccaccgggaggaacaaacaactccagacgccccaccttaagggctgtaacactcaccgcgaaggtccacagcttcactcctgagccagtgagatcacgaacccaccagaaggaagaaactccaaacacatccgaacatcagaaggaacaaactccggacacgctgcctttaagaactgtaacactcaccgccagggtgtgcagcttcattcttgaagtcagtgagaccaagaacccaccaattccagacacacaaaggctgaggagtgtgggcacacggtgtgggactggcagccagctccacctgtggccacggtgcgggatcgactgggtgaagccagctggcctcctgagtctggtggggacttggagaacctttatgtctagctaagggattataaatacaccaatcggcactcagtatttggctcaaggtttggaaacacaccaatcagcaccctgtgtctagctcagggtttgtgaatgcaccaatggacactctgtatctagctactctggtggggacttggagaacctttatgtctagctaagggattgtaaatacaccaatgggcactctgtatctagctcaaggtttgtaaacacaccaatcagccccccgtgtctagctcagggtttgtgaatgcaccaattgacactctgtatctagctactctggtagggacttgggtaacctttatgtctagctaagggattgtaaatacaccaattggcactctgtgtctagctcaaggtttgtaaaccattcagcaccctggtctagctcagggtttgtgaatgcaccaatcgacactctggatctagctaatctagtggggacatggaaaacttttgtgtcaacactctgtatctagctaatctagtggggacatggcgaacttttgtgtctagctcagggattgtaaacacaccaatcagcaccctgtcaaaacggaccaatcagctctctgtaaaacagaccaatcggctctctgtaaaatggaccaatcagtaggatgtgggtggggccagataaaagaataaaagcaggctgtccgagcccggagtggcaaccacctggggttcttttcacactgtggaaggtttgttctttagctctttgcaataaatcttgctactgctcactctttgggtctacgctgcttttatgagctgtaatgctcactgcaaaggtctgtagctttactcctgagccagcaagaccacaaacccaccagaaggaagaaactctgaacacatctgaacatcagaaggaacaaactctagacacaccgcctttaagaactgtaacactcactgcgagggtccgcggcttcattctggtagctaaacatacacagatcaatggggcagcataggggccaaggcactgcaggggttctcatgactctgagtcaggtgctgtcttgaccgactggttgtgtgattccagaagccttctttcacctgaaaaggcctcactggcctcacctatacagtaagtttgcacatcatctccagggtttctttcatttctacccactgtttttgtttagtaatgatgccttgcagtcctaatgatcttggaatcaagaatggtgactagagaacttcaaagtggaaagagaggctgggcatggtggctcatgcctataatcccagcacttcgggaggccgaggcaggcagatcacttgaagtcaggagttcgagaccagcctggccaacatggtgaaaccctgtctctgctaaaaatacaaaaaaaaaaaaaaaaattagccaggcattgtggtgcatgcctgtaatcccagccactccagaggctgaggcaggagaattgcttgaactcaggaagtggaggttgcggtgagactccgtctcaaaaaaaaaaaaaaaaaaaaaaaaggagagagtaggatggctgagccatgacgcagtagcaatgcttctttttttttttttttttttgagacagagtctcgctgtgtcgcccaggctggagtgcagtggcgcgatcttggctcactgcaagctccacctcccgggttcacaccattctcctgcctcagcctcccaagtagctgggactacaggggcccaccaccacgcccggctaattttttgtgtattcagtagagacggggtttcaccgtgttagccaggaagcaatgcttcctattctagcgccttgctaaactatgtgtgctgcagactgtgttcgtgattccgaatcctaaaaacaaccgtcctaggcttgtctctcagcctagactctagactgatttggctcatttggttgtcttggagacgttctaattctgaagggggcagtggtcccttctagaagatagctggtctgcaaatgcacacctctgcttagtctgaatcctaaagttatagcttgagccaattaaagtggcttctcatttttctctcactctgatctcaaggagccctttttcttctagtaatctagaccttcctcttcctatcacagtctcaaggattgtgcccccaaagcagatgcaaagccctgtctaccccttctccttcccctgaggtagagctttatcgaaggtttctcttggtaaacgttagctttctgaactaagggccgtcttttttttttttcccgcttaagcccattgcataacaatctcttgttttaatcttttgcccaacactgcttttcttactgtcagaggttactacaagtgtttgaacaggtaacttctacctttgaacttctgttgtgacagattcaaaggttccaggggagtgtgttggccactctcaggacagtacacagtagcttcgggtgtgtcccagtcagtcctaggagctgtggaaagagtagaagtgcctgaatgtggtgctgaatcaatacagccagctgtgaggggagcacttcctggacccaggaagggagagtcttcttccaaggtaagctgcaatgatactacctgcactatattgaatatatctgtgagatagtagggaggggattggtgtggggaaagaaagtgggatttgttatgctcaacctaaggctctttaataacatgaaattacatttagttgaatagtaatctcagctgacttgtgtgggaggcaaagaaaaaaatcagttggaaaaggggtggagatatatgagctatccaaatgctagcaggggatggaattggaagggaacactgattttggtaagtgtactaaagcacaccaagccagaatgtgggtctccttcatcttccattaagaaatttctgtctcagtgtagttagaaggatcgtgcgtcagctgctgagggcagagagtcccatttggcagacagagaggaagggaatcagcagatattcgattaggtgctggggactgttctgggtagattatgtatgttacttcattggtgtatctcatcctataaagcaggtggtatccttcccatttcacagaggcatagtgcgtctccaggctgttaaacagcatggcctaagctacatagctccaaggtggtgtggctagaatttgagacttgattggtcagtttccacagcctgcccaataatgcagaattgttgtgggttgccaaagctttcagttaccccctgaaatcctgagggtgtcactcatgtgcacagaggattgataggaatacaactctgatgggcctttagaatgactcaaccttcctgaacttgagcatttttactggaggaggtcaataaaaaaaaaagaaataaaacctcatcttcccctggccctgagccctttggtgaaggaagacagcacccggtgaagggctcagaggtattagtgtggctgagattcgacacccactctgccatcctctgctctcctctagaggaagttgcctcttggggagctgagttcctgaaactaagcaaatgacaagtgctcctccagccgtgagatgagccagaggatggaatgccacaggccccacttcgtctcccagcccttcatctttcttccatgtccaaaggcggctccccagaggccaagggctcagctcttgtgttctctgagactgtggcacagctcaccctggcttccttagtaggaagcttttaagaactgctctgtagaaagaacaaaccctaatctagctccagcaaagagccaggatcatgctgaacttcctgtgagccttcgtgggggatcgaggctggagaaagtgctgcttcattctgaggtatctgtgaggtggggaaggggcaggaaaatttgtcatttcggcttcctaatctgagaatggtagctccagggcccccctgtagccacagccttaggcggatcaaaaatgagactaatacaggtcctggtaatactgggggtgaccaaggcgaaagaatcgatttttaagttaagttttgaggtgtgactgtatcagagggaaagaaaccatgccaattgaacgactcacagccctgtcgttcctgacttgcttattttcttggctttgccagaacttcttcagagaccaaggcaggcagctctggcgactggagagaggcggggtagaaggtgtttgtgtgggtctgagggctgaggtaccctctagccagactttcctgtcctccgaatccagcagggaacagcgtcacctctgcctctgtgaggcttctgatctgagggggcacctcaagtcattttagtttgtttgttttcatcttagttgaaagatgataggccacaggagggcagggtcaactgtgttgaggcaagctggcttttgtgtcggcccttaggggctgaggtgaaaggctttgacacggagccagggtagctttggcagcttctcccctcctggtcagaacacttccactttcagttgtgaaaaaaaaaattaaaaccaggaagtgaagtccccgagcacgttagaaagcctgacatggcctgactcgggacagctcagagcagggcagaactggggacactctgggccggccttctgcctgcatggacgctctgaagccaccctgtctctggaggaaccacgagcgagggaagaaggacagggactcgtgtggcagg

SEQ ID NO: 4982 - DNA, 6000 bp, Homo sapiens
tatgtgtacgtgtttattgagtgaacacttgaataaatgttttaatgggatcactttgactgccatgttgagaatagattgaagtggggtaagggccagatccaggagaggcccttggcaataatccaggtgggaggtcatggtcacttggaccagagaggtagcaagtggtgagaagtaggattctggttataatttgaagatggagataacaggatttgctgatggattggacatggggtaggatatggtttggatttgtgtccccacccaaatctcatgtcgaattgtaatccccagtgttggaggaggcgcctgttgggaggcggttggttcatgggacagacatccctactttctgttctcatgatagtgagtgagttctcctgagatctggttgtttaaaagtgtgtacctctctcttctctctttcttcctcctgctcctgcgatgtaagaggtaactcctccctctttgccttccaccatgattgtaagtttcttgaggcgtccccagtcatgcctcctgtacagactgtggaactgtgagctaattaaacctcttttctttgtaaattacccagcctcaggtagttctttatagcaatgcaagaacggactaccacagggtgagaaaaacttaagtatgacttcaagatacttttcctgaacaactggaagaagggagtggccctttactgagctagggaaggctggatcaggattctgaggggaatatctggagctcagtttgttaagtttgagatagcttgttagataagtggaaccgtagaataggcagttgtatacatgggtctggaggtcaacagtgttcaaggctggagataacagtctggaagtcatcaatatttaggcctgtgagaatgagtaacctcaccaagacactgagtatatataggaaagagatccacagaccaccctctgggatactccaacaatagaggtctgggagatgaaatattccttagggtttcttatgtactctagaatgaaagacaattgtaatcgtttctttttttagaaaaagctttattgagataattcacactatataaatcacttatttaaaatgtatgatttagtgcattcacagttacgtggacaacaccacaatcaattttagaatattagtatcatccccaaagaaaccctgtaccctcctatccttagacaacaactcatttcccctgtacctaggcaactagtaatctaccttctagctttatagatttgcccattctgcatatttcatgtcagtggaatcatactatacttggtttgtttagagagaagtggtatccattagtacctagcttctagattcaatagataccaagttacttggtaaaggtgggggctataagatctctccaatgtaaagatacatttcctgtttgcaattagtaacaaaactgtggggtgatattttgagactatgaatattctgtttcctaacagcatttcatctagtggttttagtgttcattgaagatgcttgtgtaaatcagtgagacattgggattacaaagtggtgattttctattactgtcatatcttcagaaatgatgtagttcatattatttctaattcagatgtattgtacacagtttgttcttttgttttttgtttgtacctcttttctctcactgtgaaagtcttggttcctaataacaaataaatgttttcttttattttaaatataatcatatcaacatatttacattatccaataatgtacattataatggtctggaagtcttgttatacctaaaatgtttcacattacagtaccaagtaggaatgctggatcataggataaaagcatatatgattttgttaaatagtaccagattcacccagtagggttttaccattttgccttcttgccagcaatgtaagagtttctgttttcttacagcctcatcagtatagtgtgttgtcaaacttttgaatttttgccagtctaatagatgagaaatggtatatctgtatagtatagatttaaaaaacttttctattatggagatttgtgaacatccacaaaaatagaatagtgtaaccaatcccatgaacaccatcatttagccccagcaactaccaaccctgccaccagtgcctccgtttattcccttctctaaaaattattttgaaacaaatcccagataacatttttttcttttctttcttgcttttttcttttctttctttctgttttttttttttcttttttttttttagaatgggtcttgctctattgcccaggctggagtacagtggcacaatcatagcttactgcagactcaatctcctgggctgaagcgattatcccacctcagcttcccaagtagctgggactacaggcacacaccaccatgcctggctaatttttttttttttttttggcagagataatgtcttgtcattttgtaggcttgaattgctgagctcacacaatcctcctgcctcagcctcccaaagtgctgggattacaattgtgagccatcatgcctggccccagataaataacatttattttatatcagtaaatatctctaaatgaaaaggactcctcctttttttggtaacaatcacaatgccgttatcacaccaaaaataatgtgtctgttttcttaatatcatcagacaatattcaaatttccgattttaagtatgtcagtgtttttttgtttgtttttgtttttatttttaaagaaacaggatttaaataaaatccacatgtcgtgattggtccagatatctaaagtcttttttaattcataggtttctcctctagttccttttcttctcctgcttttgaatttaattttaaagaaaccagttatctttcctgagccatttcttactgtatagattttgatatttgaatccctgtggtagtctctcgtgttgttctgttcttgggatgtcattggcaatggctacatctcggtatggtttttttgtatttgtcctgttatgagtgatactgaatatctcatcatatatttaaaggccatttttatatctctcttggtacaatgttcatgtcttttactcatttttctattgaacgtttgatatatttcccttaacattttttgcaagctctttaaatgctagggagattagccctttgtttatgatataagttgcaaatattttctactggctttgactttgcttatcaggtttttgccatggaaagcttttaaaaaactttatttggctgggcgcggtggctcacgcctgtaatcccagcactttgggaggccgagatgggcggatcacgtggtcaggagattgagaccatcctggctaacacggtgaaaccccgtctctactaaaaatacaaaaaattagccgggtgaggtggtgggcgcctgtagtcccagctgctcgggaggctgaggcaggagaatggtgtgaaccccagggggcagagcctgcagtgcgccgagatcgtgccactgcactccagcctgggtgacagagcgagactctgtctcaaaaaaaaaaaaaaaaaaatgacttgtagtcatttataaatgagtttttaaaattgttactgctccaggtgtggtggctcacacctgtaatcccagcactttgggaggccaatgcaggtggatcatttgtggtcaggactttgagaccagcctggccaaacatggtgaaaccctgtctctactgaaaatacagaaattagccgggtggtagtggctcagtgcctgtaatcttagctactcaggaggctgaggcatgagaattgcttgagcctgtgaggtggaggttgcagtgagccgagtatcacgcgactgcactgcagtctgggcaacagagtgagactctacctcaaaaaaagaatttttttttaaattggtactggatttttaaccttttgaagttacattcaataaactctatctgtttaaaatgtataatttgatgagttttgaccatgtctgcagcacattaagatacagaacatttccataactctgagaagtatcctcatgccacttacagtccttcccttcaccctcagctccaagcaactactgatctgcattccatccctatagattggtttgcagttttcagaattttatagaaatataattatttctataaataaataacactaaaaccactagttgaaatgttaggaagcagaattattatcaaaggctgtatccttttgtgtctggctttttttttttttttttttttttgaggcggagtttcgctcttgctgctcaggctggagtgcagtggcgtgatctaggcccactgcaacctccgcctcccgggttcaagcaattctcctgcctcagcctcctgagtagctgggattagagcatgcaccaccatgcccggctaattttgaatttttagtagagacggggcttctccgtgttggtcaggctggtcttgaactcccaacctcaggtgatctgcctgctttggcctcccaaagtgttgggattataggcgtgagccactgtgcccagcctatttctggccttttttgtacttaatattacgattttgagatttattcatgttgttgcatctgtcagtagttcctttttacggtagagcagtattccatctctactgatttgttctatgtcccatatcctttttggtctggcttctttcacataccaaaatacatttgacatttattagttgcgcatgtatcaatagtttgttcctttattttgccaagtaatattttattgtattggatgcaccacattttgtttattcgtacaccagttgaaggacatttgggttgttcgtgtttttttgccagttatgactaatactgctataaacatttgtatccaatatttggtgtgaacataagccttcaattcatttggataaatacctaggagtgggattgccgggttgttcgctaaggatctgtttaactgtaaaaactgccaaactgttttccaaagttgctatgtcattttgcatttccaccagcaatatatgatagttcgtttatttcacatctttgacagcatttagtgttgtcagggttttttttgtttgttttagacattttagtaggtatgttatagtatcttgtggtttttatttgcattcactttcctgactaattatagtaggcatctattcgtgtgcttatttactatttttatatgttcttagtcagcttgtgtgttccaagttttttttttttaccattttcgtatttggttgtcttattattgaattgtaataattacctgcctgttctagggtatcatttgctgtctggatacatatatattgaatattttcttcatttttatggcttgtcttttcatttctttatggtgtcttttgaagagcaattttaaagtttgattacgtttcagatatatcaactattatatggttcaggctttttgtgtcttatctaagaaatatttgtctacccctaaggtcctgaagactttgtcctatattttgttctggaagctttgacattttacattgagtcagtgatccatttgagttagtttttttcctcatagacagtcgattattccagtcttgtttgttgaaaagactgtcctttctctacaaaattgccttggcaccttggttgaaaattaactgttctctcttcctgtttactagaagaatttttaaaagaccggtgttatttttttccttaagggattggtagaattcacatatgaactatttctaggctttgacttttctttttggggttttagtagtgaattcatttgctttagtagaaataggtacttcagattttcttttttgtcttgtgtcagttttttcaaagttgtgttttttcaaagaatttgtttacttctaaattgtcaaatttgtttgcatgaattcttattacccacttaatgtctatagggtgtgtagtgtgtacttcctaatattggtgatttgctttctctctttcacttggttcaca

SEQ ID NO: 4983 - DNA, 6000 bp, Homo sapiens
tctttaacagcagtgtttttgaattcactaaggcacttttcagttatatgattaaatttttatttctaagttgtttgatgtataccacatttaaaatctctgtcattactagaaattttactactgcaaatatccattcacctgccattaagaactttttttccttttttgaaatttacctgccattaggaccttttacccttgtcatatacttactccttttacccttgtcatatacttactattttgctttttaaaagttttttaaaaacttatttacaataatagctaatacttaaagttttttcaaacctgtgggaatacttatttaatcggtgctaaatttcgtgttgtccttttaaaaaatgcaataattaattgagatgtttttaagctcgtctgttttccctaaacatcgggttgttcagcatattgcgatggggagagtgccacataatatgagacgctttgtaaggacttttcaaagggaaattttggagaaatgatctgatatttgggtgtatgtatacattattagtagccattaaccatgctcaattagtgatttcactaaagaaattgcttttgattagatactctgaattacaagatagagcatttactgtgtacacttgggtcagttctgggaaaggtattactttcttggaaatgattgttttttaacaagaacacttaccacagtttggatgaagggagcattttgtttaaaagccagaattggggtacattagatgtgatttgatgttttgcaatttaattgcttatttgcaattattatgtaaaaaggtttgaccattacaattttcatttatacctatattttatatgtcatttagacatttttacaggaaggaatgcctacttctgcacgatgtgatgatttagaagccttaaaaaagaagggttgccctccagatgacatagaaaatcccagaggctccaaagatataaagaaaaataaaaatgtaaccaaccgtagcaaaggaacagcagagaagctcaagccagaggatattactcagatccaaccacagcagttggttttgcgattaagatcaggtatggaagcccaactctgtgaatacctgcgtgtttacttgaggcattcgacaccagctttatgcaaactctgaccagtttctgttgaaggctcgtttttacatgtggactggcactcaaaaatgtggaattgtttaaattttagaaaatttttgcagatataacaattgtaagacatatttacttggaataatattaaatgttgcctaatattcaaagtaaattttgttaaagattcagaaagtattaattagctttagtgagttttaaaaatgaaagtgttcatcctctggtctaattacataatatattataaaagcaacattttaacctgttcttttcctttgtatttgtttagtattattaaactgttaaggtttttgtaattatgtctgttagtcccacatctaaacatgaaggaaaaaacaagccctcatcctcgcttttctggtttccgacctttcttgtcaggagaatggtagagtggccctgtcccctgacttccctcccggcccctcctcaaccaggtcagccctctcctcctcatcctgctctagcaaagctccaccatcgccttcagcccgcagacccaggggacccttgtcaggattttttttaactcttctgtaccaagtaacactttgtactttttgaaatgctctgtccttgatcaatgataccactcctcggtttttctttgtgtctcttaccattgccttccaggcctctttttgtgtcttttttcttcctccctttttgcagtccacctaaatgtcagttttcctctcgtggctttaaaacccaattgtatgctgcagcaacacagacttttcttgagctccaaacccatttctccaattgcctattagaaatctatatagagaaaactacaagttaaaattttaattacattttcatccaaacctctctcctgtatttcctaagtaaattacattaacgtctcttgtatctctctcttctcctccttcatcatctctctctgggtttcttttgtagattagctagtctctttgcctcataatgataataaaaataaaataataaataataaataataataaataaataattatttttaaagctgtctgccaggctttctaaagtaaagatcggatcatgttattcacttgcagggagtggcatcccactacacacagaacagagttcacaacttcagtgtctaaaaagtcagttgtaccctatcacgtgttctgccttgccctctccagactaatttatggtgttctatttgttttcttctcttataaactgactttttgtctgttttgtccactgtggattgggaatatcttttttatctttgcatcctgaaggcctggtgtttaaagtatttgttgaatgaaactgaatacatacccattgagttacttatggaattcccaggtttttgtaaaaattatgacaacatgttttattttattgtgtttaccgtgtaaaccacatttatttggtttttctcgtttgcgtttgattgccaacaggcaagtttcattttctaatctcttgtctaattaggggagccacagacatttacattaaaattcaagagagctgaagactatcccattgacctctactaccttatggacctgtcttactcaatgaaagacgatttggagaatgtaaaaagtcttggaacagatctgatgaatgaaatgaggaggattacttcggacttcagaattggtaggaatgttgggaacattgaccattttcattataaagtcttggcaattctcaaatgttgttttatattttattcctttgttactcacaacatacttgtgagataaacaagccagttttttagccttttctgagtggaagttgatattccagtcacacgtttaataatcttttctgccaccttgttcctctgtcactggatgctactgtttgacacagattgtacctcatagataatgacttgcatgcttattttcatactaacttgatcatttatcttatgacttactttattttatttttaagagtttcactcttgtcgcccagactggagtgcagtggtgtgatctcggctcactgcaacctccgcttcccgggttcaagtgattttcctgccacagcctcccgagtagctgggattacaggcatctgccaccacccccaactaattttttgtatttttagtagagatgggggtttcaccatgttggccaggctggtctcgaactcctgacctcaggtaatccagctgccttggcctcccagagtattgggactacaggcgtgagccaccatgcctggcccttatgacttattttataaacatgtgttgaatacccagattttatctaattgctaattagtatgtctgcacctgcccgtacagcctgatctcatcttagacctggatttttcatatgatgatgatctgctttccaaaccttatttttcccatttcatgcatccccagcttaacctcttttttgcctgcttctctccactcctgttgctctagaggtttagcaacagaatattagaaagatttgacagttatgaggcctaagagctgcctttcaaaaattagccctattttagtggaaacatttaaaaatagcacttgcttaaaatgttcttttattctgtaagcataattcaaggaccatggcattagggagctcctatcaaattagtgttttttaaaatggccagaattctagaatatttgtttattcatttgttcagcatgtcattattgagagctggtgtgccaagaaaatgaatgtgagttatttttaaagtagggaggcaaaataaaaagattgtcttaggtcttagtccatttgtgctgctttaagaaaatactataaactgggtggcttatgaacaacagaaatttatttctcacagctctggaggtgagaagtccaagatccaggcagattgagcatctggtgaggtccctcttctgggttcatagatgataccttcttgcgatgtactcacatagcagcagggagacagcagctctctggggcttctttgatgaggtcactgtaggagtctattcttacgttgctataaagacatatctgacactgggtaatttatgaagaaaagaggtttaattggtttacggtcctgcaagctctacaggaagcatggcgctagcatcagcaaggcctctggggaggcctcaggaagcttccaatcgtggcagaaggcaaagtggggagcaggcttctcacatggtgggagcaggagcaagagttggggagagatgccacacaattttaaataacagatctcatgagaactcactcactgtggtcagaatagcaccaagccatgagggattgatctgcccccatgatcgaaataccttccaccaggccgtaccttcaacattggggatcacattttaacatgagacttgggcggggacagatacccaaactgtatcagttactaatcccattcatgagggctctgccctcatgatctaatcaccttccaaaggaaccacttcctaataccatcatgttgggaattaggttttcaatgtaggaattttggggtaacacagacattcagtccatagtaacctacatttggtaacatagatgaattttttaaacaatgcaaatctctgtctttccatctatccatccattcattcatttatgtaccatttttttcttggcaggatttggctcatttgtggaaaagactgtgatgccttacattagcacaacaccagctaagctcaggaacccttgcacaagtgaacagaactgcaccagcccatttagctacaaaaatgtgctcagtcttactaataaaggagaagtatttaatgaacttgttggaaaacagcgcatatctggaaatttggattctccagaaggtggtttcgatgccatcatgcaagttgcagtttgtggagtaagcgcattcatttcctatcaggggatattgtttctattatgtgtgtgaattttaagtgtgattttactatgataatagaaaaattgaccttaattttcatagatttgattatcttagagaagtaattttaagtaaacccttaaattgcctgtatacataaagtgcctttataaaagcatatttaatctttatgcaaaccacacagttagtttattcatgcgggcttttaaaagacagaatgctaaccatttgaaacagcggggcaacctctctgtactgtagctggtggtctggattttagaaaagcccatgtgtcctaactttctggctttgtactagagatagaattgatgttattatctgaggcatcaccaggaaccttgaaattgctcaaagggagagtgtcttgtatcattttcctttggtcagttttcttctcactgtctttgaaagacacatctttctcctgtgtcttagtaattcaaaaagagagaactttttaagctctagtttttaacctatatgaatagatgtattttgagaagtgatacaatatttgtaattttaattgtaagattttcagtagcaagcccatccctattggttcaataatttgtattttatgatccatgtagcagctatgtattttgagatgacactttaatgatgtggctgaggctgaaactagaagacattgtcatgtcaagtttgtcctgcgtacctactcttgtctcatttttgttccctccagtgcccccattctctagatgaccttctttgattttagaggcctcttagtggttatttttcagtcaatttttgctaaggtgctaattgatgcccaaaataataagtgaaggaatatggatagtaattaagaatttttctatcaccactgatgctgggcaatttactcagcctctccagggctgttttcttctctttaagaagggatcatgatagtat

SEQ ID NO: 4984 - DNA, 6000 bp, Homo sapiens
aaatctaccatattgttaatgaccattatcaatgaatatttgtttctaacggcaaggaattcaatggctttgcagaggtagctgtgaggtaccctactgccactgtggccatttgttgtcccttaagcctggaccttcctttggttctgaatatcccttccgtagctgcagttgcctgctaccttttgttcattatcacactccttggagaccccatttggggatctcttgctgtcagtttttctagctcctgctgtagaaaccctttggagcaatctcattttttaaccctccgttgcttcactgctcagcctcagggttttttttgttgttgtttgtttgtttgtttttgccatcatgaaaatcctaaattccttactgcctaggagggcttgggcagaaagaaaatctatgtgggagtcgctgttggagacaaattaattttcttcccatactttgagggtaagaaggtatttccctgacattcttccatgggactttaatgtttactgccatctttggtgttgtagttttggggtacccactttaggttggtctataatatgggaagctactctctctcttaaggattggggagacatactgctgggtatcttgagttataaattagattgctatttctttgagccactaaatgatgtagctacaatttatgtttaagaacttttgatcaataaaaagtttaataatgtatctttagagaaattgcatttcatgtttcaaataaccaatattatagtacaaatatagtatagaacttaaaaacaaacttgtgcttgcttttttgttcttgttcagaatgatttcttaatttttttctaattgcttaatataccaaaacaacttcttttgattgacatgtttagtatttgtaggttttttggattttcttttgttttattagaaacaggtacatttttgaaatactaggtttattaagttagaaaccatctgaatagaattatagtagcagtatctttgaaagcagtcggggtggaaaatgactcatcttgaggggactttaaggcaatttataaacagtgatgtttgctgaatagaggtttgccttttaatcttcctgcttatgaatagtcactgggtgttttcatagaatctgtggcttccagtaacttgtctttccaagaatgttaaaatcagtgtttatctcagagagatcttatagctacaaatggttatctctgtttatgaccatattcttgagcttttgtatatattaaataaaaactttgttatgtgtttaagctttttttgtttttaaaatcaatttattttgaagttactttataaattttcttgtataatttgctttgtataagggatgatttcacttaggtaatgtttgaaaataaagatgattaaaattttttcattataaaaagtcttaaagatacacaaaaaaagggaggaatagtacactgaacccacacttatttatcactcagattcagctattgtgaatagaaattttaactgtaggaaatgttggcttttttcttgtcttttttttttttaatgtaactattttgcaaactagtgggctaatttgcaatttttattttgtgcagatgatgtgatgccagccacttactgtgaaattgatttagataaagaaaagagagatgcatttgtatatgccataaaaaatcattactggtaccagatgtacatagatgatttaccaatatggggtaagtattgtatgttgtatttaagatttgggaaaatttgcataatcagaatttataaaatgactctgttaaggtgattgtgtactggatcatggtgtaaatgtgttttcactgttttttacagaatgattttaataccagttttatggtcacctgttgcttgaagaatttttgacattgccatgccttacatgaaacttgcctaaaatataacttttttatagtataacttttcagattcaagaatgagaaggtgcttagaacaatctaaaaatttcttctgcttccattttttttcatatcttaatttgttcttttaaatacagttaaagggactaataggattttgaagtttcattctgtctttttctcatgttggtactgtggtagtatggtttcttggtatgatagtttcttgaatggcttattttgctaaaaaatgtttatgtttttgcccttatttatccatattaatggagaagagctatggaatagttaatgccaatttatgaataatccaaaatcatttatgttggacttgattaaattatttataatgcaaagcacagccagctgtcatggccaatatgtttgatcacatttttctctaattgtttctttcttttgtctctggaaatctgctgttatgtataatgaatgtttcttctaatgcttaaaattgttagcagattactgtcatcatgagcagtaaactatcaaagtctgaacatatcagatcagcatttaatatcatactaagatgaaatttagaaagttaatatcaagagataattatatgcatcatcattactgtgttgcatgttaattaggtatatgtagttagtatatcatataaatgactgcagttaccattatggtaacacagacatttctctgatccgctctgacagtggtaggaagatgtgctgaatattcactgaagatttttctgagcctgtagttcagggaaacccattggtttgggcctccttcatatttgagagaacaggtttcttccctattgttttcccttgcttacaggtttgtgcagtgatgccatgatagctcattgtagcctcagactcctgggcttaagtgatccttctcccttggtctcctgagcagctgggactaccggtgcaccccaccatgcctggctctttttttttttttttggtgtgtttgtagagacaagatgtcttgctttatttaaactaatctcaaacttctggcttcaagcaatcctcttgcctcagcctcccaaatttctgggattatatagggataagccatcatgctttaggttttttcattcacagctgtgggctcgttagcaacagtggcaactgtgctttcctgtgttaaatttattatagccctgggattttagaatatgccctgtttggggaaatacttttggatgtccttgaatgtctgaaccatggagaatccttgtcagaaaaaaaaaaaaaacaactttgtacctgacttttcgtggggtaaaggtttcagagtcttttaacgccttttagagagtagcttcttacttgatataattatgtctttacccccaaagtctggttttcagagtagataggtaaataaaccttaatgaaattaattattggctgggcgcggtggctcacgcctgtaatcccagcactttgggtggccaaggtgggcggatcacttggggccaggagttcgagaccaccatggccagcatggcgaaaccctgtctctactaaaaatacaaaaaatttagctgtgcatggtggtgcacacctatagtcccagctacttgggaggctgaggcataagaattgcttgaacccagcgggtggaggttgcagtgagccaagactgcacctttgcactctatccagcctgagcaacagagcgagactctgtctcaaaaaaaaaaaaattaattattagaaggatttcatgctagtgtggtggctcacgcctgtaatacagcactttgagaagctaaggccaggagtttgagaacagactgggcaacataacgagattcatctctacaaaaaaataaaacatttacccaggcgtggtggcacttgcctgtagtcctaactactctagaggctgaggtaggaggattgtttgagcccaggagtttgagactgcagtgagctatgattgtgtcactacactccagcctgggtgacagagtgtgagaccttgtttcaataacaaataaagataaaagaaggatttcattatcccctacaatcccaagcaaaacaaaactatactccttgaatttgtaccaattagaatcactttggttaataaataatattttataaatatgattatatttttccctaatacttactaaagcgtagggggaaggccctaaggagtaacttacagagcataaagctattgggaactgtttaggcttgggtggggaacattggacaaatagctggcagtctgagggcatgagagatgtatcctcagctaccacctataatatttccctaacattgtggatcttttttttccaatatcccaaattatgattgaagtgataattttaaactgtatccttattaccatttatcttcaccactccttttattttgctgatttcccagggacagatccagcagttgaggtataaaaaggagacatgttaagttttggtgcccatatatacatgtgtacatcttactgggaatgggtagatcataggttattagagaaagtactagactagggatctggaaaccttgattttaattttggtttgaccactaatagctgggtaaccttggcagatggtgatgtaagcacttctctgaaattttgagatgttagggagtggtattagtccattctaacaccactataaagaagtacctaagactatgtaatttaaaaagaaaagaggtttaattggctcacggttctgcaggctatattggaagcatagcggcatctgcttggcttctggggagacctcaggaaacttacaatcatggcagaaggtgaagggagagtcaagagtggccagggagggagagagggcggaggtaaaaaaaaaaaaaaaaaaaacttaatgagcatttagcttgtaggatattttaaatattaagtggttttaccttgtataaagtgttttttcttttgtaggtattgttggtgaggctgatgaaaatggagaagattactatctttggacctataaaaaacttgaaataggttttaatggaaatcgaattgttgatgttaatctaactagtgaaggaaaggtgaaactggttccaaatactaaaatccagatgtcatattcagtaagtattcaaatagtttaatgtaggaagtagtgtttgtgacccgatgtcaacaatttgtggctttgaactttagtaaatgaaaatgtagcttgaaatgggatgcaacagaatattattaaaactatattttctcagtgtacgtaagtaagcctcctgaaagcaaagagaggatttgcttcaggtctgtagtattagataccagttatgcctttgcaggagctaaaccatttggtacagccaagtttactgttgtagctgggtaattagactaacccagtcatgtatttttatggttacatttttagattgcagtacttcatgttgtttccctttcctttttaatgttgcagatagaagtgatgctgtattgaaagttgctggatagatgtagtttatcatggattgctctgtcagttggaataatatactcctgcacagtgagagcttgtcagagccttttagcaactgtcaagctatttctgttgtcttaggcttaaaaatagtaaaaatgagagagaaattcagtgtaggtagcctctgccagttattgcctcatagctggaatgagtccattgctagtagtcaattttgaaagtttttcaagccttgtgcatatgtacctgatgcaaataatccttatataactaaacttaatgaaaaaattttatagttgtaataaaagtaatgcagtctaaaaataaagatttacagatttttttttattattcattcaaatatttattgagcagctaaggagatacgaaggtgattcagaacatggtcagaggagaggcgaatgtgcaagtaatagaaagcaaagggcaaggttcactgaatcacagcaatcagaagaaactgctttagggaaccaagagtgagattgtttccagcctaaagaggcatccatggcagatcagaaaaggagattgagattaaaatag

SEQ ID NO: 4985 - DNA, 6000 bp, Homo sapiens
tttttaaaaaaaatttttagaattttaaagtttccttttttgagacagggtcttactctgtcacccaggctggagtgcagtggagcaatcttggctcactgcaacctctgcctcccaggctcaagcgatcctcccgcttcagcctccctagtagctgggattacaggtgggcatctacatctggctaatttttgtgtttttggtaaagatggtgttttgccatgctgctcaggctggtctccaactcctgggctcaagcaatctgctcgccttggcctccaaagtgttggggtttttaaatagaggtggggtcttgctatgttacccatgctggtcttgaactcctgggctccagtgatcctcctgcctcaccctcccaaagtgttaggattccaagcatgggccaccacaccaagccactttccaagatgcccccggggtgtgttctccagtgttgcaatgagtcagtaaagcccaactttgttagattacaggtgtgtttctcgtggtctttggctggaggacattgaaaaaatataaaatgaaaaattcccaagatttaatttaactcattaattaatgagggagtcagtaagagactgttttaaattttttttttgactttttttcaaatcccattacactgagcaaagtaagaactttaaaaaacaaaacaaaacaaaacagaacacttcaaataacagtctaaagagcagacagatacctgggcactaggctgtcagggaagctgaaatgagtgtctgaaagagggctgatttgtctgctgtcttttgcagttaaatagaaaaaaaacaaaaagggctgagttgcatctggaagggtatgctacacaacttacaatatttcattgaaaatatagctgcgggttgggtgcagtgactcacacctgtagccaaggcaggaggaactttgggaggccaaggcaggaggaacgcttgagcccaggagttggagaccagcctgggtaacgtagtaagaccccgtctctataagaaattaaaaaataaaaaattagccgtcatagtggtgcacaacctgtggtcccacctactgaggaggctgaggtgggcggattacttgagcttaggaggttgagtctgcagtgagccgtggttgcggtagtacactccagcctgggtgacagagcaagactctgtctcttaaataagaaaggatacctgctgatctatttttgcctgcttcacaactattagtgttaattcttctagcttgctttccatgcatatgccaacacacacacacacactcacttaaaaataggaattataccatatatacaacatgacaaattgcttttttgatttaatatgaaacaggtatccttcctcatcattgcatttagatcaacctcattctttttcctggctgcgtaggattccagcatgtgtctgaattgccttttacatagcccatttgatcttcacttggattgtttcctctttctgactattgcatgtcatgcagtaaatatccttgtatgtgtgcgtttgtgcacctgcagactatttctcaaggacagattctgagcagtgagtttaatattttccattttgccctctgaaaggccataatgctttaaactccaaagggaagaagctatttgaccattgccccttgtctctcctattctatgattcctctaatagtatcatcatctgtaaaatgggtagaatactttcccttccttagatctcatgtttcagatatatccttaatagcaggggtttagtctgtgaaggaacattcattacctttttgtaggctggtaagaaaaccatcttagatgatgaccagtggctctctgactgcagtgcaacagacagaaccggcagcattcaagccaggcatagtgatcctattcctaaagctgtgtccctttctttgcaaaggaatttgacctggacgtggtggctgtggtcaacgacacagtgggcaccatgatgacctgtgcttatgaggagcccacctgtgaggttggactcattgttggtgagtgtcctggaaggtctctttccctgcagaagggaaggctggggtttccccgttttgtggggccttggcccagcagcttggtcctctgtatggggtagtcttatctgtcagtatcatttcttgaccagctccagagttcagggctggacgaaggcagcagagtctctggcggggggaggtgggggggcctttcttaagacacccataatgctacacattgcttatgatcagactgtcaagaactgaactcttcaggaatgaggacccaaaaggctcacttggcttgagtggagacaggtacctggagcgggcctggcaaacatggcagctctatgggccttgtatggaggggctctggtcaggtattgcagggggatggggtggggagggagtctgcggctggaaaggaagtagagagcacctcccatgctgaccacacttagagcatggaaaggggcaggatggtcttgggcaccattttgcctttagcagccactgtgtgcgcatggtcccagccactgaagggggttgcagaggggttgtctctgcagctcgttgccttgtaatccaaaacacattaggggtctgggcctcgagcacataattcctgaagcatattgatttgggctatgaggaaaccatttgtcctgctggccctgctcctcgcgtcaggggatgctgggaaagaccccagggagtttcttagccaacatctgcggactctgcctggtgagtgagcagtggcacccctgctactggatcagttgctgagtgtctagagcttgggaagaggccccagcaggctgccttccaggtgccaggaagaacttttcattcattgttaagccacttttcgcttctgttgaaattttaaaaaacctagggagcagctgctggtgaaaaggttgtttggggcctggctttctccacccagcccctccctttctttccatgaatgggcttgggtatgaaatgcaaagctagagtgacacagcagctctcctcctcctgcaggccccaccttccctcctgggaggtcaggcccgcccgtttcctggcaccaggctccagctacatttcatagctacttcatagctactttttctttcctccatcaattgatctctttgctcaggactcccataggcaagatgtatggtttccatgttttggctttctttgcatctcccactcccatcatcttccgtttctggagctcctcttctctcagttttaaccttgggtgaaaagggggctgagaaaacaaagaacaaaaatcatccaactgtacagtctttgaactctacttaagtttcttcaaaggggatgaaaactaccaaagcccttttggtctggccagggggtgtgtcttgtgccctcccgatgaaagttcacctacatcccaccctggatgggtggatggtgctcctgggcgcatcattagcatcatcctgggagcttgttagagatgcaggctctcaggtcctggccctagcctcttgaatctggatctgcttcttagggtccccaggtgatccaggtgcatattaaagtatgtgtgtgaagcactcttcctgggttagttgattggtttttaaatgtccagtctattcagtgaggcaagttcagtgaccacaagcttggatatcatggcaattaaaattgctgtgaaagttgcaggatgcttgccttcagtttcttagctcctcatgggctggaacagcaaacagtcggtggtccttctattttgagtgactctgctctagggagttcaggaatggaagtcagagattcctgagcccctggcaagcatatgtcaggttgcatgtgtgcggtgtgtgggtccacccagagaaaggtgcctttttcacagaagaatcctctgatcttcaaaggtctgatacaaaaatgatgaaaaaccattgcttttgaaagccccccttgaaatgctgaagacactgtcctgccctgaactgtgggcttcatcccaaggtatgtaggaaagcttattgagcaggcatagtccacgaccaaccatccttgtcgagaaaagataagtggggctgggcgtggtgcccacgcctgtaatcccagcactttgtgaggctgaggcgagagggtagctcgagcccaggaatttgagatgaacctaggcaacatggcaaaaccctatctctactaaaaattttaaaaaattagccaggcatgatggtggtgcctgtagtccagccacttggaaggctgaggtgggaaaatcacttgagccctggaggcggaggttgcagtgagccaagattgcgccgctgcactccagcctgggtgacagagccagaccctgtcttgaagaaaagaaaaagaaaataagtgaatatctatggtatgatagaagataatcccctaatattttatacacatatatataggcatgtatatattgtatattcatgtgtgcatgatgttgtgtgtgtacgtatatatttcttcttctggtctgaatgttgcctaaacctctaccattgatgctccatctctttgctataaagccatcttctattaaaataaacataaccctgcctggacgggtgaacacattggctcttggttgaaagtcagctaagcaggtgccctctgggtgatgtggctcagactctccatttacatttcaaatttttccatttcaaaattgggaaagaaaaactattactttgttcatcacaaaaaacgtgccccctgcctgtggaacctcaggccccagaccccaggcccagttgcaagacccccaaatgcaaggccaccgctcctcattgccccctcgtgtgttccagggaccggcagcaatgcctgctacatggaggagatgaagaacgtggagatggtggagggggaccaggggcagatgtgcatcaacatggagtggggggcctttggggacaacgggtgtctggatgatatcaggacacactacgacagactggtggacgaatattccctaaatgctgggaaacaaaggtaaccccgcctggtggagaggacactcacagtcagggtgggggcagcacttggctgcattctgccacttgcagtggaagaagtttctaggaggagaggtctgaacagaggtttcaagactggaccccctggctcactcctgacctttgtcttttggacagcagagaaccagggaggacagacccccaacatggtacaagatggcccagggttgatgcctgtctaggggctgcctgtgactgttttttagcctggaggattctggccttccggtccccttgctgtgttcctttcccatcagaataacaagggggtggggtgagggtggctgggcggcaggttggtgtgaagcagaggccctgtcgcaatcgtcctttcctccgtgagcctcctgcaccacctagtggccttgtggagctttgcagctcaggtctcaggtaccatgtctgaaatggcagtgtctgccctttgtctcaagcccccaggaatcaggccatcctctgccacggccaggatgagttggtccaagttgtctccctaggagcagaaagaagggctggagcagcacccagcatgagtcactccctagccccctcaaggtttttgccttttctaaataccacccatgctgttatttacttagtgcttttcttcgaatcagcttacagttttttgtttttctttttgtttgaggtggagttttgctcttgttgcccaggctggagtgcaatggcgtgatctcggctcaccacaacctccacctcccgggttcaagcagttctcctgcctcagcctccccagtagctgggattacaggcatacacaaccatgcccagctaattttgtatttttagtagagacggggtttctccatgttggtcaggctggtcttgaactcccgacctcaggtgatccgcctgtctaggtctcctaaagtgctgggattacaggtgtgag

SEQ ID NO: 4986 - DNA, 6000 bp, Homo sapiens
tgtacagactgtggaactgtgagctaattaaacctcttttctttgtaaattacccagcctcaggtagttctttatagcaatgcaagaacggactaccacagggtgagaaaaacttaagtatgacttcaagatacttttcctgaacaactggaagaagggagtggccctttactgagctagggaaggctggatcaggattctgaggggaatatctggagctcagtttgttaagtttgagatagcttgttagataagtggaaccgtagaataggcagttgtatacatgggtctggaggtcaacagtgttcaaggctggagataacagtctggaagtcatcaatatttaggcctgtgagaatgagtaacctcaccaagacactgagtatatataggaaagagatccacagaccaccctctgggatactccaacaatagaggtctgggagatgaaatattccttagggtttcttatgtactctagaatgaaagacaattgtaatcgtttctttttttagaaaaagctttattgagataattcacactatataaatcacttatttaaaatgtatgatttagtgcattcacagttacgtggacaacaccacaatcaattttagaatattagtatcatccccaaagaaaccctgtaccctcctatccttagacaacaactcatttcccctgtacctaggcaactagtaatctaccttctagctttatagatttgcccattctgcatatttcatgtcagtggaatcatactatacttggtttgtttagagagaagtggtatccattagtacctagcttctagattcaatagataccaagttacttggtaaaggtgggggctataagatctctccaatgtaaagatacatttcctgtttgcaattagtaacaaaactgtggggtgatattttgagactatgaatattctgtttcctaacagcatttcatctagtggttttagtgttcattgaagatgcttgtgtaaatcagtgagacattgggattacaaagtggtgattttctattactgtcatatcttcagaaatgatgtagttcatattatttctaattcagatgtattgtacacagtttgttcttttgttttttgtttgtacctcttttctctcactgtgaaagtcttggttcctaataacaaataaatgttttcttttattttaaatataatcatatcaacatatttacattatccaataatgtacattataatggtctggaagtcttgttatacctaaaatgtttcacattacagtaccaagtaggaatgctggatcataggataaaagcatatatgattttgttaaatagtaccagattcacccagtagggttttaccattttgccttcttgccagcaatgtaagagtttctgttttcttacagcctcatcagtatagtgtgttgtcaaacttttgaatttttgccagtctaatagatgagaaatggtatatctgtatagtatagatttaaaaaacttttctattatggagatttgtgaacatccacaaaaatagaatagtgtaaccaatcccatgaacaccatcatttagccccagcaactaccaaccctgccaccagtgcctccgtttattcccttctctaaaaattattttgaaacaaatcccagataacatttttttcttttctttcttgcttttttcttttctttctttctgttttttttttttcttttttttttttagaatgggtcttgctctattgcccaggctggagtacagtggcacaatcatagcttactgcagactcaatctcctgggctgaagcgattatcccacctcagcttcccaagtagctgggactacaggcacacaccaccatgcctggctaatttttttttttttttttggcagagataatgtcttgtcattttgtaggcttgaattgctgagctcacacaatcctcctgcctcagcctcccaaagtgctgggattacaattgtgagccatcatgcctggccccagataaataacatttattttatatcagtaaatatctctaaatgaaaaggactcctcctttttttggtaacaatcacaatgccgttatcacaccaaaaataatgtgtctgttttcttaatatcatcagacaatattcaaatttccgattttaagtatgtcagtgtttttttgtttgtttttgtttttatttttaaagaaacaggatttaaataaaatccacatgtcgtgattggtccagatatctaaagtcttttttaattcataggtttctcctctagttccttttcttctcctgcttttgaatttaattttaaagaaaccagttatctttcctgagccatttcttactgtatagattttgatatttgaatccctgtggtagtctctcgtgttgttctgttcttgggatgtcattggcaatggctacatctcggtatggtttttttgtatttgtcctgttatgagtgatactgaatatctcatcatatatttaaaggccatttttatatctctcttggtacaatgttcatgtcttttactcatttttctattgaacgtttgatatatttcccttaacattttttgcaagctctttaaatgctagggagattagccctttgtttatgatataagttgcaaatattttctactggctttgactttgcttatcaggtttttgccatggaaagcttttaaaaaactttatttggctgggcgcggtggctcacgcctgtaatcccagcactttgggaggccgagatgggcggatcacgtggtcaggagattgagaccatcctggctaacacggtgaaaccccgtctctactaaaaatacaaaaaattagccgggtgaggtggtgggcgcctgtagtcccagctgctcgggaggctgaggcaggagaatggtgtgaaccccagggggcagagcctgcagtgcgccgagatcgtgccactgcactccagcctgggtgacagagcgagactctgtctcaaaaaaaaaaaaaaaaaaatgacttgtagtcatttataaatgagtttttaaaattgttactgctccaggtgtggtggctcacacctgtaatcccagcactttgggaggccaatgcaggtggatcatttgtggtcaggactttgagaccagcctggccaaacatggtgaaaccctgtctctactgaaaatacagaaattagccgggtggtagtggctcagtgcctgtaatcttagctactcaggaggctgaggcatgagaattgcttgagcctgtgaggtggaggttgcagtgagccgagtatcacgcgactgcactgcagtctgggcaacagagtgagactctacctcaaaaaaagaatttttttttaaattggtactggatttttaaccttttgaagttacattcaataaactctatctgtttaaaatgtataatttgatgagttttgaccatgtctgcagcacattaagatacagaacatttccataactctgagaagtatcctcatgccacttacagtccttcccttcaccctcagctccaagcaactactgatctgcattccatccctatagattggtttgcagttttcagaattttatagaaatataattatttctataaataaataacactaaaaccactagttgaaatgttaggaagcagaattattatcaaaggctgtatccttttgtgtctggctttttttttttttttttttttttgaggcggagtttcgctcttgctgctcaggctggagtgcagtggcgtgatctaggcccactgcaacctccgcctcccgggttcaagcaattctcctgcctcagcctcctgagtagctgggattagagcatgcaccaccatgcccggctaattttgaatttttagtagagacggggcttctccgtgttggtcaggctggtcttgaactcccaacctcaggtgatctgcctgctttggcctcccaaagtgttgggattataggcgtgagccactgtgcccagcctatttctggccttttttgtacttaatattacgattttgagatttattcatgttgttgcatctgtcagtagttcctttttacggtagagcagtattccatctctactgatttgttctatgtcccatatcctttttggtctggcttctttcacataccaaaatacatttgacatttattagttgcgcatgtatcaatagtttgttcctttattttgccaagtaatattttattgtattggatgcaccacattttgtttattcgtacaccagttgaaggacatttgggttgttcgtgtttttttgccagttatgactaatactgctataaacatttgtatccaatatttggtgtgaacataagccttcaattcatttggataaatacctaggagtgggattgccgggttgttcgctaaggatctgtttaactgtaaaaactgccaaactgttttccaaagttgctatgtcattttgcatttccaccagcaatatatgatagttcgtttatttcacatctttgacagcatttagtgttgtcagggttttttttgtttgttttagacattttagtaggtatgttatagtatcttgtggtttttatttgcattcactttcctgactaattatagtaggcatctattcgtgtgcttatttactatttttatatgttcttagtcagcttgtgtgttccaagttttttttttttaccattttcgtatttggttgtcttattattgaattgtaataattacctgcctgttctagggtatcatttgctgtctggatacatatatattgaatattttcttcatttttatggcttgtcttttcatttctttatggtgtcttttgaagagcaattttaaagtttgattacgtttcagatatatcaactattatatggttcaggctttttgtgtcttatctaagaaatatttgtctacccctaaggtcctgaagactttgtcctatattttgttctggaagctttgacattttacattgagtcagtgatccatttgagttagtttttttcctcatagacagtcgattattccagtcttgtttgttgaaaagactgtcctttctctacaaaattgccttggcaccttggttgaaaattaactgttctctcttcctgtttactagaagaatttttaaaagaccggtgttatttttttccttaagggattggtagaattcacatatgaactatttctaggctttgacttttctttttggggttttagtagtgaattcatttgctttagtagaaataggtacttcagattttcttttttgtcttgtgtcagttttttcaaagttgtgttttttcaaagaatttgtttacttctaaattgtcaaatttgtttgcatgaattcttattacccacttaatgtctatagggtgtgtagtgtgtacttcctaatattggtgatttgctttctctctttcacttggttcacatagctatagatttatcaatttgatcttttcaagaaacagcttttggttttaatttgtattgtttgttttcaattttattagtttcttttctgatatttattattccctttctattttgggtttactttacctttttctagctttttagggtggagtttatgccattcatattagaccttttctaataaaaatatcttaagactataaattttctttcaaaatcacctttagctgcatactacaaattttgacttttaaaatttttcatttagttaagaatgttttctgatttcccttttgatttcttcttttacccatattttatttaaaagtgtattttaattttcaaatagctattcaggtgataatttcatctatagcactaaaaaccaatgaaaattctgacatatatttgtttataaaattccttgaatgctctgtatattgtatttatatggtatatacctgagggcttttctgtagcataaaagaacagttcattatttttcactgttctctgggttga

SEQ ID NO: 4987 - DNA, 6000 bp, Homo sapiens
taagaagggatcatgatagtatctacctcatagggctcttgtgaagttaaaatgcatcaatctctataaagtaccaatgagcattcagcaaatactaattcctatattgttattactttcgacttttcactagagtgtttgcaatttaaggttagtccctgctgttatagccgaagcaagtagcattccaggtagtacctagccttacacctcttttcttactagccattgatgtgtgagcctgttagcagctcgttgtggggagggcattctctgggctgcctctaactaggccttaacctgtggtattaaacaagccataacacccttgattgtggctgtttttctgtgttggtcatgctgatccactcctctagatgcaaaagaatcagacattccacttttgaaagattgccagtattaataaatgtgattcccaccttaaagtattttactgtcttatgaagatctaaacagacgtattaaataaattaacgaaagcaggtaaattcctatagtcctatgattttataattataaattaccatagtgacaagaagattttacagttactttagattctttattggaaagggcaaggataaagtaaatgagtgcataaacagtactgattgaggagttagaatgggtgaaattatccttaaacaagatacttatttctgttataaaaaaaggaagcctcatatggtgggctgataaagaaggtgcatggcatagaacatagagcagagatgggtggatggggacaagacagcagcagtggggtaaagtaaggataggctcagacactttcatttattcagcaaatgctcatcaagggcttactgcttgccaagcagtgtgctggcttgctagctgctggagatatgatgataagcagaactaaaccaaaccaaacaaaacaaaaaaacagtttttaaaaagaactgagagattgagagatacggatggtcaggcaagatatcgttgtacatgggatggaagagcttcattcagtgggctttgtgtgtttctcagcaagataattaccattgtataaagagaagacacagaaaatacagaattaggttaaaaatacaatggtggcctatatgaaaattaaaggatttttgttgaattactgtgaatagtgttttaaaattgaaatccttttcttttcaagtcactgattggctggaggaatgttacacggctgctggtgttttccacagatgccgggtttcactttgctggagatgggaaacttggtggcattgttttaccaaatgatggacaatgtcacctggaaaataatatgtacacaatgagccattattatgtaagtgcctggttccttacatagtgaatgtgtttatgttggattttaatgtttaatactaagagcttgtgggtgactggcttggggtttctcagggtttgaggttttgctgttttggtaagtaggggtcctgattgaaagtgcaggaaagctagtgttgctgtttgtgaagatgcagctttgtatttgcttccttctgctcagacaagggcctcactggggtgggaaagggatgcccagatgccactttcactctttgcctcaactccccgcccacagcatttggtagcacagtcagtactctttctaaataaataatttatctagtctcatactctttgttttatacgatttttaaaagcagtcactctgcctttattgaaaataaatattggcaaagcattcaagttctagaagaaatccaaatggtaaatcttggtctttttcttaagttgtagataatagaatatttaattactgactattctttaatttcattgtccttatatttaatatacatagataaacttactatttaaaaccttttgaatatggaattttttattcatacatgaaagtaaagagaagaggattagcaattcatgtatacacacgactcacttcagcagtttatatttgatactgttatttgaaagcagtcttgtaatctagttatatgtatgcaactagatgtaatctagctatatatggattatatatgtaatctagttatctaaagcagtcttgtaatcgagttatgtgtaatcttgcatgtataactagattgaaaaattagaagagattataagggtgtatttaaatactaaattatattacttgatttcttaggattatccttctattgctcaccttgtccagaaactgagtgaaaataatattcagacaatttttgcagttactgaagaatttcagcctgtttacaaggtaaatgtgtgagataaaaagaacaagattctaaacatttttgattgttagaggcaaatcatgtctgaattgaaatgtgggaaaatgccaccagataggcaaaccgaattttacaaaagtggtttatattaatttttaatcacatattataaaactggtttctaggtttgactcctaaagttagttaggaggaaacatgggaactggcatttaaagataaaagttgctcagtggatcctaattggttgaatgaatagcagttgtattttacgtgttttatcttttaattgcaggagctgaaaaacttgatccctaagtcagcagtaggaacattatctgcaaattctagcaatgtaattcagttgatcattgatgcatacaatgtgagtacatcttaaataagatcagttttggacaataccctgttgagaatactttgtacaaagaaagtaaaacttccttcatacacactttagcgagcccaaagtactacagaaaaacttaaattctgtatgtatctagaggaaaaactttatacatattgtcttacaaaagcaagattcatggcctaaacaaagtgaaaatgtgataaaggcatgtggggagtatttccaaataactgtttgtttatcattaaggaatagatctccttgttagaaagcaattgtaaaacataacttacatttaaacttacaggatttctccaatctttttcctccccaaaatatcctttatagagtcatctattctgatgaattgtgctagaaaagtttttttttttgccaattcttctcttcccatatattcagaggatatgggtttctatttcaggaggtacacactcatatatacgtataccataaaatatataaaaatgtaaatatacatgtgatttgcctatttcaaaaagatttatagtgttgttttcccctcacagatgggaggaagttgaattgaaattaaagaggaattggcttatcctttttgagcataattcagtgtactttaatcacaccgagttagccttcattaataatcatttaaataatctgaaggcggttgtaatttggtaggtaacccttgtgtgtctcgtgcaccactttcagcccccatccccctaaccctttggcagcttgaattttagacatttttacttcatgtcatgggggtaccataacgctttggaaaggccagcctaccatatgaggcttcccttttttatggggtaccataatggtttggaaaggcctgacttggaggggtttttataaaggtttttaatattttacttgttccacagcttttcccattctcccctgtcttagataattttcctaactcttgttctttcaggggtgtgaacaagagatagcttgccattgtacccttctccatttgtcctgaatagtctcatatgttaaacaagccctggcttgaatccttccttcttgggggattttgtttttttttttttttggctgggctacaatggttccttaagcaaatttgttcctagactgcatagttgattgtttaccctagtccatagttagctggagaggtaggactacagaaatgccattttgccgatggggaagacagcatttatttcgtttttttttggggggtttctgtttttgtttttgtttttgttttttagatggagtcgcactctgttgctcaggctggagtgcagtggtgtgatcttggctcactgcaacccctgcctcccgggttcaggcgattcttctgtctcagcctcccgagtagctgggattacaggtgcacactgccatgcttggataaatttttttttttttttgtattttagcggagatggggtttcactgtgttggccaggctggtctccaactcctgagctcaggcagtccacctaccttggcctcccaaagtgctgggattacaggtgtgagctaccacacccggcctattccacatttttaagactcctcctaattagtaacagccctctgcactgtgtgatcctgagtattttaactcagtgattaaaacaggaatactcttttcaattgtgtattttattttaaagatttgatccttattaattaaaacctgtttctctggcctctgtgttttctagttactcaattggatttggcttgtagatactttattgaaatatatttttttctgagcagtttatccattggttttatgcattcaagtagcattttgtttgacttttcctgtgtataattaggcattcttttagtccctttcctcagaagtcattttggaaaacggcaaattgtcagaaggcgtaacaataagttacaaatcttactgcaagaacggggtgaatggaacaggggaaaatggaagaaaatgttccaatatttccattggagatgaggtatgttgtataaagcattttctgtagaaaacattggttatttataagcaaatttagtttatagtttgagaaacattaaaataagtgagcaactttttgaaatattttttagtagatttaaattgtttagttggttgttaatcttttttttcccttcaaggttcaatttgaaattagcataacttcaaataagtgtccaaaaaaggattctgacagctttaaaattaggcctctgggctttacggaggaagtagaggttattcttcagtacatctgtgaatgtgaatgccaaagcgaaggcatccctgaaagtcccaagtgtcatgaaggaaatgggacatttgagtgtggcgcgtgcaggtaagctgggtgttgtcagacagtgacagagctacattggtttagagagtataggcaggtcatattttgggacatccagagaatatctctctatttggagcaaattattttttccaaccacggttgctcaccacaagatcagtttgatgatcttgtgtgtgatatttatagaaagttccttcctgcctttttttcttaaagtgattactctttaaaataaaagattttatagccatgaaagaagtatattcaacaaattgttaaggtagcgtttctctcatgtgagagcaatcaattttctagaacaaaataagcttgtgtaaaataacgtttataggaaaatgttttggaaaaacatcaaaccgatgatggcgatttcgtctgggaaatggaattatgaagcagtagaagatgtttgtcttgtactacatgtacttctgcattgttggaataatttttaaaaaataaatatgtgttgtaaaatacaaaagagaaaatggtattttcagtatgtagaatctagtactaagaaaactaacaaaattacttcagattttattttcacactgtggttactttttgtaattgaaaatgaaaaactgagtatacattgaataccgctttctctgtaaaagaataggaagagggaagagtgtttaatccagtgtcagccccaaaagactaggcttagaaggctattgactatgaaagaaatatatggctttagctcactatcaatttttaattgtctgtgctaagtaacaatttaaatgttagagtttctttatcttccatgttgtacatatcctgttttaatcatgcaggtccatttttagtaaaatgtcatttaaccaaaaagattatcttgaaaatactttgcctttctttcctttatatttttaccagatacagaatcagtgcagtcagtgtccatgagcattatgtgttctaaaaatacaca

SEQ ID NO: 4988 - DNA, 6000 bp, Homo sapiens
cattttgttgtattttcttcagtccttctgtgtttgtgtttatccacattgttttaaatatgtgaaagttgagttcattctacatatatttattaaagtttatttaacaaatccttatatagtgcatattatgtgccggacactgttttaagcacattctaacacatttagtaagttatatatagtttttgttctgcttttgttctcttgacattttatgagcttgtccccatactgttaattactcttttaaatgtggcaacatactattctgtaacttggatactgtggtttttttcccccattttctttcttttttttgagacggagtctcgctctgttgctaggctggattgcggtgcagtggtgtgatcttggctcactgcaacctcacgcgattctcctgcctcagcctcccaggtagctgggattacgggcacacgccaccacgccaagctgatttttgtatttttagtagagacggggtttcaccatgttggccaggatggtcttgatctcctgacctcgtgatctgcctgcctcggcctcccaaaatgctgggattacaggtgtgagccattgcgcccggcctttctcccattttctagttgtttgatattttgatccttccttccatccttctttggttttctttttctgctattgcacataagtatttcagtacatctctgaatctgttattaggatgaattcttggaagtagaattactgaatcaaagggtataaacatatttaaggcagttgttgacacatgttgccaaattgtcgtttagaaaaaattacactgtttatactgctagtcaggttggtcagttaatcagtactctttatatagttatttaattaactgtgaatatatcagtttttccagttcttgttttcctctagttaattcagcagttattgagtatcttactgcattccagcacgatggtaggctctgggtatgcatagttcaaccaagagctctggcttctggggtcttcaggccctctgaaattctacgttaattttatgtgaatgtgcattttcagggggtgggcaagggaaagatcactttcattggattctcaaaggggtgtgaggcccaaggaaacttaagaacactttctgtgaatatattggcactttcaatcctttttttctttttttggagacagggtcttactgtcacccaggctggagtgcagtggtcccatcacagcttactgcagcctcgacctccccggcctcagccttctgagtagctggaactataggcacacaccaccatgcctggctaatttttctggtttttgtaaagatgaggttttgacatgttgctcaggctggtctcgaactcctgggctcaggggatcagtctgccttgggcctcctaaagtgctgagattccaggtgtgagccagcacgcttggcctgatgcttttaattcttaactctgggaaggagatagcatagatgctgtctctgttaagggaactgagaggttcatggaagttaaataacttgctttttattcacatagctactagatactagagctcagaataaacctcacctttctgcccatttctctataactttttatatattgatttctttgaagagagactttgccaagtgctgctgaattagaggtagactgtttctcattttccaaatgtaatgttatcaaaagagaaagtaaacaaagtatggcatactgtgttcttagagaactcatgaataattaccactttcttttctcagtgctttcactgcctattcaattgttagcctggagttttattgggaactgatggtagattattggggtgcatagtgtccagaatctacctaaccttgctttctgtttgaaaaataaggttaacatttgccactttactactttgtttttttccctcgtaagaactatttacattagtaaaatcttaattgcatctttttcagaattcatggatgtgtgtttcaccttcgaaagatatagcctattataattttaaagcactgatttatgctggtagatttttcagattgttttccagatatatagagtgctgaataatgatttggcatattcatacacattgcattagttattttcaaattggctccctcctgagggaaatgctgtttcagttgggcagccagagactcttcagttatttgtgatgtttgtatttgtctacctgcctggaagatgaatttcattaagatatgaccaaccaacaccctttttatatagcctgtcataataatagattttcccttttaacatgcttcgtttctagactttacatgagttaaagttattcttcaagacctctttgtcaatccttctgagagacactgttcaaaaatttcatttgtttataaattggcattttctccttctgtacaaacatacacactattcatacacagatgcatgtataggtacataccctaatatgtgtagtgatttcctttgccaaataagaaaattatgctcttaaaattttttgtttatttgtttagtgcctagtctgtgcagggtactgaagcaggcatggctggagataaaaaggatataatcagttatggacaaagcgctcaagacctaatggtgtttttgaggagcaagatactggtatgaggtagaaaatggtacaggcctacatgccataagggaggtatgggagtgggtataagaagtgtggggagtggggagtcagggattcctttgtggaggaaagggctgggggatggtgaggattttagactggacattttaggtagagttaacagcatgagcaaaaaagttcagaggccaagagagcacagggtgtgtgggaattgagtttggcttgagcgtagaggcagatatatcagttgggaaacaaagagttggactaaaatccagactctgaggaatcttttaaaagctttatacagattggccgggtgcggtggctcacgcctgtaatcccagcactttgggaggctgaggcgggcggttcacctgagatcaggagttcaagaccagcctgctaacatggtgaaaccctgtttctactaaaaatacaaaaaattagtcgggcctggtggcatatgcttgtaatcccagctactcgggaggctgaggcaggagaatcgcttgaacctgggaggtggaagttgcagtgagccgagatctcaccattgcactccagcttggacaacaagagtgaaactccgtctcaaaaaaaaaaaaaaaaaggctttatacagataaatgccatactgtatatatcttagagcttcctacttaaatctaccatattgttaatgaccattatcaatgaatatttgtttctaacggcaaggaattcaatggctttgcagaggtagctgtgaggtaccctactgccactgtggccatttgttgtcccttaagcctggaccttcctttggttctgaatatcccttccgtagctgcagttgcctgctaccttttgttcattatcacactccttggagaccccatttggggatctcttgctgtcagtttttctagctcctgctgtagaaaccctttggagcaatctcattttttaaccctccgttgcttcactgctcagcctcagggttttttttgttgttgtttgtttgtttgtttttgccatcatgaaaatcctaaattccttactgcctaggagggcttgggcagaaagaaaatctatgtgggagtcgctgttggagacaaattaattttcttcccatactttgagggtaagaaggtatttccctgacattcttccatgggactttaatgtttactgccatctttggtgttgtagttttggggtacccactttaggttggtctataatatgggaagctactctctctcttaaggattggggagacatactgctgggtatcttgagttataaattagattgctatttctttgagccactaaatgatgtagctacaatttatgtttaagaacttttgatcaataaaaagtttaataatgtatctttagagaaattgcatttcatgtttcaaataaccaatattatagtacaaatatagtatagaacttaaaaacaaacttgtgcttgcttttttgttcttgttcagaatgatttcttaatttttttctaattgcttaatataccaaaacaacttcttttgattgacatgtttagtatttgtaggttttttggattttcttttgttttattagaaacaggtacatttttgaaatactaggtttattaagttagaaaccatctgaatagaattatagtagcagtatctttgaaagcagtcggggtggaaaatgactcatcttgaggggactttaaggcaatttataaacagtgatgtttgctgaatagaggtttgccttttaatcttcctgcttatgaatagtcactgggtgttttcatagaatctgtggcttccagtaacttgtctttccaagaatgttaaaatcagtgtttatctcagagagatcttatagctacaaatggttatctctgtttatgaccatattcttgagcttttgtatatattaaataaaaactttgttatgtgtttaagctttttttgtttttaaaatcaatttattttgaagttactttataaattttcttgtataatttgctttgtataagggatgatttcacttaggtaatgtttgaaaataaagatgattaaaattttttcattataaaaagtcttaaagatacacaaaaaaagggaggaatagtacactgaacccacacttatttatcactcagattcagctattgtgaatagaaattttaactgtaggaaatgttggcttttttcttgtcttttttttttttaatgtaactattttgcaaactagtgggctaatttgcaatttttattttgtgcagatgatgtgatgccagccacttactgtgaaattgatttagataaagaaaagagagatgcatttgtatatgccataaaaaatcattactggtaccagatgtacatagatgatttaccaatatggggtaagtattgtatgttgtatttaagatttgggaaaatttgcataatcagaatttataaaatgactctgttaaggtgattgtgtactggatcatggtgtaaatgtgttttcactgttttttacagaatgattttaataccagttttatggtcacctgttgcttgaagaatttttgacattgccatgccttacatgaaacttgcctaaaatataacttttttatagtataacttttcagattcaagaatgagaaggtgcttagaacaatctaaaaatttcttctgcttccattttttttcatatcttaatttgttcttttaaatacagttaaagggactaataggattttgaagtttcattctgtctttttctcatgttggtactgtggtagtatggtttcttggtatgatagtttcttgaatggcttattttgctaaaaaatgtttatgtttttgcccttatttatccatattaatggagaagagctatggaatagttaatgccaatttatgaataatccaaaatcatttatgttggacttgattaaattatttataatgcaaagcacagccagctgtcatggccaatatgtttgatcacatttttctctaattgtttctttcttttgtctctggaaatctgctgttatgtataatgaatgtttcttctaatgcttaaaattgttagcagattactgtcatcatgagcagtaaactatcaaagtctgaacatatcagatcagcatttaatatcatactaagatgaaatttagaaagttaatatcaagagataattatatgcatcatcattactgtgttgcatgttaattaggtatatgtagttagtatatcatataaatgactgcagttaccattatggtaacacagacatttctctgatccgctctgacagtggtaggaagatgtgctgaatattcactgaagatttttctgagcctgtag

SEQ ID NO: 4989 - DNA, 6000 bp, Homo sapiens
ttaaaagtgtattttaattttcaaatagctattcaggtgataatttcatctatagcactaaaaaccaatgaaaattctgacatatatttgtttataaaattccttgaatgctctgtatattgtatttatatggtatatacctgagggcttttctgtagcataaaagaacagttcattatttttcactgttctctgggttgaaggagctcatttgggcagctccatcttgggggtctctctcttgtagttgcagtcagatggcagctggaatgagagtcatctgaaggcttgactgggctggatggtcaagatagcctcttcactcactctgctagaatgactgggacagctgggtgtgggctggtcacctctctccgcacagcttcttcatgggactagttggctttcacacaacggggcagtctgaaggcagtcagatttcctacatgacagctgacttctagagtgagcattctaagacattgagttttttcaagtagataatttatttgctctactctttcaaactaagaagtaagataaatgtatggggccagtcattgtagaaactgcctggtaagtaacgttacagcatccttttatttttttagtcgaggtgaaattagcatgagattacccattttagtgcgtacaacccaatgacatttcatactttcacagtgtcagtgttgtgcaactatcacctatatctactgtcaaaacattttcatcacctgttaagcagctcttctgcatttcccactctcttcagcctctggcaaccaccaatctattccttgttgctctggatttatctatttaggatctttcatataaatagaatcatacaacatgtacctttttgttggtggcttttttcatttagcatgtttctgaggtttatctaggtagtagcatgtatcagtacttcattcctttttatgtctgaaaaatattccattgtatgcatataccacatttcattcatttgttggggttgtttccaccttttggctatttgtgagtagtgctgctatgaacatttcatatacaagggtttatttgactacctgtgttcaattctgaatatctgaatctcagagatacgtgggttcagtttcagtccatggcaataagataaatgttgcaatagaatgaatcacactaattttttggtttcccagtacatataaaaactatgtttacactatactgtaacctattaagtatgctatagcattatatgtaaaaaatgtatatactataatttaaaaatattttattgcttaaaaatgctaacagtcatctcagcctcttcaaatgagttgtaattttttgctagtggagagttttaactcaatgttggtggctgctgactgattaggatagtggttgctgaaggtaggggtggctgtggcatttcaagaaaccacttttgtttgctcatccatagaagcaacttctcatctgttcaagttttagcatgagattatagtaatttagtcacattttcaggcccttctaattctagtccttttgctgtttctgccatatttgtagttacttcctccactgaagtcttgaaccctcccaagtcatccacgagagttggaatcaacttctttcaaaaccttgttaatgttgatatttggacctcctcttgtgaatcatgaatgttctgaacagcatctagaatgatgaatcctctccagaaaattttcaatttactttgcccagatctatcagaggaatcactgtctatggcagctatatttcaaatcacaaatatatatttcaatatcacaaaatgtgtttcttgaaagttgaaattactctttgatgcatgagctgcagaatggatgttgtgttaacaggtgtggaaacaacataatcaccttgcacattttcatcagagctcttgggtgaccacgtgcattgtcagtgagcagtgatatttggaaaggaatcttctgaggagtaagtctcaatagtgggcttaaaatattcagtggctgggcgtggtggctaacacctgtaattccaacactttgggaggccaaggcaagcggatcacctgaggtcaggagtttgagagcagcccggccaatgtggtgaaaccctgtttctactaaaaatacaaaaattagtcaggcatgatggcatgtgcctgtaatcccagttacttgggaggctgaggcaggctgaggcaggagaattgcttgaacctgggaggtggaggttgcagtgagccaagattgcgccaccactctagcctgggtgacagcaagactccatctcaaaaaaaaaatttttttttcagtaaaacatgctgtaaacaggtgtgctgtcatccagattttgttattccatttttagagtacaggcagagtagactttgcataattcttgagggctctaggatttttttcggaatggtaagtgagcagtgacttcaacttaaagtcagcagctacattagcccctaacaagagtcagcttgtcctttgaagctttgaatcaggcattgacttctctagaactgtgaaagtcctagatggcatcttccaatagaagactttcacatacattcaaaatctctttactgtacccacctccttgatgtcagctagatcttcctggataacttgtggaagcttctatatcagcacttgctgcttcaccttgcacttttatgttatagagatggcttctttctttaaaagtcatgaaccaacaacctctgctggcttccagctttcttcctgtagcttctcacctctctcagccttcaaataactgaagaaagcctttctttaggttaggctttgacttaaggggaatactgtagctaatttgatgttctgtcgagaccagtaaagctttcttcatatcagcaataaagctgtttcacttaccattcttgtgttcactgaagtagcacttttaatttccttcaggaactttacctttgcattcataacttggctgtttggtgcaagaaacctcatttttggtctgtctcagcttttgacatgcttcacttactaagcttagacatttctggcttttggtttaaagcgagacacttggctgggcatggtggctcatgcctgtaatcccagcactttgagaggccgaggcaagaggattgcttgaggccaggagctcaagactagcctgggcagcatagtgagatcctgtctttacaaaaaataaaaaagttagctgggcatggtggtacatgcatgtagttctcccacctatttgggaggctgagacaggaggatttcttgagcccagtagtttgaggctgcagggttgccacaaaccttcaatttgtaaaaactccaatatctgtgaagtgcaataaaatgaagcacagtaaaacgaggtgtgtgtgtacctaggagtagaatggctggatcatatggtaattctatgtttaactcttgaagagctgccaaattgttttacacagctgttgtaccattttacattcccaccagcaacgtaggagggttccagtttctccatgtccttgccaacacttgttattttcctctcttttaattatagccatcctagtgggggtgaagttttatctcattgtggtttttatttggatttccctaatgactgatgatattgagtatcaaagttctcgttgaccatttgtttatcttctttggataaatgtctcttcaagtcatttgcccattttaaacttggactaaagtttttgagttctgaaagttacttatgtattctggatactagatccttgtcagatatatagtttgcaaatattttctttccttctatagattttcttttgactttcttgaagttgtttgatgcaaaaaaagttttaaaatttgatgaagtccaatataatttttgttgttgctcatgcttttggtattatatctaagaattcattgccaattccaaagtaagatttaccctatattttcttctgaaagttttctggttttagctcttaaattgttaatccattttgagttaatttttataaatggtgtgaggtagggggtccagcttcattctatgtggatatccagttgtaccagcaccagttgttgaagaggcttttttcccccacattgaatggtattagcacccttgttgaaatcagttgactatagatgtataggttgaaatcagttgactatagatgtataggtttatttctgtgctcttaattcttttccactgatctatgtctattctcatggcaagttgatagcttttacctgtggtatatggtagtatagagtattgatttttcaagctttgattacattgtaaacttttttttttttacaaacatggtaaatttattaaagaaattatttcctttaaagtatcagatttataagaacaataacagcaacaacacacaaacttattggatggttttatttaaaactttttggtgtattttatcatttctctgactgcatatggaatagtgatgcagatacatagtatatcagtgtgcattgtaattgaattttcactgtaagttaaatttaccttgagcctctaaataaatagttatgtaaattcatcctgccaaaagatgtgatggtgccagctatagaagtaccagaatagtaacagctgtctggtgcagatttgggctaagcatcacatcaagaaggaatcacatgtctgtagtctctagagaaacagttcttggcacctaatggttttttaactttaatcagtacaataaaagttgcagtactttaggaccagaatatgatacaccttttaagtctattttaatctataatgtctctctttttcttttttttcttgtaataatttacttgctaaagaaacttttttttttcctttgtttcttatagtctggctcttgctgattgaattcctttggtgcagtttagcatgttcctctgtgttctgcatctcctgtaggttggtatttggatatagaggggatctaaaaaacattttttcttgttgctttatgttcacatgataggtgatgtttgtgtcttccatcaggaggcacatcatacctgcttatctctctttccagtacattaactagtttattttgattcactttagttttaacaattcaagggttttttagagaggatggtgtagagcataagataggagatctagagtgcggtaatctggattcaggctttgactcttggcctactagttttggaattttggaaaatcacttcccctgtgtattaagttccttatctgctggggatgattatgcctactcctaggattgtttagaagattaaaagagttaacatatggaaaagaaccttgtacagagcctagcatgtagcaagtggtcactaaattttaacttttgttgttttgtgaatttaaaaatattctaaaataatctaaaggatagattatcttgatttgtgaggaaattaaaatttggataactattttttttggctcacctggggtttttttagggaaaaagtaagtaaattattcagctgaggtgagtagctctctgttgtccccatcacagtgaataaatagttacatttagtaaccactcttcacaaactgaatttcaaaagtgatttttgtcaatgcctcagatgttggtgtgtgttcattttaattgaccttacctaatgttggcaagttgccccctcattgaacagatttgcagtccatgagaaatactttcctgtttcatagggagcttactgttaatatttttattttacagtgtaatgttcaagctcagaaatgccttatgtggatcgtcagaatcgcatttgtggttttctagacattgaagaaaatgaaaacagtgggaaatttcttcgaaggtacttcatactggataccagagaagatagtttcgtgtggtacatggataatccacaggtttgtaaaatcccaaggattatcttttaaaagcacagaaagttgtatttaagtatttaacatact

SEQ ID NO: 4990 - DNA, 6000 bp, Homo sapiens
ggagaccgtaaaagaaagtattgataagttagttacataaaatcagtaataacaaaaacattctgtgtcagaacaccgtaaacaagatgagaaactaaacaaaggttccacttcattaatgtgtatagaaatccaataaaaactgaggaacataacaaaaaaatttgcaaaagacataacaaaattataaaagaaatggttagtaaaaatatgaaacaatgtaaaacctgaaattgataggcttcaccaatgaattgatattctaatttacacttatgaaatgagcaacagttttttaacattaaagcacttcggttggaaatgtggtaaaatggtatttgtacactgccgttttgtgggagcttatattagtagtgttgccctatggtatccatggggaattggttccaggacctccttcagataccaaaatccacaaatactcaagtccctgatataaaatggcatgatatttgcatataacctacacatatcctcctgtatactttaaatcttctctagattacctgtaatacttaatacaatgtaaatgctaggtaaatagcttttacactgtattgtttagggaataatgacaggaagaaaagtatgtacatgttcagtacagacacttttttcccccatttttgatccgtggttgcttgaatccactgatttggaaaccacagacacagagggtcaactgtatattacttttggatagaaattagtgtgtatagagaattttagaaatgttaatatgctcttcaacttagtagttaattattcttttaggttttattataaggaaataatcagatgtgtactaaggtttatatataagatcatcagcatgtgtatgtgcatgtagtacagtatgtgtatatgtgtacttggggtgtttatatgtgcatgtgagcaagcatgtgtgaactgtgcacacatacatttggaaacaatctaaatttgtccagcattaaatagagtacacttatattgaaatacataatcattaaaagctttttaattctttttaaaaagaatttgtgatgataagaataaaacacttaggataaggtataaaaaacagtatacaaaactgtacaactgtatatataaagtgcatcctcagtttcatgtaaataatacatgtattaatatatatatgcttgcttccccttgctatttatctgcataggaaaaagactggaaagaaataggcaaaaatgttagcaacagtcctctctcagttaacagattcagtgagttggttctttatgctcttgtgtgttttccagattttctataagaagcatatgctggttttataatctcagaaaagatacgttggagacagtctgtattagcgcttaccatgtagaaggcatactcttccttaggtagatgcaaagaaacctaaaacatactttgaacatagagcctgagaaattctgggattatggattagatgaatatggacttttcagttatttaacatactgaaagcaaagggaaagccttgaagattcttgtgagtatggtaggagttaaatgacaagaaataatactttgcccagttttaagagaactcatgacatttatgacagtcaagaatgataaattctgaattatgtcttgtctttgatacagaagacaaggaagataacttatgtctctctgtggctttcagtgtcaaggtgatccaaaatcacggtcccaaattttgcattgttctcaccggtttgtgggagctaaaaattaaaacaattgaactcatgaagatagtagaaggatggttaccagaggctgggaagggtagtgagaaggtggggaggaagtcgggagtgttaatgggtacaaaaaaatagaaagaataagtatgacctagtatttggtagcacaacagggtgactgtagtcaataataatatagttgcatattttaaaataactaaaagagtataattggattctttgtaacacaaaggataaaggcctgaggggatgaataccccatttaccattatatgactgttatgcattgtatgcctgtatcaaaatatctcatgtaccccatacatgtatacacctatttacccacaaaaattaaaaattaaattaaaaaatcctgctctctttggggaaggtctagtttagatggtaactaggtcatagtattaatatttaacatatgtattgcattgtcattgtgattctgatttttcattattttctctctgacacttcacataaaatgttctgttctttcttctttctgacagatgaaaatagatgtttaaaagcaaatgccaaatcatgtggagaatgtatacaagcagggccaaattgtgggtggtgcacaaattcagtaagtaaggttgctcaagtcctttccatttgttctctggtcatttagtgtggctcagtgctgtatccttcagaagcacatattaatttttatgtaaatcataaaatgaataacctaatggtttggagctatgtggttcaacacagtagccactaggcagatgtggctattgagcacttttgtacaaattagaattgctctaagtttcaaagatatacaagatttcaaagacttagtattaaataaataataatggtgaaatgataatttttgtatatttaaaaataatgttataacagtgttaaaattttctctttttctttttttagtgtggctactaaacaattttaaaatacatatatttgtagctcatctttgtggcacatattagatttttatgggagaaccttcaaaaaaatcctagtcatttagtttgactgtttcagatttccccttttttgatggggaggtataaattaaccttcttaattatatttgagttaaactactggaattgatttgcatcccaatataagcttattgaggttaattagggtttggattttattcacttttgtcatctctatacttttgctaatatggtaccttccacaaagcctactaaatgttcagtgagtcaatgaatgaatgaatgaatatatcaaaagagaaggtaaggagaagtcattttgaggttgtatagtttattcacagaatgaataactaatatcagaagatcaaggggttactgattttgttttcatgcaggcatttgggcccaagtttcaagtgcctatttttgtatgcctaagtggtcaagtgtcagatatgtcgtatggtttgaccacatgaaagaaaaaatgagaggttttgttgtttttcaaaaattttctaatggtgttttctaaaagtggtgtgttgggattacattggcaacagtggaggaaatatggagtgttgtgagtttgtctcaggcaaggcttatgtaactgaagctcttggttttcatatctgaaaatgaggatgataatatccgctttatctattgttacaataattagaattgatgaacttaaagcagtttcacttaaaaacttctaaataagtggtagctgctattattgttaacatatccattttatggggactacagtttatctgtagttaaggattatcttagcctttgagctttggagcataatccttaaaattttaaaggctttctgaatatattcagtgaaattgtatttgggtgtcatgattgtaaatttcgtggattgattagtatttagaaatgtgtaattcactaggatcttgtgctttggtaggtagtagtttaggtttaataaatagtgcagctttgaattatctgattcttggtattcccttccagttgttgattacataaatactctcattagtatgatgtttctcttaaaaaatcttatgtaaaaactattgtgtattctttaaatttaaatatcttcacttactgttactttatacagcaccgttaaattgatatttgataaataaataccatatataatgtcactgtttcccccacattttcacatttcttgaaacacctttattcacagtctttatatagatctttaacagcagtgtttttgaattcactaaggcacttttcagttatatgattaaatttttatttctaagttgtttgatgtataccacatttaaaatctctgtcattactagaaattttactactgcaaatatccattcacctgccattaagaactttttttccttttttgaaatttacctgccattaggaccttttacccttgtcatatacttactccttttacccttgtcatatacttactattttgctttttaaaagttttttaaaaacttatttacaataatagctaatacttaaagttttttcaaacctgtgggaatacttatttaatcggtgctaaatttcgtgttgtccttttaaaaaatgcaataattaattgagatgtttttaagctcgtctgttttccctaaacatcgggttgttcagcatattgcgatggggagagtgccacataatatgagacgctttgtaaggacttttcaaagggaaattttggagaaatgatctgatatttgggtgtatgtatacattattagtagccattaaccatgctcaattagtgatttcactaaagaaattgcttttgattagatactctgaattacaagatagagcatttactgtgtacacttgggtcagttctgggaaaggtattactttcttggaaatgattgttttttaacaagaacacttaccacagtttggatgaagggagcattttgtttaaaagccagaattggggtacattagatgtgatttgatgttttgcaatttaattgcttatttgcaattattatgtaaaaaggtttgaccattacaattttcatttatacctatattttatatgtcatttagacatttttacaggaaggaatgcctacttctgcacgatgtgatgatttagaagccttaaaaaagaagggttgccctccagatgacatagaaaatcccagaggctccaaagatataaagaaaaataaaaatgtaaccaaccgtagcaaaggaacagcagagaagctcaagccagaggatattactcagatccaaccacagcagttggttttgcgattaagatcaggtatggaagcccaactctgtgaatacctgcgtgtttacttgaggcattcgacaccagctttatgcaaactctgaccagtttctgttgaaggctcgtttttacatgtggactggcactcaaaaatgtggaattgtttaaattttagaaaatttttgcagatataacaattgtaagacatatttacttggaataatattaaatgttgcctaatattcaaagtaaattttgttaaagattcagaaagtattaattagctttagtgagttttaaaaatgaaagtgttcatcctctggtctaattacataatatattataaaagcaacattttaacctgttcttttcctttgtatttgtttagtattattaaactgttaaggtttttgtaattatgtctgttagtcccacatctaaacatgaaggaaaaaacaagccctcatcctcgcttttctggtttccgacctttcttgtcaggagaatggtagagtggccctgtcccctgacttccctcccggcccctcctcaaccaggtcagccctctcctcctcatcctgctctagcaaagctccaccatcgccttcagcccgcagacccaggggacccttgtcaggattttttttaactcttctgtaccaagtaacactttgtactttttgaaatgctctgtccttgatcaatgataccactcctcggtttttctttgtgtctcttaccattgccttccaggcctctttttgtgtcttttttcttcctccctttttgcagtccacctaaatgtcagttttcctctcgtggctttaaaacccaattgtatgctgcagcaacacagacttttcttgagctccaaacccatttctccaattgcctattagaaatctatatagagaaaactacaagttaaaattttaattacattttcatccaaacctctctcctgtatttc

SEQ ID NO: 4991 - DNA, 6000 bp, Homo sapiens
ttttattattattattatttttgagatgaggtctcactctgtggcccaggctggagtgcagtggtgtgatctcggctcactgcaagctccacttcctggattcatgccattcttccgcctcagcctcccgagtaactgggactacaggtgcccgccaccacgcctggctaattttttgtatttttagtagagatggggtttcaccgtgttagccaggatggtctcgatctactaacctcgtgatctgcccacctcggtctcccaaagtgctgggattacaggcgtaagccaccacgcccagcctgtagtttattttttaaagtaattttttttttgtaaatcagtatgttaggacccatcaatatccttactgggaagggtaagtttaaaggaaaagcatagtcagaagtcacaaaagttcctctaagtcactagggccagtgaaggagaggtctggtgagagcttcctcaccagagatgcattgcaattaggtataggaaggcttgtgtgtgcctctgttttggggagtataatcctgggaacctaaatctgaatactagatctgcctctcattgactgtgtcaccttgggcagatcacttttaacctctgtgtcttggcttcctgtaaagtaaggaaagaagactacattaaatgatttttaagtttttttttcagctctcaaattttaccattttcttctcagttttttagtttgttaatttcatagttattagtttaggatcttttttgtgccaggtattgtgctaggcactggaaatacctagatgaatagcttctgcctgccagggtttataatctagtgaggttttttatatatatgtacacacatgtatttggaattggacagttacagtatagcgtggtaagtactgtggtggaggtattttcaagaggcagtggaagaatgggagaaggacccacctcttcctgggagactcagcaaaggttttaaagggagaatatttgagccaatgctttcaggagagaaatacgagacaagagaaggcatccaggtggggaattaccaattacagtcagtaaatgtttgtggaatgaatgaatgaagtttcaattttattttttatttctttggtgccattataaataagaactcataataccttaattgtataatttgtaggaaaaggaattatagaaccaaggagagagtgagcaaagagatggcaaggccacaatttgggaaacattatttcaaatggaggtctctagactcttcgtttctttccctttggctttttgtgaataaatgcctgtagagttctaagaagttatgggagtctagtagaaccagagggaacacttagagactttttgaagttctgccagtgtcagtaatttgtgttcttcatatacttgtctcagtctttaatgcagaaagaatattgattgtaacctatggctaatttgaagtcccacctatgtattgtgcctctttgggttttggcttttcattttactggtttgtttctatcctttagagatgattttttaagtgtcaagtacctgctttctgttatcagtgtttatataacatggaaatcatactagaagtttactattaattttaatattttccaggttcatggagcctgcggttattgtttgcctgggtggaattttaccttttggttcaatctttattgaaatgtaagttttgataatgtatttatgttttgagggatttgattatagtaagacaatttaggagttagggaacatgtaaagttatcagttgggagaacatctaataatctgttaattccatgattccagaaagggaataggctatataaaggtagctgttggctgtgttcttaaatattcaagtgatgtttatacctttttgtattgtattctagacctccctcacctaagaggaaatcttagaaatcaaaactatgtgttaaagaatggtagaccagcctttgatcatatgcatgatttaaggaattcctggtttttattgtattttaaaaatatttctgaggatctagggaactaggtaaaccaatacctactagtccgtctaggccctgacatcttttgatgcatagtcatttcctaggttccttccatagaggcctgcaggagtgctaggaagtgtgtatgtatttagagataagaggtatgccaccttgtgccacttactgtgctttacatctgcatcctttgtcaccattgcaaaataaaaaagactttcttttcttagtctatgtccccgtgccccctgatgggaatactctggttattttaggcaagaaagttcaccgtatgggactttctcaggtattgcagctgtacacccttggctcctgtccactaaataccagtcattgtgacaacttaaaatagccttacatgtttccagatgccccactgctgattgtctcctgtatggtaggagtctccttaacggacgtaattggatttggtagttggttaattgaaaaagttggctcatgtaagataattattttaaaagatacatacataatattttaagacaagtaaatgtacgtccactgatttttttttttttaaatatagagccatggtcttttttttcattgaaattttttcatttttttcctttgacattggtaatacagatcctgtgttttccagcctttttaaagtgaagcaagaacataaagtcctatctgaagcattctaagtgcagaatccttctagatttgtacatttgtcccccagtctatagccgtctcaatcacatcgaattttataactttttaaaagggactcaccttattgaatctttccaaagcattcaacataatttttatagtaaccacacatcctttttactctgatgtttattggtttatgtaacatttaatttagtcagtttagtctaatggtactaacaggtacaactgacataaatagatatggaccaactcttggttgtcacttaccagctctgcatatgctatgggcattagtaccttaggagttggagtgtgtgtctctgtaactcgtggtttattaaagtcagttcaggaacttctttagttccagtctgacaatgctttgtgcctttattcagacttgacctgtgacttctttttcccttctacccctgtccccagtacttctgaaccacatgtctttgtgcttctccaggcactgtgttccactagataacttctctgctgtttcttcaacttatcttctgttttgtccaccttcaaacccattctcctacccatttggtagccaaagtggtctttttaaggtgtcatgtcatttctttacttaacacttcttattttaattgaggtgaggtcccaacaccataacatggccattaagggtctttataacgtaagaactggccctgttcacttctccaacttcatttcttagttctttccccttcatttaaagtattagccatagtgactaagaaaaagagggtgaaaggctctgttgtaatttagtgatgacttgataatggattagagtgaaagatctttttcttaattaaaaatcttaaagccttttcccttgctgtcctctgaagacagtgtgaatcttcttcaggcctgcttttcctaattttatacattattgctctaacttatttttctacttattattttattttctatttaataaaatacaaactacattgcttgaattgtgttgtatctacaaaacaatatggatacaaatacggattttttagctattttcatttgttcttttctacattatacttcttgaagcttctgttttattcagtttgtgtagaggtgaatgccctactgaagaatctgtttttcaaagattatccaagaaaatattttttgagagaattctagtggatttaattgatgaagacatggtaagagaagctgttggaagatacttgaaagaaagtcattaagtgagaaaaaaatgagaactaaaatgtgagactcacgaagagcagagtgagctttaagaataaagactggaaacctgtgtctttattgcatttacttaggtatttcatcttcacgtctttctgggcatataagatctattatgtctatggcttcatgatgctggtgctggttatcctgtgcattgtgactgtctgtgtgactattgtgtgcacatattttctactaaatgcagaagattaccggtggtaagtacctatttgtggatagaaatttggggaaccataatattttaaaataagatttcctttgaaatctatcaagtggagtaaagagctgtatagaaatgttgttacttaaaatagcatagggatttttttccagttataaaaatgatacatattttagagaaaaaatatcaaatttttaatgtattaatggagtactgtgttagaaatattttttacaaagtgcttgatatgaaaagagttttatgagaagcattgctccattctaaacacaaggaaacttagatatgaaaaaggaaatggtgtatttatggtcactggtaatagggaatctgacaaaattcaagattgagctttctaattcttagatgttttccttgttgataaatttgaataccatgtctatgcatttgttttttaaataagttttaaaggactttaaaggatgttttattaaattctttgctttaaaatctttgttttagtgccattcattcaaaagagatttatcttctttccccctccccccaccaggcaatggacaagttttctctctgctgcatcaactgcaatctatgtttacatgtattccttttactactattttttcaaaacaaagtaagtggagacatttttttaccttttatttaggaaactaaatttgtcctttaaatactaatatttaaggccttaagttgaaagtaaaactggatatcctatatatattttgttttatttcaggatgtatggcttatttcaaacatcattttactttggatatatggcggtatttagcacagccttggggataatgtgtggtaagttttgaaattctttgaacatcatgagtaaatctgagtttctctaaatccgaaaaatacagtaattggaaattaagaaattttatctgttgtttgatcagaaacaccaaaataaacccgagtctgatttcagtccttttgactcttccccacaacataatttattaccttattaatttctatttttatagaaattctagtaattctgtatagcacagaatttcatatcacagtttttcattcatgttgagaattggctttttcattttatttattgtttttagagactcagcttcttaactagctgggactacaggcacatgccactgtgcctggcttgagaattggcattttttaaagcttaggttcaatggaagatcatgatgtaggcatgttaaggtgttgcctgaatgattcctgtttggaaacttctcagagtattcttggagaaaccaggagacacctaggagacagcacagtttacttgttatgattgcatacttgggtatctacagactggacttaagttctagctgtaccatatgtatgctttccaccttgatctagttccccaagctctctaagcttctgtaaagtggggataaaaccactatttatggatctatcataatcatctattaaaaggaagaggtaatagttttcaccatgtgatagaatctctagaatgtgtgaaatagctagaaaataaagaacttttggaaacagtatgataaatgggaaaggcataagcatgagagcctgaaagcactggaataaatgtccatgctgttgctcagctttttttatggccatggaggtcacattaacctttctaagtctcatttttatctgtaaaatgggcatatctttcagagtggttgtgaggaatagtgtcatgtgtgtaaagcaccaagtgtagtgttgggactgttattaggtagtaacgatagccatttacatggtgagatatggaaagag

SEQ ID NO: 4992 - DNA, 6000 bp, Homo sapiens
gttgtaccctatcacgtgttctgccttgccctctccagactaatttatggtgttctatttgttttcttctcttataaactgactttttgtctgttttgtccactgtggattgggaatatcttttttatctttgcatcctgaaggcctggtgtttaaagtatttgttgaatgaaactgaatacatacccattgagttacttatggaattcccaggtttttgtaaaaattatgacaacatgttttattttattgtgtttaccgtgtaaaccacatttatttggtttttctcgtttgcgtttgattgccaacaggcaagtttcattttctaatctcttgtctaattaggggagccacagacatttacattaaaattcaagagagctgaagactatcccattgacctctactaccttatggacctgtcttactcaatgaaagacgatttggagaatgtaaaaagtcttggaacagatctgatgaatgaaatgaggaggattacttcggacttcagaattggtaggaatgttgggaacattgaccattttcattataaagtcttggcaattctcaaatgttgttttatattttattcctttgttactcacaacatacttgtgagataaacaagccagttttttagccttttctgagtggaagttgatattccagtcacacgtttaataatcttttctgccaccttgttcctctgtcactggatgctactgtttgacacagattgtacctcatagataatgacttgcatgcttattttcatactaacttgatcatttatcttatgacttactttattttatttttaagagtttcactcttgtcgcccagactggagtgcagtggtgtgatctcggctcactgcaacctccgcttcccgggttcaagtgattttcctgccacagcctcccgagtagctgggattacaggcatctgccaccacccccaactaattttttgtatttttagtagagatgggggtttcaccatgttggccaggctggtctcgaactcctgacctcaggtaatccagctgccttggcctcccagagtattgggactacaggcgtgagccaccatgcctggcccttatgacttattttataaacatgtgttgaatacccagattttatctaattgctaattagtatgtctgcacctgcccgtacagcctgatctcatcttagacctggatttttcatatgatgatgatctgctttccaaaccttatttttcccatttcatgcatccccagcttaacctcttttttgcctgcttctctccactcctgttgctctagaggtttagcaacagaatattagaaagatttgacagttatgaggcctaagagctgcctttcaaaaattagccctattttagtggaaacatttaaaaatagcacttgcttaaaatgttcttttattctgtaagcataattcaaggaccatggcattagggagctcctatcaaattagtgttttttaaaatggccagaattctagaatatttgtttattcatttgttcagcatgtcattattgagagctggtgtgccaagaaaatgaatgtgagttatttttaaagtagggaggcaaaataaaaagattgtcttaggtcttagtccatttgtgctgctttaagaaaatactataaactgggtggcttatgaacaacagaaatttatttctcacagctctggaggtgagaagtccaagatccaggcagattgagcatctggtgaggtccctcttctgggttcatagatgataccttcttgcgatgtactcacatagcagcagggagacagcagctctctggggcttctttgatgaggtcactgtaggagtctattcttacgttgctataaagacatatctgacactgggtaatttatgaagaaaagaggtttaattggtttacggtcctgcaagctctacaggaagcatggcgctagcatcagcaaggcctctggggaggcctcaggaagcttccaatcgtggcagaaggcaaagtggggagcaggcttctcacatggtgggagcaggagcaagagttggggagagatgccacacaattttaaataacagatctcatgagaactcactcactgtggtcagaatagcaccaagccatgagggattgatctgcccccatgatcgaaataccttccaccaggccgtaccttcaacattggggatcacattttaacatgagacttgggcggggacagatacccaaactgtatcagttactaatcccattcatgagggctctgccctcatgatctaatcaccttccaaaggaaccacttcctaataccatcatgttgggaattaggttttcaatgtaggaattttggggtaacacagacattcagtccatagtaacctacatttggtaacatagatgaattttttaaacaatgcaaatctctgtctttccatctatccatccattcattcatttatgtaccatttttttcttggcaggatttggctcatttgtggaaaagactgtgatgccttacattagcacaacaccagctaagctcaggaacccttgcacaagtgaacagaactgcaccagcccatttagctacaaaaatgtgctcagtcttactaataaaggagaagtatttaatgaacttgttggaaaacagcgcatatctggaaatttggattctccagaaggtggtttcgatgccatcatgcaagttgcagtttgtggagtaagcgcattcatttcctatcaggggatattgtttctattatgtgtgtgaattttaagtgtgattttactatgataatagaaaaattgaccttaattttcatagatttgattatcttagagaagtaattttaagtaaacccttaaattgcctgtatacataaagtgcctttataaaagcatatttaatctttatgcaaaccacacagttagtttattcatgcgggcttttaaaagacagaatgctaaccatttgaaacagcggggcaacctctctgtactgtagctggtggtctggattttagaaaagcccatgtgtcctaactttctggctttgtactagagatagaattgatgttattatctgaggcatcaccaggaaccttgaaattgctcaaagggagagtgtcttgtatcattttcctttggtcagttttcttctcactgtctttgaaagacacatctttctcctgtgtcttagtaattcaaaaagagagaactttttaagctctagtttttaacctatatgaatagatgtattttgagaagtgatacaatatttgtaattttaattgtaagattttcagtagcaagcccatccctattggttcaataatttgtattttatgatccatgtagcagctatgtattttgagatgacactttaatgatgtggctgaggctgaaactagaagacattgtcatgtcaagtttgtcctgcgtacctactcttgtctcatttttgttccctccagtgcccccattctctagatgaccttctttgattttagaggcctcttagtggttatttttcagtcaatttttgctaaggtgctaattgatgcccaaaataataagtgaaggaatatggatagtaattaagaatttttctatcaccactgatgctgggcaatttactcagcctctccagggctgttttcttctctttaagaagggatcatgatagtatctacctcatagggctcttgtgaagttaaaatgcatcaatctctataaagtaccaatgagcattcagcaaatactaattcctatattgttattactttcgacttttcactagagtgtttgcaatttaaggttagtccctgctgttatagccgaagcaagtagcattccaggtagtacctagccttacacctcttttcttactagccattgatgtgtgagcctgttagcagctcgttgtggggagggcattctctgggctgcctctaactaggccttaacctgtggtattaaacaagccataacacccttgattgtggctgtttttctgtgttggtcatgctgatccactcctctagatgcaaaagaatcagacattccacttttgaaagattgccagtattaataaatgtgattcccaccttaaagtattttactgtcttatgaagatctaaacagacgtattaaataaattaacgaaagcaggtaaattcctatagtcctatgattttataattataaattaccatagtgacaagaagattttacagttactttagattctttattggaaagggcaaggataaagtaaatgagtgcataaacagtactgattgaggagttagaatgggtgaaattatccttaaacaagatacttatttctgttataaaaaaaggaagcctcatatggtgggctgataaagaaggtgcatggcatagaacatagagcagagatgggtggatggggacaagacagcagcagtggggtaaagtaaggataggctcagacactttcatttattcagcaaatgctcatcaagggcttactgcttgccaagcagtgtgctggcttgctagctgctggagatatgatgataagcagaactaaaccaaaccaaacaaaacaaaaaaacagtttttaaaaagaactgagagattgagagatacggatggtcaggcaagatatcgttgtacatgggatggaagagcttcattcagtgggctttgtgtgtttctcagcaagataattaccattgtataaagagaagacacagaaaatacagaattaggttaaaaatacaatggtggcctatatgaaaattaaaggatttttgttgaattactgtgaatagtgttttaaaattgaaatccttttcttttcaagtcactgattggctggaggaatgttacacggctgctggtgttttccacagatgccgggtttcactttgctggagatgggaaacttggtggcattgttttaccaaatgatggacaatgtcacctggaaaataatatgtacacaatgagccattattatgtaagtgcctggttccttacatagtgaatgtgtttatgttggattttaatgtttaatactaagagcttgtgggtgactggcttggggtttctcagggtttgaggttttgctgttttggtaagtaggggtcctgattgaaagtgcaggaaagctagtgttgctgtttgtgaagatgcagctttgtatttgcttccttctgctcagacaagggcctcactggggtgggaaagggatgcccagatgccactttcactctttgcctcaactccccgcccacagcatttggtagcacagtcagtactctttctaaataaataatttatctagtctcatactctttgttttatacgatttttaaaagcagtcactctgcctttattgaaaataaatattggcaaagcattcaagttctagaagaaatccaaatggtaaatcttggtctttttcttaagttgtagataatagaatatttaattactgactattctttaatttcattgtccttatatttaatatacatagataaacttactatttaaaaccttttgaatatggaattttttattcatacatgaaagtaaagagaagaggattagcaattcatgtatacacacgactcacttcagcagtttatatttgatactgttatttgaaagcagtcttgtaatctagttatatgtatgcaactagatgtaatctagctatatatggattatatatgtaatctagttatctaaagcagtcttgtaatcgagttatgtgtaatcttgcatgtataactagattgaaaaattagaagagattataagggtgtatttaaatactaaattatattacttgatttcttaggattatccttctattgctcaccttgtccagaaactgagtgaaaataatattcagacaatttttgcagttactgaagaatttcagcctgtttacaaggtaaatgtgtgagataaaaagaacaagatt

SEQ ID NO: 4993 - DNA, 6000 bp, Homo sapiens
cagatagaaaacagatacaaggatgattttattagtatattttgcaaattaagtatttttaacactgaatttaataagagcaataaagttgtgatgaatacaaatctaatatcaaggggtttgaataaagtaagctattacttatcttcagcacccaatttatttagttatcagtattgagaaaaattcttcacaaatgagttcattccatgtgaatttttttttaacagcttgccttgcaatcttagagtatttttcaagtaacttcatccagaacttgaacataaaggagtagggaactggtttcacagcttaatcactatttctaacaaactgctcacattttttatcatatattaaaaagttggacaacaaaagggaaaatattgacaaatgctaagcaattgataatgtctttttgagactgtagattcctttattgactgttatgtgcacagaaggcaagatgtgccctcacttcagctgccactcaattgcctgtcacacacattgtgctgtagtagtacttttgcttatacaatttttagtgaacaaatatgtgcaggccttaattgggatgaggtgaaggagatagaataaaagaccaatatagcattacaagccttcctaatcaatgacaaaattcattcagttcagtatatacacagagataagcaggagaaactttattctgagatttgcatgaaaatgagttaacctggctgtgatatctccagtatactgatatttggtatagaactcctttgagctatatatatcttattacagttgaaagtgttttaaaaagaaactattttcaaaaggatactcaaatcaaatgcttgtggaatcccagaagctcttcagtaggacctgagagttctttggaacagtttgaaaaccattcttctagaccatgtaattcaacataggaatgttttcttcattttctctgtaattcttatttgaaattagagttctggtaaactaagggaaaaatatataggtctttattacaatgtgttaaggtttatgagtcttgtagttattaagaaagtaaaagcaaaaattgagatggaatttatcactccccatatttacgacatatgtatagttcataacataatgcttaaactatcttaaaaacacctgcttatttttcacatttcacgtattttaatatgagcataaattcatattattcataggcctaggcctaaactgaaacgcagataaattgagttcctgagtctgatgtttaaaatggtattatggagctctgtaattctcacatatttatatttgatctgaaaaggagatgacagtaccctttggcttgtttaaaaacacatatacacacacaaaaggatctaatgaagaatttttactaatattggttcaaagagatctttccttcttgtgcaatcactgtggatttcctaccccatacctcttcatttctctcaatcagtgtcttcacatgtttcattcagtttttctctcacttttactttctatttattataacctaaagtgtataatttaaagacatcttagaggtgattcaattctactccattttacagaagttcagagtgaaatgatcttaattagatggttggccggaaaagagctgattttataaagaaaaaaagtcacaaaaataaatgtttctaattggccactttggttctaaaatctccgtatggtcttctctgtaattttagactttgcactactaatgggcaggaaaatatttgtactattttactagtgacacatagatagcgatctccttctattaggattccaaggtagtgtaggatagaaaagagtgtgggctttgaggctggcagatctgagttgaaattttggtctggctctccactagctatgcaattatgggaagttacttatccttctctgagtctcctttccttcatttgcaaaataagaaaataacacatataaagctcttagtgcattttatgagctcaaaaagcatagccagataagtaagttggttataataatgaaagacaatggataaatatattaaaaaagcatgacagctgagagtgaaagaggagaaaaagggattgtggcagagatagtctggaagaataggaaagaatggaaaaccaaattggataagaactagttcaacttgtattcagtttagttctaatactttaaagcacacctttttgttttcattagtgtacttcttgcacaattttagctcatattgaacttaaacattttcttttgtggtcaaattgtgtttaaattgtgtctcttttatttgtttatattaatgttattgttctctgagtaatcacacatttttatttaatttacaggtggccgtttgttgcatctgtttttttgttattcttcctctaaatcttgttggtacaatacttggccgaaatctgtcaggtcagcccaactttccttgtcgtgtcaatgctgtgcctcgtcctataccggagaaaaaatggtaaagagaatgctaaatcttatgcgattgtttcacacaatatataagttcttaaggctgttgtgtacatgtaactttagaattggtatgtatttatgataatgacaatcttaagtttgagcctaagaagttcattttactatttcctttaacctacattgttaagagtaataataaattatacccttattccactttctgaatatcgtgccatttagagttaagtcaaatgcttttctatggtgtagaagtgggtgtgaactaaagctgcagttttactaatctgcaggccaaatctggcctgctccctgtttttatctataaagttttgttggaactcagccatgcccatttgtttacatattctctgtggctgcttttatagtacagcatcagagctggcagatcagtaatgtcagagatactatcacatgcagaacctgaaatatttactatctttccagatattttagtactgtacaatttagtgtacatttattacattccctatttataggaatagttgtatagtaagtagactgcatttttatgataacggagatatatatatataaagtctctgtccctagatattttaccagattataaatacagcatattcaggtgcttatacaaataggtgataattttgctctgtcccttctagacatggaggcatgtagacatttatagaaatggaggatgaataaaatagcccctatagtttgaattggccatattcttttctttccttagattggtgcttatgagagactttagttagaacttttgtagtttattattttatttatttatttattttattattattattatttttgagatgaggtctcactctgtggcccaggctggagtgcagtggtgtgatctcggctcactgcaagctccacttcctggattcatgccattcttccgcctcagcctcccgagtaactgggactacaggtgcccgccaccacgcctggctaattttttgtatttttagtagagatggggtttcaccgtgttagccaggatggtctcgatctactaacctcgtgatctgcccacctcggtctcccaaagtgctgggattacaggcgtaagccaccacgcccagcctgtagtttattttttaaagtaattttttttttgtaaatcagtatgttaggacccatcaatatccttactgggaagggtaagtttaaaggaaaagcatagtcagaagtcacaaaagttcctctaagtcactagggccagtgaaggagaggtctggtgagagcttcctcaccagagatgcattgcaattaggtataggaaggcttgtgtgtgcctctgttttggggagtataatcctgggaacctaaatctgaatactagatctgcctctcattgactgtgtcaccttgggcagatcacttttaacctctgtgtcttggcttcctgtaaagtaaggaaagaagactacattaaatgatttttaagtttttttttcagctctcaaattttaccattttcttctcagttttttagtttgttaatttcatagttattagtttaggatcttttttgtgccaggtattgtgctaggcactggaaatacctagatgaatagcttctgcctgccagggtttataatctagtgaggttttttatatatatgtacacacatgtatttggaattggacagttacagtatagcgtggtaagtactgtggtggaggtattttcaagaggcagtggaagaatgggagaaggacccacctcttcctgggagactcagcaaaggttttaaagggagaatatttgagccaatgctttcaggagagaaatacgagacaagagaaggcatccaggtggggaattaccaattacagtcagtaaatgtttgtggaatgaatgaatgaagtttcaattttattttttatttctttggtgccattataaataagaactcataataccttaattgtataatttgtaggaaaaggaattatagaaccaaggagagagtgagcaaagagatggcaaggccacaatttgggaaacattatttcaaatggaggtctctagactcttcgtttctttccctttggctttttgtgaataaatgcctgtagagttctaagaagttatgggagtctagtagaaccagagggaacacttagagactttttgaagttctgccagtgtcagtaatttgtgttcttcatatacttgtctcagtctttaatgcagaaagaatattgattgtaacctatggctaatttgaagtcccacctatgtattgtgcctctttgggttttggcttttcattttactggtttgtttctatcctttagagatgattttttaagtgtcaagtacctgctttctgttatcagtgtttatataacatggaaatcatactagaagtttactattaattttaatattttccaggttcatggagcctgcggttattgtttgcctgggtggaattttaccttttggttcaatctttattgaaatgtaagttttgataatgtatttatgttttgagggatttgattatagtaagacaatttaggagttagggaacatgtaaagttatcagttgggagaacatctaataatctgttaattccatgattccagaaagggaataggctatataaaggtagctgttggctgtgttcttaaatattcaagtgatgtttatacctttttgtattgtattctagacctccctcacctaagaggaaatcttagaaatcaaaactatgtgttaaagaatggtagaccagcctttgatcatatgcatgatttaaggaattcctggtttttattgtattttaaaaatatttctgaggatctagggaactaggtaaaccaatacctactagtccgtctaggccctgacatcttttgatgcatagtcatttcctaggttccttccatagaggcctgcaggagtgctaggaagtgtgtatgtatttagagataagaggtatgccaccttgtgccacttactgtgctttacatctgcatcctttgtcaccattgcaaaataaaaaagactttcttttcttagtctatgtccccgtgccccctgatgggaatactctggttattttaggcaagaaagttcaccgtatgggactttctcaggtattgcagctgtacacccttggctcctgtccactaaataccagtcattgtgacaacttaaaatagccttacatgtttccagatgccccactgctgattgtctcctgtatggtaggagtctccttaacggacgtaattggatttggtagttggttaattgaaaaagttggctcatgtaagataattattttaaaagatacatacataatattttaagacaagtaaatgtacgtccactgatttttttttttttaaatatagagccatggtcttttttttcattgaaattttttcatttttttcctttgacattggtaatacagatcctgtgttttccagccttttta

SEQ ID NO: 4994 - DNA, 6000 bp, Homo sapiens
atattagaaagatttgacagttatgaggcctaagagctgcctttcaaaaattagccctattttagtggaaacatttaaaaatagcacttgcttaaaatgttcttttattctgtaagcataattcaaggaccatggcattagggagctcctatcaaattagtgttttttaaaatggccagaattctagaatatttgtttattcatttgttcagcatgtcattattgagagctggtgtgccaagaaaatgaatgtgagttatttttaaagtagggaggcaaaataaaaagattgtcttaggtcttagtccatttgtgctgctttaagaaaatactataaactgggtggcttatgaacaacagaaatttatttctcacagctctggaggtgagaagtccaagatccaggcagattgagcatctggtgaggtccctcttctgggttcatagatgataccttcttgcgatgtactcacatagcagcagggagacagcagctctctggggcttctttgatgaggtcactgtaggagtctattcttacgttgctataaagacatatctgacactgggtaatttatgaagaaaagaggtttaattggtttacggtcctgcaagctctacaggaagcatggcgctagcatcagcaaggcctctggggaggcctcaggaagcttccaatcgtggcagaaggcaaagtggggagcaggcttctcacatggtgggagcaggagcaagagttggggagagatgccacacaattttaaataacagatctcatgagaactcactcactgtggtcagaatagcaccaagccatgagggattgatctgcccccatgatcgaaataccttccaccaggccgtaccttcaacattggggatcacattttaacatgagacttgggcggggacagatacccaaactgtatcagttactaatcccattcatgagggctctgccctcatgatctaatcaccttccaaaggaaccacttcctaataccatcatgttgggaattaggttttcaatgtaggaattttggggtaacacagacattcagtccatagtaacctacatttggtaacatagatgaattttttaaacaatgcaaatctctgtctttccatctatccatccattcattcatttatgtaccatttttttcttggcaggatttggctcatttgtggaaaagactgtgatgccttacattagcacaacaccagctaagctcaggaacccttgcacaagtgaacagaactgcaccagcccatttagctacaaaaatgtgctcagtcttactaataaaggagaagtatttaatgaacttgttggaaaacagcgcatatctggaaatttggattctccagaaggtggtttcgatgccatcatgcaagttgcagtttgtggagtaagcgcattcatttcctatcaggggatattgtttctattatgtgtgtgaattttaagtgtgattttactatgataatagaaaaattgaccttaattttcatagatttgattatcttagagaagtaattttaagtaaacccttaaattgcctgtatacataaagtgcctttataaaagcatatttaatctttatgcaaaccacacagttagtttattcatgcgggcttttaaaagacagaatgctaaccatttgaaacagcggggcaacctctctgtactgtagctggtggtctggattttagaaaagcccatgtgtcctaactttctggctttgtactagagatagaattgatgttattatctgaggcatcaccaggaaccttgaaattgctcaaagggagagtgtcttgtatcattttcctttggtcagttttcttctcactgtctttgaaagacacatctttctcctgtgtcttagtaattcaaaaagagagaactttttaagctctagtttttaacctatatgaatagatgtattttgagaagtgatacaatatttgtaattttaattgtaagattttcagtagcaagcccatccctattggttcaataatttgtattttatgatccatgtagcagctatgtattttgagatgacactttaatgatgtggctgaggctgaaactagaagacattgtcatgtcaagtttgtcctgcgtacctactcttgtctcatttttgttccctccagtgcccccattctctagatgaccttctttgattttagaggcctcttagtggttatttttcagtcaatttttgctaaggtgctaattgatgcccaaaataataagtgaaggaatatggatagtaattaagaatttttctatcaccactgatgctgggcaatttactcagcctctccagggctgttttcttctctttaagaagggatcatgatagtatctacctcatagggctcttgtgaagttaaaatgcatcaatctctataaagtaccaatgagcattcagcaaatactaattcctatattgttattactttcgacttttcactagagtgtttgcaatttaaggttagtccctgctgttatagccgaagcaagtagcattccaggtagtacctagccttacacctcttttcttactagccattgatgtgtgagcctgttagcagctcgttgtggggagggcattctctgggctgcctctaactaggccttaacctgtggtattaaacaagccataacacccttgattgtggctgtttttctgtgttggtcatgctgatccactcctctagatgcaaaagaatcagacattccacttttgaaagattgccagtattaataaatgtgattcccaccttaaagtattttactgtcttatgaagatctaaacagacgtattaaataaattaacgaaagcaggtaaattcctatagtcctatgattttataattataaattaccatagtgacaagaagattttacagttactttagattctttattggaaagggcaaggataaagtaaatgagtgcataaacagtactgattgaggagttagaatgggtgaaattatccttaaacaagatacttatttctgttataaaaaaaggaagcctcatatggtgggctgataaagaaggtgcatggcatagaacatagagcagagatgggtggatggggacaagacagcagcagtggggtaaagtaaggataggctcagacactttcatttattcagcaaatgctcatcaagggcttactgcttgccaagcagtgtgctggcttgctagctgctggagatatgatgataagcagaactaaaccaaaccaaacaaaacaaaaaaacagtttttaaaaagaactgagagattgagagatacggatggtcaggcaagatatcgttgtacatgggatggaagagcttcattcagtgggctttgtgtgtttctcagcaagataattaccattgtataaagagaagacacagaaaatacagaattaggttaaaaatacaatggtggcctatatgaaaattaaaggatttttgttgaattactgtgaatagtgttttaaaattgaaatccttttcttttcaagtcactgattggctggaggaatgttacacggctgctggtgttttccacagatgccgggtttcactttgctggagatgggaaacttggtggcattgttttaccaaatgatggacaatgtcacctggaaaataatatgtacacaatgagccattattatgtaagtgcctggttccttacatagtgaatgtgtttatgttggattttaatgtttaatactaagagcttgtgggtgactggcttggggtttctcagggtttgaggttttgctgttttggtaagtaggggtcctgattgaaagtgcaggaaagctagtgttgctgtttgtgaagatgcagctttgtatttgcttccttctgctcagacaagggcctcactggggtgggaaagggatgcccagatgccactttcactctttgcctcaactccccgcccacagcatttggtagcacagtcagtactctttctaaataaataatttatctagtctcatactctttgttttatacgatttttaaaagcagtcactctgcctttattgaaaataaatattggcaaagcattcaagttctagaagaaatccaaatggtaaatcttggtctttttcttaagttgtagataatagaatatttaattactgactattctttaatttcattgtccttatatttaatatacatagataaacttactatttaaaaccttttgaatatggaattttttattcatacatgaaagtaaagagaagaggattagcaattcatgtatacacacgactcacttcagcagtttatatttgatactgttatttgaaagcagtcttgtaatctagttatatgtatgcaactagatgtaatctagctatatatggattatatatgtaatctagttatctaaagcagtcttgtaatcgagttatgtgtaatcttgcatgtataactagattgaaaaattagaagagattataagggtgtatttaaatactaaattatattacttgatttcttaggattatccttctattgctcaccttgtccagaaactgagtgaaaataatattcagacaatttttgcagttactgaagaatttcagcctgtttacaaggtaaatgtgtgagataaaaagaacaagattctaaacatttttgattgttagaggcaaatcatgtctgaattgaaatgtgggaaaatgccaccagataggcaaaccgaattttacaaaagtggtttatattaatttttaatcacatattataaaactggtttctaggtttgactcctaaagttagttaggaggaaacatgggaactggcatttaaagataaaagttgctcagtggatcctaattggttgaatgaatagcagttgtattttacgtgttttatcttttaattgcaggagctgaaaaacttgatccctaagtcagcagtaggaacattatctgcaaattctagcaatgtaattcagttgatcattgatgcatacaatgtgagtacatcttaaataagatcagttttggacaataccctgttgagaatactttgtacaaagaaagtaaaacttccttcatacacactttagcgagcccaaagtactacagaaaaacttaaattctgtatgtatctagaggaaaaactttatacatattgtcttacaaaagcaagattcatggcctaaacaaagtgaaaatgtgataaaggcatgtggggagtatttccaaataactgtttgtttatcattaaggaatagatctccttgttagaaagcaattgtaaaacataacttacatttaaacttacaggatttctccaatctttttcctccccaaaatatcctttatagagtcatctattctgatgaattgtgctagaaaagtttttttttttgccaattcttctcttcccatatattcagaggatatgggtttctatttcaggaggtacacactcatatatacgtataccataaaatatataaaaatgtaaatatacatgtgatttgcctatttcaaaaagatttatagtgttgttttcccctcacagatgggaggaagttgaattgaaattaaagaggaattggcttatcctttttgagcataattcagtgtactttaatcacaccgagttagccttcattaataatcatttaaataatctgaaggcggttgtaatttggtaggtaacccttgtgtgtctcgtgcaccactttcagcccccatccccctaaccctttggcagcttgaattttagacatttttacttcatgtcatgggggtaccataacgctttggaaaggccagcctaccatatgaggcttcccttttttatggggtaccataatggtttggaaaggcctgacttggaggggtttttataaaggtttttaatattttacttgttccacagcttttcccattctcccctgtcttagataattttcctaactcttgttctttcaggggt

SEQ ID NO: 4995 - DNA, 6000 bp, Homo sapiens
accggagaaaaaatggtaaagagaatgctaaatcttatgcgattgtttcacacaatatataagttcttaaggctgttgtgtacatgtaactttagaattggtatgtatttatgataatgacaatcttaagtttgagcctaagaagttcattttactatttcctttaacctacattgttaagagtaataataaattatacccttattccactttctgaatatcgtgccatttagagttaagtcaaatgcttttctatggtgtagaagtgggtgtgaactaaagctgcagttttactaatctgcaggccaaatctggcctgctccctgtttttatctataaagttttgttggaactcagccatgcccatttgtttacatattctctgtggctgcttttatagtacagcatcagagctggcagatcagtaatgtcagagatactatcacatgcagaacctgaaatatttactatctttccagatattttagtactgtacaatttagtgtacatttattacattccctatttataggaatagttgtatagtaagtagactgcatttttatgataacggagatatatatatataaagtctctgtccctagatattttaccagattataaatacagcatattcaggtgcttatacaaataggtgataattttgctctgtcccttctagacatggaggcatgtagacatttatagaaatggaggatgaataaaatagcccctatagtttgaattggccatattcttttctttccttagattggtgcttatgagagactttagttagaacttttgtagtttattattttatttatttatttattttattattattattatttttgagatgaggtctcactctgtggcccaggctggagtgcagtggtgtgatctcggctcactgcaagctccacttcctggattcatgccattcttccgcctcagcctcccgagtaactgggactacaggtgcccgccaccacgcctggctaattttttgtatttttagtagagatggggtttcaccgtgttagccaggatggtctcgatctactaacctcgtgatctgcccacctcggtctcccaaagtgctgggattacaggcgtaagccaccacgcccagcctgtagtttattttttaaagtaattttttttttgtaaatcagtatgttaggacccatcaatatccttactgggaagggtaagtttaaaggaaaagcatagtcagaagtcacaaaagttcctctaagtcactagggccagtgaaggagaggtctggtgagagcttcctcaccagagatgcattgcaattaggtataggaaggcttgtgtgtgcctctgttttggggagtataatcctgggaacctaaatctgaatactagatctgcctctcattgactgtgtcaccttgggcagatcacttttaacctctgtgtcttggcttcctgtaaagtaaggaaagaagactacattaaatgatttttaagtttttttttcagctctcaaattttaccattttcttctcagttttttagtttgttaatttcatagttattagtttaggatcttttttgtgccaggtattgtgctaggcactggaaatacctagatgaatagcttctgcctgccagggtttataatctagtgaggttttttatatatatgtacacacatgtatttggaattggacagttacagtatagcgtggtaagtactgtggtggaggtattttcaagaggcagtggaagaatgggagaaggacccacctcttcctgggagactcagcaaaggttttaaagggagaatatttgagccaatgctttcaggagagaaatacgagacaagagaaggcatccaggtggggaattaccaattacagtcagtaaatgtttgtggaatgaatgaatgaagtttcaattttattttttatttctttggtgccattataaataagaactcataataccttaattgtataatttgtaggaaaaggaattatagaaccaaggagagagtgagcaaagagatggcaaggccacaatttgggaaacattatttcaaatggaggtctctagactcttcgtttctttccctttggctttttgtgaataaatgcctgtagagttctaagaagttatgggagtctagtagaaccagagggaacacttagagactttttgaagttctgccagtgtcagtaatttgtgttcttcatatacttgtctcagtctttaatgcagaaagaatattgattgtaacctatggctaatttgaagtcccacctatgtattgtgcctctttgggttttggcttttcattttactggtttgtttctatcctttagagatgattttttaagtgtcaagtacctgctttctgttatcagtgtttatataacatggaaatcatactagaagtttactattaattttaatattttccaggttcatggagcctgcggttattgtttgcctgggtggaattttaccttttggttcaatctttattgaaatgtaagttttgataatgtatttatgttttgagggatttgattatagtaagacaatttaggagttagggaacatgtaaagttatcagttgggagaacatctaataatctgttaattccatgattccagaaagggaataggctatataaaggtagctgttggctgtgttcttaaatattcaagtgatgtttatacctttttgtattgtattctagacctccctcacctaagaggaaatcttagaaatcaaaactatgtgttaaagaatggtagaccagcctttgatcatatgcatgatttaaggaattcctggtttttattgtattttaaaaatatttctgaggatctagggaactaggtaaaccaatacctactagtccgtctaggccctgacatcttttgatgcatagtcatttcctaggttccttccatagaggcctgcaggagtgctaggaagtgtgtatgtatttagagataagaggtatgccaccttgtgccacttactgtgctttacatctgcatcctttgtcaccattgcaaaataaaaaagactttcttttcttagtctatgtccccgtgccccctgatgggaatactctggttattttaggcaagaaagttcaccgtatgggactttctcaggtattgcagctgtacacccttggctcctgtccactaaataccagtcattgtgacaacttaaaatagccttacatgtttccagatgccccactgctgattgtctcctgtatggtaggagtctccttaacggacgtaattggatttggtagttggttaattgaaaaagttggctcatgtaagataattattttaaaagatacatacataatattttaagacaagtaaatgtacgtccactgatttttttttttttaaatatagagccatggtcttttttttcattgaaattttttcatttttttcctttgacattggtaatacagatcctgtgttttccagcctttttaaagtgaagcaagaacataaagtcctatctgaagcattctaagtgcagaatccttctagatttgtacatttgtcccccagtctatagccgtctcaatcacatcgaattttataactttttaaaagggactcaccttattgaatctttccaaagcattcaacataatttttatagtaaccacacatcctttttactctgatgtttattggtttatgtaacatttaatttagtcagtttagtctaatggtactaacaggtacaactgacataaatagatatggaccaactcttggttgtcacttaccagctctgcatatgctatgggcattagtaccttaggagttggagtgtgtgtctctgtaactcgtggtttattaaagtcagttcaggaacttctttagttccagtctgacaatgctttgtgcctttattcagacttgacctgtgacttctttttcccttctacccctgtccccagtacttctgaaccacatgtctttgtgcttctccaggcactgtgttccactagataacttctctgctgtttcttcaacttatcttctgttttgtccaccttcaaacccattctcctacccatttggtagccaaagtggtctttttaaggtgtcatgtcatttctttacttaacacttcttattttaattgaggtgaggtcccaacaccataacatggccattaagggtctttataacgtaagaactggccctgttcacttctccaacttcatttcttagttctttccccttcatttaaagtattagccatagtgactaagaaaaagagggtgaaaggctctgttgtaatttagtgatgacttgataatggattagagtgaaagatctttttcttaattaaaaatcttaaagccttttcccttgctgtcctctgaagacagtgtgaatcttcttcaggcctgcttttcctaattttatacattattgctctaacttatttttctacttattattttattttctatttaataaaatacaaactacattgcttgaattgtgttgtatctacaaaacaatatggatacaaatacggattttttagctattttcatttgttcttttctacattatacttcttgaagcttctgttttattcagtttgtgtagaggtgaatgccctactgaagaatctgtttttcaaagattatccaagaaaatattttttgagagaattctagtggatttaattgatgaagacatggtaagagaagctgttggaagatacttgaaagaaagtcattaagtgagaaaaaaatgagaactaaaatgtgagactcacgaagagcagagtgagctttaagaataaagactggaaacctgtgtctttattgcatttacttaggtatttcatcttcacgtctttctgggcatataagatctattatgtctatggcttcatgatgctggtgctggttatcctgtgcattgtgactgtctgtgtgactattgtgtgcacatattttctactaaatgcagaagattaccggtggtaagtacctatttgtggatagaaatttggggaaccataatattttaaaataagatttcctttgaaatctatcaagtggagtaaagagctgtatagaaatgttgttacttaaaatagcatagggatttttttccagttataaaaatgatacatattttagagaaaaaatatcaaatttttaatgtattaatggagtactgtgttagaaatattttttacaaagtgcttgatatgaaaagagttttatgagaagcattgctccattctaaacacaaggaaacttagatatgaaaaaggaaatggtgtatttatggtcactggtaatagggaatctgacaaaattcaagattgagctttctaattcttagatgttttccttgttgataaatttgaataccatgtctatgcatttgttttttaaataagttttaaaggactttaaaggatgttttattaaattctttgctttaaaatctttgttttagtgccattcattcaaaagagatttatcttctttccccctccccccaccaggcaatggacaagttttctctctgctgcatcaactgcaatctatgtttacatgtattccttttactactattttttcaaaacaaagtaagtggagacatttttttaccttttatttaggaaactaaatttgtcctttaaatactaatatttaaggccttaagttgaaagtaaaactggatatcctatatatattttgttttatttcaggatgtatggcttatttcaaacatcattttactttggatatatggcggtatttagcacagccttggggataatgtgtggtaagttttgaaattctttgaacatcatgagtaaatctgagtttctctaaatccgaaaaatacagtaattggaaattaagaaattttatctgttgtttgatcagaaacaccaaaataaacccgagtctgatttcagtccttttgact

SEQ ID NO: 4996 - DNA, 6000 bp, Homo sapiens
catctttgtggttttatctacctttggtctttgatgatggtgacatacagatggggttttggtgtggatgtcctttctgtttgttagttttccttctaacagtcaggaccctcagctgcagctctgttggagtttgctggaggtgcactccagatcctgtttgcctgggtatcagcagtggaggctgcaaaacagtgaatattggtgaacagcaaatgttgctgcctgatcattcctctggaagttttgtctcagaggagtaccccactgtgtgaggtgtcagtctgcccctactggggcgtgcctcccagttaggctacttgggggtcagggacccacttgaggagacagtctgtccattctcagagctcaagctgtgtgctgggagaaccactactctcttcaaagctgtcagacagggacatttaagtctgcagaggtgtctgttgccttttgtttggctatgccctgcccccagacgtgcagtctacagaggcaggcaggcctccttgagctgtggtgggctccacccagttcgagcttcctggccgctttgtttacctactcaagcctcagcaatggcgggctcccctcccccagcctcactgccaccttgcagtttgatcttagactgctgtgctagcaatgagcaaggctccgtgggcgtaggaccctccaagccaggcgcgggatataatctcctggtgtgccgtttgctaagaccgtcggaaaagcgcagtattagggtgggagtgacccgattttccaggtgccatctgtcacccctttccttggctaggaaagggaattccctgaccccttgcacttcccagatgaggcgatgcctcgccctgcttcagctcacgcttggtgcactgcacccactgtcctgcacccactgtccgacagtccccagtgagatgaacccggtacctcagttggaaatgcagaaatcattcgtcttctgcatcgctcacgctgagagctgtagactggagctgttcctattcggccatcttggaaccgcgctggtactgtcttctttacttcattcagagtatcattcttaagaaacacttgataaagcaaaacaaataaaataagtaatctctagttctaattatcttgaatgttttgccaaaccaaatgagatgctgcaaaataggcattttcaatattcctttcattacagaatatatatttgtccaaataaaaatagaagcttcagacagtttcactctcattgcccaggctggagtacagtggcatgatctcagctagctgcaacctccgcctcccggattcaagcaattctcttgcttcagcctcccaagtagctggggttacaggtgtgcacctccatgcccagctaatcttgtatttttaatagaggccaggtttcaccatattgttcaggctgccctcaaactcctgacctaaagtgatccacccacctcagcctcccaaggtgctgggattacaggcgtgagccgccatgcccagcccaaaaataattcttcttacaagttcacattcaaaaacacaattataaaatttctaatttaaatcttgtacagtgttttattctcatagcatatattcacttccttcctcacttttgtagtgacaatttcaatggcttctaatacaaattttgtttttaataattgaaatttgttaaaagtttcaaaactttaagtttggttgaaattctatccaataaacactttgattaaagatccacaactgattttgaacaaattgcaacaaaaatgaatagaggactcatttacaaactagttcaatacattgtaaggcactagattgattttcaaagtctttcttcaaagacaagcatttgtaaaatgtgactgactttggacaacaaactaaagtgcatactttcatgcttcattttttttttttttttgagacgaagtctcactctgtcacccaggctgccatgcagtggcacgatcttggctcactgcaacctctgcctcctgggttcaagcaattctcctttctcagcctccagagtagctaggactacaggcatgcaccaccatgtccagctaattttttgtatttttagtagaaacagggtttcaccatattagccaggctgctctcaaactcctgacctcaagtgatccacctgccttgggctcccaaagtgctgggattacaggtctgagccaccgggcctggccatatgtcatcattttttaattcaacattgatttaatcaccaaatatttgtccttcaattactttagatattttattagctcatcttcctccttcttcatgttattcctcatgattattcacttatatttacaaaaaaggggtattttgcttaatataggttatagtcctggcaaaccatctaatttaaatttgttttggatgccttattttaaatgaagtattattattgatagttgaattaaaataagcagggactggtttgatatacgtctgttttttgctttctgatactgccatagtcagatctactgatgtggatgacacaagcgcactgaatagaattctcattttaacatctggttaaccctgaagtacacccactgataaaccacctttcttccagatctttttcaaatgctatgtaattaacacctctctttcaatgtcaacaggtagagtgctaagtaaactaaagtgtgctcagatatgagtgttagggacagctatatcttcatggattatctagtagtaaagccaaactaatcattttaataaataagccatgacattttagtggcttatcacaatacaaatatatctctcactcatgtaacagtcactacagatgttcctggtcagtgactaggtatcctgcccatgatgcttcaggaacccaggttcctgccagcttatgtaccacagttcaagtaggttcctctgtcacctatgtctagatgatgggatgggatagagcaattcttaaaggtcttggtctggaagaaacacccatcacttccacttatattctgtagctgattactggtcacaaggccacacaaaggaacaaaggagatttgaaaatgtaatccttgattggacagccatatttcaattacaattccatattatgatggaaagggtagcatagttttcagttggcaactatcacttaatgtcattgattcttaactgcctacattaaactaaaataaattccagatggattaatatttaaatttttaaaaagcagataattattgtattagtccattagtgctgttataacaaaatatctaagatcctgtttacaaacaacaggaatttatttcttacaattctggatgggggaagtccaaaatcaagatgttggcaggtttggtgtctggagggcccagcctttgcttccaagttggtgccttgttgctgcaccctctggagggaaggaaggctatgtcctcacctggcgaaagagtggaagggcaaaagggcctagctagttatctccagcccttttataaggtcactaatcccactcataagaggtctaccatcatgacttaatcacccctaaagactatcacattggggtttgagttccaacctttgaattttggagggacacattcattcaaatcgcagcaattataatcacaaaaaaagaaaaatttgttatgacaaaaaatggaattcatgaaagaaaagtattcattaattgaattgcaaaaataagccatggcaatgagaaaaatgaggggagaggggaggcttgtaactcagaccacaagaaaagtggtcatttctttaacatataaatcaagaagaaaatcccaaaatccaataggaaaactattgaatggaataggcacgcaaaagatatgatagttcactcaaaaaggaaagataaggatactaagcagtacattcaaaattaaaccaaagtaagatgccagtggcacaaaccactttgctgacattgtaggataggctgtggcaaattcatatattgcttatgagggtataaatcaatacaacttctttggattttaatttctcaatagctctaaaaatttaaaagaacctatcctttggcctagtgaatccactctaaagaattatctctcacagatatggttgctgtgtacaggttaaaatatgatatttatttactgagcactgtttataaaagcaaatgactaaacaatgtatgggtccatcagtaaaattctggctaaattatgtttcatccatacattggaaaagtatagagcagttcaaaaaaataagataaatccatatgcactgacatgttcaaatcttctgccactgtagatgaaaaatgtgatctacataacatgaatagtgaagtagtatttatgaaaaaggtatatttgctatatctttgatatgcatgtatatgcatagaaagggtttgcaaggatgtagacccactttttaacacttcttttaagaggaatgggagtgaaagattttgatttttttttccccacttttcattctatgcatttacttctttttactaggagaatgtatgtacatgttacacttgtggacagaaaataaaaataataactaagtcaagtgtgtcagattcataaaagtcttacttgaaactgttactgggtgaatgccaagaaaggtaaaatctgtcactcaggacacgtggaatttctgtgccatttgtgtgcatggaagaaacacccacattctcccaataaattgcgagtccataggataggcacgcatttgatggccttgaagaagcgttccttgtatgtgcagaacccctgagaaaccaggcacgccacaaacacatttcagattagttgggcgacggggcaaaccacgtgctcccaacgcagcctccgcttccggagcgcggctggagggcaaactcccctagaatttctccaggaaaccgttgggtggggccaggagagcgttgggtggggccaggaaaccgtctggtgggatctccgcagctgcttttcacctgctgttcctcctgcgcttcctaagaggaagaatcaatgccgtgggtggagcccaagcccaggccggggccggagcagaagcccaagctcaccaaaccggactctgccaccgggccgcagtggtaccaggaatctcaggaatcggagtcggaaggcaagcagccacccccgggacccctggcacccccgaaatcccccgaaccctcaggacccctggcgtcggagcaggatgcacccctgccagagggggacgatgcacccccccggccgtcgatgctggacgatgcaccccgcctgccgctggagctggacgatgcacccctgccggaggaggaaacccccgaacccacggccatctgcaggcaccggcaccgctgtcacaccgactgcctagaggggctgctgtcccgcaccttccagtggctggggtggcaggtgggcgcgcacccctggatcttcctgctggcgcccttgatgctgacagccgcgctgggcaccggcttcctgtacctacccaaggacgaagaggaagacctagaggagcattacacccctgtggggagcccggccaaggcggagcggcgcttcgtgcagggccatttcaccaccaacgactcctaccgcttctccgcctccaggaggagcaccgaagccaatttcgtctcgcttctggtggtctcctacagcgactcactgctggacccagctacctttgcagaagtcagcaaactggacggcgcggtgcaggatctgcgcgtggcgcgggaaaagggaagccagatccagtaccagcaggtgtgcgcgaggtacagggcgctctgcgtgccccccaacccgatcctgtacgcctggcaggtgaacaaaacgctcaacctgagcagcatctccttccccgcctacaaccacggcaggcatcccctctacctgaccggcttcttcggaggatacatcttggggggcagcctaggaatgggccagttactcctgcgggcca

SEQ ID NO: 4997 - DNA, 6000 bp, Homo sapiens
taaactgaaaataaaaatttgcctaataggtaaatgagtgatcagaacttcagatgtggttgggggatgggtggcaggaggaaaaggttttaactcaggcctcacacatatataggactgaaatttagactagtgacatccccaaataatgattattttgtgtttgtgggtattaaaggtgttaattttttaaatataaacattaaaaatacactgtaatgtgatttcttgtcattaatttttcaatgtattaagagattttcaaaagataagtcactctgatctgttgtgacactgaaaggcaactttgaatagtaattattctgatttttaaaaagttacccaatcagtatttcattatgttgcgctaggtgcagatttgaacttcaattccaaattaagcaagcaaaactctttgtcaaattgtcttagcattactgaaaataatacttcacattttgtgttgtgccttacggggtttcaaagccttttcataaagctttaatatttgcaataatccctttgacaggtgaggcgagcatttgtttctctacaggcaagggaatgcctttttaatggggatgattttatatgccttaaaagtttcagagaggttgatgagagtttcaacagtataagtgagtagaagcgcccacttaaatgcgacatgtaagtggatcagaatagaaagtgtttaaaaccaaatatgcaccagtatttggactaataggagcatcaggagagtgtctggaggaagctaacatccccatgttctttatcagcatctcctattgtttttggcacggctaattaatgttttctgagtcttttgtaaagtgtcacataaaagcagcttcaatgaccccttccaataccaaactcctcctgaagagatacttaccttggaaccaaccctggcccttttctgctcagtttggctgtaacttgctttttatccctagctagccttgtcttgacttttctgagactgaatttttaatcttcagtctttaaaatgaaggattagattttgatattcgagatcattccacctctatgagtcttccctgttacacaacactacacatctctaatagccaggaacagttttgattaaacagatgcccaaatggccttacctaatttgagaaagaaaaagaaattcataaaggtcatttaaaaaagggattatgtgattgatggcaggctttgctaactacatgttctatttgctgggggaaggggagcagcatccacagtcttttggtaagttggtgccacataactttgagattgtgatgagtgtgcacaaacttgactgttgtactctcagaaaagtgatttgacccctgtgataagcagaaaataaaagattcctgtcctccaactccgccagaaaaaccatactaagataaaaaccatatgcaggaagccatgatcaactggagaagagatggcgtggccaaagttctaatgctacctgtcagaaaacacccccttttgcggaaaaccatcaattggacaagaaatggtgtggccaaagttctaatcagaaaacaccccgttttagggaaaaccatctttacaggtgggtagatccaaactacatcaagcagtactccagaaaaaaaaaaaagatttgttttttagcctcaatttagagctaatgtcctttaaaatgaatcttgagtccacaaatatcttttgaacactcattacatacaagatgcaatgcttggcactgtgagaagaagtcctagaagatacaccctgtgctctaaaaagacctattcatctagcaagctattacatttttgtgcaaataaaaactgtttaaaggtgcgcatgtgccaaattcaagaaatgataccaccttagtcagcacttgatagtgttcaattttattttggtccattaagtgatgctgtttttggttacctgacatattgttcagcattccacatgatatagagtggagaactaacaggactgtaattcatcaatttccctgggatggttgcatttgtatgttagacaaaaacttctgtcctggtcagctgcaagtgcagagatggcagagaagctagttgctatccttcaaagtgccacaaagtcacgggggagagtatggacaaagcaggctgaagccagcgctctcaagttttgctgcccacggccttctgtaattggcacatggacattattctaacagcgatagacggtggatacaccaaagcagaaaatgaatgggttggttggggctggggactcaaaggagacagtcttgacagcaaatctagcagctaaatccaaattaagcaaacctgctaatgccactcacttaaaaaaaaaatctttcttgctctcgcaaccagagcacccaagcatgataactgagaccacaagaaaaggacaatgtgtgctgaaaggaaatttgagggctaacttctgttgagggtaaatttgagtgatattttacttatgagcagaaatccaattttaatgttgagaaagtgagctctaatggtccgtttggagcagtgagaaggacgctcttctctgaaacactgcatcaaggacaagaccacgtctagccggaatgagaagaaaagtttctggtttaccctaaaagtgaagtgaaaacaacactggggaagggaggagatgttgtggggggtgggggcgcatgggcggtagaggtggagagccttggaaggacaggttgtttaactggaagcaactaggggcctacattatacctattttctgctatcatctagaaatcaaagcagcagcattagaaaaattcacccttgttccctttttgtattggctgtcaagaaactcaacactgcttctgaacctttatctcatcaacagcaaatatgtcagcagaatataataatgttttcatagtaccctgggttaaataaaaaggctgctgtagggctagaggctactgctgagggctcctgggaatgagcatctaaggaatgtcagtattccatcagtggcagttagtggacacacaccagttaggagattctgaattacaaattggcctattatatgtatctatatcttatatattacatattatgaattggcatattatatatatcatatgtatgcatatataccatatatgatcttagttttaggcccatatattggtccatatttttgtagtacttgttctttcctcataatagatggcgttatatcttttatttctctttacataatcttacttgattttaatttcaaatttctcagttattctttaggtaacgtgtggagtacaaatttaaaataccatgcatattacttggtgtgtttgctgtgtgctaggacctatgattttactgctgtaaacccacagcaataataataatcctacttcttggcagggtgaggaagccagcttttttgaggattggataaaatcaattcagataaaacatttagccaatgcgtggcacctagtaggtgggctttacacggtagacttattatttttccatttaatactccaatttccctttgtggggaatcggggggataagaaaatgcaagcttcaaggagtaaagggctggacacaaccacatagatacaagacactaagcaagaattaggagtgctccctggcttcaaagctggtgtctaaaacgtctatcccctaaggggcccttgtatcgtgtcatgtgtcagaccccgggttgaacgcgaggatttttgtgctgttcccagggtctctcaagagctctcctagtaccgacctccttgtgctcggtggcccctggcccgaggaccccagatgggtggcggagaaacgcaggggatagagactagccccctagccgggctccgtgggcccggagtggattcaaggaccggtggcagagggcgactgcaagttggccccgcaaagccaacaaggggaagggtagggtagtgacgacatcacctggtccttcaatagcctcccgggaggcttcaggaactcacatctctttcccttgacgaacaacgcaggtggtttgctgaattaagtgttcccgccccaaattgagatacaacgggctttttagccagattggcgcagactgggagttaaatccagcattttcccggcaaagctgagcctggccgccgcggagccctctttccgctgtgcggtgcctccggctccgatcgcgggcccggcgccccgggacgcgccgccgagggtagctacgcggccgggctgcggcctctcccggagagcctgcgtgcgtggtctctctagcttgctgcccgccggccaggaaaactctggggacaagctggagctggcggaggttcccatccggccacccttcccgtctgatttcctgagctgacggtcaccgccggcgttcggggaccagcggttccctgtgcaaagggctcgtttctcgatcgccgctggatagaccgcaaccgggttctcagaaaacacccgagctacagaccgcatgtagctttaaacagtttttaaaatgcgattatgcttgcgtctttatgaaagcacatggatgcagttatacgtatgcattaaaaaacacaaacaattctgcattgattgcaaaggagcgctttctggtggcaatgtaaacggtctagtttgagacccgtgatgacacacgtgaactgagttgccaaactcatagaaactccacacggtagatctgtacattgtgtcccgtgttaattgtacgtcaactgaaaaatcagaacttacatgaaaagtacgaagtgccactgcatacacgcatatctaaaagccggtaagatgcggctatagatgagcacatttacagcaatgaagggccactctgccgggttgctagcttattcaagcttcgcatcgccgggaaagggatggaaaggcagctgacatcactcggggcggggccgtgagtcctgtgaaaagtcgatgggactcgagcagcagcctcagctgccttgcacagcctcgcaatgagctgccacaactgctccgacccccaggtcctttgcagctccgggcagctgttcctgcagcccctctgggaccacctgaggagctgggaggccctcctacagtcgcccttcttcccggtcatcttctccatcaccacatacgtgggcttttgcctgcccttcgtggtcctggatatcctgtgctcctgggtgcccgccctgcggcgctacaagatccaccctgacttctcgccatccgcgcagcagctgctaccttgcctggggcagaccctctaccagcatgtgatgtttgtgttccccgtgacgctgctgcattgggcccgcagcccggccctcctgccccacgaagctcccgagctgctcctgctgctgcaccacatcctgttctgcctgctactcttcgacatggagttcttcgtgtggcacctgctgcaccacaaggtgccctggctgtaccgcaccttccacaaggtgcaccaccagaactcgtcctcgttcgcgctggcaacgcagtatatgagcgtctgggaactgttttctttgggcttcttcgacatgatgaacgtcacactgctcgggtgccacccgctcaccaccctgaccttccacgtggtcaacatctggctttccgtggaggaccactccggctacaacttcccttggtccactcacagactggtgcccttcgggtggtacgggggtgtggtgcaccacgacctgcatcactctcactttaactgcaacttcgctccgtactttacacactgggacaaaatactgggaacgctgcggactgcatctgtcccagcgcggtgatgtggctgcggtgggtgcccctaagactcgggactgctgtgcctttcacacttgaatgaagagaaacacctgagctatatatttttttaaagcaactaacttattgctttatgtttatctatgaaaaccatagataaaatctgatgcatttttgtaatctgacaaagtaatttacatac

SEQ ID NO: 4998 - DNA, 6000 bp, Homo sapiens
ctattctctgcctttcagtagcttagagcttattaaactccttcctgtcccctcaccccaacacccttatcagttcctgtcccccccacctcctacaaaaagttatgactgtgaagcgttaaaccagctcaggacagtacctggcaagattaagattcctgtagcccaactctaaccaaatcccactcctaccccaaccctttcggaaagctgcagcggcccctcctacctgccaagctaaggcccttgctcaggtggctcgcagctctctaaaggtaacctggctgggctgctcccccttcaaccctctccctgccagcatcttcgacctgagcccagaccaaatgcctctgccttcctctcccgcctcgcccactcgccgcactgggggcatcctctcctctctttcagccatggagcattgtgtgtgaccctaaggaggctcagtgactgagtagccccctcactctcccccagggcccacctctgagccacattcccaccttcacgtcacatcctctccccgccccatacacacatacacacaatcccacttccatgctgcccttagacctgggcaagggtccctgctctggtcctcctgctacagagggcatcaccgtggcccttgtcaattacactccctccacgccccaccccccgtcacagggcaaggaggaacttccactcgattttcaaacccatgctcttggaattctttgcccaggaggccagagcccacttctagaccttcctcttgagtgcagcctgtgcctgtgccagagtgtgcacccaggcatggggcagccacaggacagctgtctgtgggaggtctgcacagagccgacggtgttgcatgtctgtcacagcagaaggccccttgctgtgtgggatgggcagaatatggtgcggacggacacaccagggtgcaaggccagaggcagacactcttgtcatagcgtgttccatacagaactccgaggagtggaaagttgtgaatgcaaacctgaccttccaggtctttccaaaggtatatttgtcaaggtgggaggctagaccatgattgacttaacaatggattcatttggttgatggctttaaaatacttgactcatggcataaggcctcccttgagtcttgccctgggccctgcaaatgctggggtgggcctgtccagctccaaacttgattgacttatgcggggtttctgaagctttcacagaacaggggagagggtgactttgcctatcacaaacccaaacttcctagaatttctttttaaccagctctgctcttccgccaaatttcctctccttactgcaaccagctcatctctcctttctccctagaaaccgtatccttgactagcccctccaggcttcctagatccaccctccccacttccccaacttcatgatcttacaaaaccctctcagctcccatcctctccctgaacaaaagccctgtttctggataaacagctctcaacaaaggaggagcctgtccttggccaaaatggcttgttctccccatttgtcctactttctgttattacaatctacgttccatcaagctatgtctttgagtcatctctctcactagacagtgagctccttgagggcaaacactgtgtctggtttggctctgtgactcttccagcaccttctactttgagagcattcatgcaagttttcatgggagatatcacggaggagttggaatcggagttaggcctgaagggtaggtagaatatggaaaatgaagtgagtagaggcaactggagattccttctctcctgtgggcagtagtgagcaattaaagattcttgagctagagcaagacaacactttagaaagactgacgtcaggaacagtgagatgcagggaaaaactgagagcagtttgggggctgttgccacagcactgagtgttagaggaggcaggaatgcaacggcaggacaaatagatgcaggaggcagtaccttaggcacagcaaaataacttacccgaggccacacaattcagaagcagagctagaactcaggttgcccagttttaaagctgtacagtttcctccatactgagtcacagaggagatgaggctagaactgagtcctgaaggctgctgaggaggaagtttgccagcaggcatgggcactgggcactccaccagggtcactactgggttcaaccaggtgcaccctggaggccaccgctttctgcaggagattctggccttcccacttgggaggaaagtacagaccctgacttaggcaggaagggagggttgagaagcaccccatggggaagagattcatgttagctcctttccctgggaggaggcagggagaggtgatgcttacacatccaagtccctgggtactggctgagggatcaggggagctgcggtaactccagacacctgcatggtgcttcacggcttccacaacatcgtaaagtgttattcctgaccactccactttcccccctctctacccagtgtatcagatccaccttccaaggcacttctgggaaggcttcaaccctcagacttccctgcccagcatccacacagccctgtgctttcgccgtcattgatcacttgctcccatctgcagataacagctgtgtgatgttggccaagtcacttaacccctttgtgtcccagtttcattgtgtaaacaggagatgatgaaagcattgtccaccggtttttcgaccccagccagccatgatgatgataatggtgatgatgccttgtcctgctggttgattgtggctctgtctcccccaccactctgcaaattccttgaggacaagataggaagcacctctggcttgtctgtatcaccttggggaccagaaactggcacgcaccgctaggtccatttattcaatccgtgagcacttctggagcacttgctatgtgtcaagctctgtgacaggatctgggtttagagataaataagaagctcgggggtgggtgggggtgtccagagttaaggcagacacagaccattatataaagagtatggagagggtcacaggcgctgggctgaggccgggtgaacatagccaggcaggagggaagaagagggctttctcaatcaaatgaaagctgattgagatgaatccagtggtcccatctgacccctacagcaatcacatttaaggatgaggagatgacaactcagccgagaaaatcccactgttagtacgccatgggctggggctgggaccagagcccctcacttctcagggttgggggctcacagcgcatgccttagagatccccacttccactgcttcccagccttggcctctgcccagagttgtgcaaattaaaggacttccgggcaacatccattcattccctggtctctatcctccgcccgcccctgcgctccagggtatttttagttctgggcagccaggcctggtgagtgattggcagcaggcagagcccacgtttccgaaccctctgtgttgcttctggctcagcatgagaggtggctgggccctaggagagggcttaggcatacctggcacccaagcccacagctgcctcattgtccctgggggaggagctgggctgctgccactgacccgaggctgggagcattctttcctgctgattcatcatggggaatgttttgggcccagctggggtggggcaggggcactggggggacatcttggacacgggcagccaggagtggatggcaggtccctggcagcagggtcattaagacctggctgtcacccaggatcgaaaaggtccatcttgacatcctagctctatcacactctgcctgtccaggcttattcttacttgcacatctgcctcccccaccagactgggaaggccccctccagcgtctagcactccagcaccctgtctagcatgtaggagaaaatcaataaaggcttgtgggatgaatgaacctttggaaggacgtttaggcaaggtgggggcaagagggggaaccaggttgggcagctgtgggcctagggaggaaaccgggaggctggaaccctctgcccattttacagatggggccagtgaggctaagggcaggaccaggtctaggggaaagaaactgggggcttggactggggttcaggcacctaggtgctcagttcagctgatgggactcctctctgtcagccatgtccacatttctttaattctacagtccctgctccctgcactaacaccctcctcccgtgagtctgacaagggccaggactgcatcattcagctctgtgaaggggttctcccattcactgtgtattgcctggaggagcaagttatgtcgcctggggctcagtgttcccagctgcacaatgggcagcgcagagtttcacacggagggcgggggggggggggggggcggtattcagtaaactctgggtgactcgcctgttcctgcaggagagcaccgctgcaccgcgccacctcgacctctctgaactgagccccggcctcccagaaagggcgtctacattgtcctaagtgaccgagctcgtgagattcggcccctgtgacagccgggcgctcccgtgcgaagggtgctgtgccgggggccctggcacccaccaggactcacagactgggactctaggtgggcgtcattaccttgttctgcaaaagaggaaactgcctgggagagggactcccgaggccgccgcggccctccctgcaaaacagccgcgggcccagcgccgccctttcccgagagctccgctccccgcgaccccccgccgcccccccgctccccccgccccccgggacttcccggccccgccggctgcggctgggcgcccccgccacctggcctgtgtcccgacggggggcgccgcgcggaaggccgggcggggcgcccgcggactccaggcccgcccggggcggggcctgcggggcctcctccgcggccagctcggggctggggggccgcgggcgggaggcggataaaaaggccccagggcgcccggggagggagcccgttagcgctgctccgccgcggcgcccgcccagccccggactgtccgcgctccatctggtgagcccccgcctggccgcgcgtctgcctcttggtctgcctcttgctgtcccatctgtccttctgtctctctgtgagtctgcaggcctctgagggttcctggagactgggcctagggtgcatgggggatcccttggaccctcagcccggccctccagtcgctcaccaacctgcttccaactggacaagtgaccacgctggggagcttggcccaaggcccgccctgagtggtgcgcccaggcctcaggggtgcctgcgtgtcttgtttgtgtacacgccgtgtgtaaccattgctctgccttcttccagggaggagacagggaaggggcaaggcgggttcagatgtcacacttacgacttgggggacaacgaaccagggctgatctgggctctccaactatccagaccggagctgattatgttggggggtcggcgtgtgacagaaacaccgaagggaagggggcagaagacttcaagccccctctttcctagcctggacaggtacagctcagagaccatttgttggcactgcttcaggtccacagagtcagtaaccccggggaggctacagggctgagaggaggctgctgagaagagctgcccaacggcagagaagggatgagccatcctaaagttgctgcaccctcaggacagcaccccccatgctctctcttgaatactcgggcatttgctgtcttcagccctccctacctgcgctaggtcaggccaggtcccagcatctcctggcacacctggagcaggtgcctctgtgcctcaagctggcaagatcttggatctgtcactcggcattcagcgaagagcaccctgcccagtgccctcacaccacggcctgggtcataaatccaccagaacagggtggaatttcagtcggctcccggccttcctttcctcctccccctcttccaacatccattctt

SEQ ID NO: 4999 - DNA, 6000 bp, Homo sapiens
tcaaaagaaatcattgtaggctgggcgtggtggctcacgcctgtaatctcagcacttttggaagccgaggcgggcagatcgcgaggtcaggaggtcaagaccatcctggctaacacggtgaaaccctgtctccactaaaaaatacaaaaaaattagccgggcatggtggcaggtgcctgtagtcccagctacttgggaggctgaggcaggagaatggcgtgaacctgggaggcagagcttgcagtgagctgagatcgcaccactgcactccagcctgggtgacagagtgagactctgtctcgaaaaaaaaaaaaaaaaaagaaaatcattgtactcaagatgaccattagctgtacatcttgcaatactatatgctacaaagtagaatttggacataaacacagaataatatcccagtagtcccattcaccagtcctagtacccatgttggttactggtatatatttccacttgtctgagatgaaatgataataatatagggatttttcttttctttttttccttttcttttctttttttgagatggagttttgctcttgtcgcccagactggagtgcaatggcatgatctcggctcactgtaacctccacctcctgagttcaagtgattttcctgcctcagccttctgagtagttgggattacaggcacccaccaccatgcccagctaagttttgtatttttagtagagactgggtttcactatgttggtcaggctggtctcgaactcctgacctcaggtgatccacccacctcgacctctcaaagtgctggaattacaggcgtgagccactgcacctggccgggatttttcataaagctaaatttactcagtttaaacaactgctctttattttgacatgtcattttagcttttgttcagatgttaaaattttcctttcttttggaaagtaatagagataagtagttgacagtttttattaaggtccttactagataatataaaaagttgacaaacggggctgggcgtggtggctcatgcctgtaattccatcactttgggagactgaggtgggtggattgcctgagctcaagagtttgagaccagcctaggcaacacggtgaagccccgtctctactaaaatacaaaaaattagctgcgcgtggcgatgtgcgcctgtagtcccagctacttgggaggctgaggcaggagaattgcttgaaccccggaggtggaggttgcagtgagccgagatcgtgccactgcactccaacctgggcgacagagcgagactctgtctcaaaaaaaaaaaaaaaaaaaaaaaaaaaaaccttgacaaacattatgtccactcctccccattaactaatatttattttgaaaaaacaaagtctagaaatcactgaatcagttaatcttcacgttttcttacagttctgggaacctgggctcttagatatcaaagcaatttatctatgaagaccattcagtagacactaagcagagcgtttccaaggagacatcagtgcatctagttcctgagagttcatattttattttttaattttaattttactttttatttttttgagacagagtcttgctcttgtcacccaggctggagtgcaatggctccatcttggctcactgcaacctcctcctcccaggttcaagcaattcttctgtctcagcttcctgagtagctgggattacaagtgcccaccaccatgcccagctaatttttatatttttagtagagacggggtttcaccatgttgccaggttggtctcgaactccttacctcaggtgatccgcctgccttggctcccaaagtgctgggattacagatgtgagccactgtgcctggcctgacagttcatattttatacagaggcccaatacttgtcttctaggaagttacaatctaagacaaaacagagatgcagattgctgtcacctagcacacagaagataggatagaaacatcaatctaatatactgattactaatgaactacttacagcatattaatagataagaggcaagacaaaaaccatgatatggtatatgtgtggcagctatttgcagagtatctctggagatctaaacccaaactaaaccaaagcaccaaacaatcaaatcatcttagagaccaacgagggctaacctcttaaatatcagttatttctttcccctgatgtcctctatagaatgacttagaatttcaatggctagactagagaaatggttttcatcaggaattaagaaaacaagcactttgttttgttggttttgattttaataccacatacagattctgatgaaaacattaaatactacttagttaggccaataaaccattatagagtagttaggtcagtaagcaaaaatggtgaaaattcataattatgtgcattctcattatactcaagttcattcttggtcacaagaataggtatttttgaaaggtattaattatagacatctagtggatatacgtattcaaattgtcttccattggtcccaattaacatggcttctaaaagtgcattcacttgtaagccaagggtattttaggcccttggaaaatctggctcattgttaaaaatatataattttaaaaattcttagtatagcaaatgaactaatggctttacacgttaagtattttttgaaggagatggccaggaaaatgttaataactgggaaaacaaattattgaacagagacccaaaacataatttactatgacaaataaaagtatttatttttcacattgttctggagaggggcatattatttcagtgtgttgagcatgattggatttaccattaatttacttcacagaatttattgagtgcctactaagtgctccagtctgggaacacaaaggcaaaagtgtttgcccgccaggctgttgccatctctaagaggtgctcaatacatacttaaaaattacaagaatttcgactgaaatttatgtcacaccacacacccatacacagacacacacacacagtttaaaggatctagatgtcttagaaatgttcaggaactgaaggaaacaggccttagggctggagccaacatccaatacttcactatgtaacagcttgatttaaaaaaatcatctttaaataatatgacttgcatttgctttctcccatatcctcatcttatgcagtcctatttctagaaggtcgtcatggcgcttcacagatgaatgcaacataatctcgatttcctgggtgcttaggttggtagaggcttttcagggaacttcagttgaaggtcatctattccagctgttttcagatttgttaatcctggtctgggtggaggtaagaggatacaggttgctattacagcgtttgctgggctttaagactaacccttgtccatccacttctggggaaaacccttgctctgcattttagggttttgcttgtttgataccaaggagggccctggacgcttctgcgtttctgactgcccgcactacataaagtagttcccttcatctgccaagtagaagtcccattttgtctcagaaagaagccgaaagtggggcccagcaatgtgactgcagcaaactgtgcctgatccctttcccgcgcttcaggataggacctagagttcaatttgcaagctgttgtggggtggaagctcaatgagcagcggcgggtcgtgcatcacagcggcttccggctgttattccccatccagggctatgtgactctggttttgactgggggccgagatggaaacccgaaagtgtcactatggtcccatctggcactgtaaaggcgcacttccctgcaggagggctaagtataggattgacctccaggagggtctggaggggggactctacctgtgcagcagaatagagtggccaagaagtggcacagttggacgcagagccgccctgactatccaagcacagctcaggtagcttcgacttggccaaagccagcatgtattgacgctcccaagacgcttattcctcggttgcgggaagagcagagcagagcgagggcgcatgtcccttttggccctcggatcggaaaagctgcttgaccaggtcactatgtttttccttcttgctactctttgccctatggaggtcagaggatgcttcggtgtggctatccaacgcgtcacagagatcagggctcctcttcggggaatgtccttcagggctctatgctttgacaggaatcaccgcctcaagacccctctgcaacttaaccgcccttggtattgctgcttcaaccagaaaagggccctgagcggacgaagtgcctgacgctgtcaggagaaacaagcgtgctgtcggtgggaactctatcccagcgcgtcccgggttggcgctggggctttcgggtcggagtcggagcttgaaccgccctccagagcctctcagggaaggacgtaaaaacgagaccctttgctctgtacccagacggtacaacggcatggtttggattcctccctctgcttcctgaccctagagggttaaattaggagggtacaacgccacccttttctcctccttcccgcctgctcccctccccttacctttaaaaagttaaaaaatgtctgcagtagaaatctcttaaaggggcggtgccggtgtacgagttctcttggcaagagtcacggggaaggctggctaggggcgtgagttcgctccaccagcaccaaaacactgaaaaaaaaaattaaaaaaaattaaaaaaaaaaaagaaaaaaacaaaacgagcgagcgagcgagcgagagagagagagagcgggagagagagagagtgtgtgtgtgttgggggggtggtgggaggaagggaaaaaaaggggggaaaaaggcggacagacacacactttagataaggacaattagtcactagcgagacccagtaggaagagaggtttaaatcagagggattgaatgagggtgctttgtgccttccctgaagccatgccctccagcaactcccgcccccccgcgtgcctagccccgggggctctctacttggctctgttgctccatctctccctttcctcccaggctggagacaggagacccttgcctgtagacagagctgcaggtttgaaggaaaagaccctgattctacttgatgtgagcaccaagaacccagtcaggacagtcaatgagaacttcctctctctgcagctggatccgtccatcattcatgatggctggctcgatttcctaaggtaaggcaggggtttcgatggatcatttaaaattttttagtaacaccccctcaagcccttcctatcccccattccaaaggggaaagaagaaaataagccaagcagatctctcaaagagaagaaaagaggttttccttctcctggattgtgtgctgtgaggctgtaactagtgattgagaaaagcaatgttttctattaagatgcacatgtttgcaatgcagaaggcatttcagaaacttatcagttatgactgaaaaaatgttgtgcttacatatatccacaattagccttcccgtctacttctgaaaaagaaacaagaggttcagagcagttacaaaagcgaagaaaaggtctcaaacaacaaagagctgaaaggaatgggtatgtgtgtgtgtgtgtgtgtgtgtgtgtatgtgagacaggagagtgtgtgtgtgtgagtgttcaagcgggattgcacgaaactggaattttccacggaaagatcgtttcgtcagttctctcccactctcagaaaacgaatttaagcagaggcttgagtggtgggcaagttggatcggagttaaaattttttattttatatcctccgctgtcatttccagacttcaggactttgtaaggcgctttttatagacggaatgcccccctccccccgccagttcctcctccttaaatctcctgcggtaactgcacagtttagcttttctttaaaggaaaaaaaaaatcctcgctggggtcacagcgttataagggaagcggtaagagtcctagaaatactccagg

SEQ ID NO: 5000 - DNA, 6000 bp, Homo sapiens
tgccttggccatttaagcactattattcatgaggcaaatgaggaacagggcaatagtatgatggtaagttttgtgtggatatgggtgcctgctttggctatgttgggtgcaaaaggtttaactttccatgctagccttatctggcatttgggatgcatatgggaaatagaagaactcaagaggaaagagcatttggggaatatcctcaaccttaaatccttatctgccgttactcagggatatactaggattatgtcatcaattatcttcaataatagcatttttggtcaaattaaatgagtggtaagcttcttcacaatgtgaccattgaaattgaatggtttgttctgtacctttttgcttcagcaatcaattttctccattaagatgggacttgtactttaattcagatatggtacctcccgaatagaaaataaattatgttaatatagttgtaataataagtgtgtgttaagatttggttactataaactactgatttgttaaaacttgaggaaattaccataaaatgtctactgaatcaatttttcctgcatttagtcttaatgtcaattctgtacatttcctctttcattaagaaaaatagcagtggccaggcatggtggctcacgcctgtaatcctagcactttgggaggccaaggcaggtggattgcttgagcccaggagtttgagactagcctggccaacatgggaaaccctgtctttataaaaaatataaaaattggccaggtgtggtggcacacacctgtggtcccagctacttgggaggctgaggcaggaagatcgcttgagttcaagagtttcaggctgcagtgagccgtaatcctgccattgcactccagcctgtgacagagtgagactttgtctcggggaaaaaaaaaaaaaaaaaggataatggtggccagccatatgacatgtacctgtagtccgagttactagggaggctgaggcagaaggattgcatgagcccaggagttcaaggctgcagtgcattatgattggacttgtgaatagccactgtactccagcttggcaacatagcaagatcctgctctcttaagaaaaaaaaaaaaaagaaaagaaaaggaaagaataattgtttacttcaaatatttatgaaaaaaactctgaaatttttttaaatcaggaaataaggtaaatgaaatgatttttcaacttttgattatgaaatgtccaaacagaaaacttgcaaaaatgaacacccatatacttataacttatagtcaacatctaattgtaactttttcatgcctggttttagaatcttgattggagttggttaacagaatgagttgtcacttgttcactgtccccaaacctatggaagttgttgctatacatgttggaaatgtgtttttcccccatgaaaccattcttcagacatcagtcaatggaagaaatggctatgaacagaaactacatttctactatgatcagaagaacatgattttacaagtataacagttttgagtaattcaagcctctaaacagacaggaatttagaaaaagtcaatgtacttgtttgaatatttgttttaataccacagctatttagaagcatcatcacgacacatttgccttcagtcttggtaaaacattacttatttaactgattaaaaataccttctatgtattagtgtcaacttttaacttttgggcgtaagaccaaatgtagttttgtatacagagaagaaaacctcaagtaataggcattttaagtaaaagtctacctgtgtttttttctaaaaaggctgctcacaagttctatttcttgaagaataaattctacctccttgtgttgcactgaacaggttctcttcctggcatcataaggagttggtgtaatcattttaaattccactgaaaatttaacagtatccccttctcatcgaagggattgtgtatctgtgcttctaatattagttggctttcataaatcatgttgttgtgtgtatatgtatttaagatgtacatttaataatatcaaagagaagatgcctgttaatttataatgtatttgaaaattacatgttttttcatttgtaaaaatgagtcatttgtttaaacaatctttcatgtcttgtcatacaaatttataaaggtctgcactcctttatctgtaattgtaattccaaaatccaaaaagctctgaaaacaaggtttccataagcttggtgacaaaattcatttgcttgcaatctaatctgaactgaccttgaatctttttatcccatttagtgtgaatattcctttattttgctgcttgatgatgagagggagggctgctgccacagactgtggtgagggctggttaatgtagtatggtatatgcacaaaactacttttctaaaatctaaaatttcataattctgaaacaacttgccccaagggtttcagagaaaggactgtggacctctatcatctgctaagtaatttagaagatattatttgtcttaaaaaatgtgaaatgcttttatattctaatagtttttcactttgtgtattaaatggtttttaaattactttcttgatctctattcattataaaaatcagattataataaaacagttgaatatggcttaggaaaatatgaaggttccatgaagtggaattaagagcatagaataactgtactttccttaggaataataggacttatggtaaaggtagtattgggcaacttctttaagagtgttttcctctgagatgtcctatcaccactatctacatctaaaaaacatgctcgattcttgccctataaactgatgtcacagccccaccatccccatttttgctagtggtatcattttcctagtcaaccaaattttttagtcatcacatatcactgttcgtcatctattataataggcagtctctctcttgtttccctggttttagaagattttagtaataaacatttattgggtacctgttacttggagggtattaagctagatggcaagatctgaaacaacataggcagtatagtaaaagtgcttatctgggagtctgaacattacaagccatccaagcattgcaattattgttaaggattattttcaatggtcatgcattttctaatattttaataattggttaaagatttgttatagcgtgggggccgctgctggtgtgtggctggggttatgtcagggcagcctgatctatataatttgggcagatggtgtgagtcagaacagactattatagtgggatccccaaacttgcttttgatgcatgagttggaccactattttttggtgggtaacaacttttcagaggggaatggcagttgtgaattgtatacatttcattctttaagcaatattatgaaaaacttcagagaatgtctacagaaaacagggtatggagcaagttattttccattctttttgctttttggaagttaaaatagctaagctctgcaaatatcatttatttggaacagataaggtcccagacattcctagataataaaaatcaaatgaatgatacaggtaagtgtatttattgaagggtgtgggtagagtggtctgggaagtcttgctttaatgaagacggattgattctatttacctcttcttacttccactactaagtaaccctgggcctgcagtttcctaaccacttgacttccttgccaacagtctgtctccactttcagccgttttatagattcattggccctaaagcactgctttcccatacttccctacccaagagggcaggggtccccaagccctgggccgcggaccggaaccagacagtggcctgttaggaaccaagccggatagcaggaggtgagcggcgggcgagtgagcattatcgccttgagctctgcctgctgtcagattagcgagtggcatcagattctcataggcacgcgaaccctattgtgaactgcacatgtgaggtttgccggctccctgtgagaatctaatgcctgatgatctgaagtggaacagtttcatccccaacccacacacacccccaccccgtccgctgggttagaggactttacaaccctagtccaccttgtccagttatagttccacctctagcctttcaaggcttaaaccattaatgtccttaatttctcttgtattcatctatctcccaactatacctttttccttcccttttttatttttggcaatatgtgcccatggttttttaatttaaaacgaacagaatatgtagtgacgcctaccatagcactccttcccatcacacaagccttcaaggaaactgaagtacttactttggtctccctggaggattccctccgcctcccgccccatgtgcttagcaattctgttcctgtagtctggatggccttcataaagccctcactggaccagcattctggcacataataggaacacttaaaaaacgagagaatgatgccgttatatctaatatcttcctcttctgaactttcacagcactttatttgcaacaagtttagttgctcctgaagggcaggatctctgccggaagcaagtgcgtgccacacagtggggctccgcatacactgcaaaaggacaaataaaccgaacagctaccgtttgagagtgagcgagtgggttctctgcacaagaacaaaccaaccagtcccttgtccgaaagggcgtctccttttctctgcttcgctgctcactccagactgcgggctgtcctcttccgaagcagttaaccagcagtgtacagaaagcgacttgcctccaaaggagcctgcgcggcccgcggctaggagaattttgtcccatgcgctccccgtctcactagccgcgggccggggctacgccgtgtgcgtccccgcgcagccgcagtgctgggcgagtgggcggggccggctgttggcggcggttggctcggcgcgggagtcggctgcacgtgcgggcgggggcgatgcgtcactgatcggtgaggcgcggccgaggggtcggctttcctcgcgagcctgcggctgggcttcttctcagttagtgccttccacccgggagcgacccttgggagagggagtttcaggaagctcaccgagcaggggcggcccactggcctccgggggcggaggagttggcaaggggtcagcgggctcagccagaagggaagaatgaggggacaggggtactggactccccggctcagcctgcgagagagcgccaagtttccggagggagagggtagaaactggagggggtggacctgtcactcacgggactgagggtccttttctcccgctcccaggaggaacgagaatgaatatgactcaagcccgggttctggtggctgcagtggtggggttggtggctgtcctgctctacgcctccatccacaagattgaggagggccatctggctgtgtactacaggtgagcggcatgtgcagtcagttagggctctagagcagattaaaagggtactccagagtggagtctgggaagttgttccctctgcaacgttcgggggcgcatgtcccatctctagggagagcacgggggtcgaagcgggcttttgcggagcaccctccagatgttggacagttttagtgctatgttcgttttgttgcagagattaagtctccctacggttattcctatacacagcaaactcaattatttgtagaaaaatgaagaaggaagaaaggaagtagtcactctacctctaactgaagagatggataaattatagttcgttcaactgtacaggctttagtttgccgctgtagatgctgtatgtttatggttgtttcttagactttttcatttaaaagcttccagtgtctggttacgtcttgtaacaccatgatgactgtgatggtgcttatgtccctggacctccagggacataagcacaacactgatgggccatgctcctccctccttactgttgctgttcaagttggggacaggagtggtgtgggagctgttgctctcttgttgagctcgcttagc

SEQ ID NO: 5001 - DNA, 6000 bp, Homo sapiens
tctggcaacaaccactgaacttgggaaaggacacacacggagcctcagatgagatcgctaacccagccaacaccttgatttcagcctgataagaccctgagctgaggactcagccaaccagtacctggactcatggaatatgtgagaaaataaattggtgttttgggctgctaaatttacagtaatttgttatgcagtaatagaaatgaatgcactggcttaactatgtaattatgctacatagtaaccatgctacaccaaaccgataatagggctacctctgtggaagtgtttgaggctgcagggggcaatcaaggctttcattttatctgcagtgtttgaattttttttttttttttgagctagggtctcactctgtcacccaggctggagtgcagtgatgcaatcttggttcactgcaacctccacctccccagctcaagcaatcctcctaccatagcctcccaagtagctgggactaaaggcacacaccaccatgccggactaattttttttccttctgtagagaaagggttttgccatgttgctcaggctgaatgtttgaatttttacaagaatgtattaattcataaccttgggaattaaaaataaattaggccaggcatggtggcacatgcctgtaatcccaggacttttcaaggctgaggcaggaggattacttgagcctgggtgttccagatcagcctgggcaacatagcaagacctcatctctacaaaaaattttaaaaattagctcggtgcgttgatgcatgcctgtagtcccagctactagggaggctgaggtaggaggattgtttgagcctgggaggtgcaggctgcaatgagccatgatcatgccactgcactccagcctggatgacagagcaagatcctgtcttactaaaaataaataaattaattaagatcaagaagattaaaagaactaaaatcagtaatgaaacagggatattactgctgactttaccccccaaaaaaagcatataaggacatactgtaaacaattgtatgtcaaaaaattacagaacctagatgaaatggacagattcctagaaaggcacaagctataatagctgattcaagaagaaatggaaaatctgaatagacctgtaacaagagattgaattaggaatcaaaaacatcccataaagaaaagcccagaaactgggcatggtggcttacatctgtaatccctacactttgggaggcagaggcaagcgaatcacttgagcccagaaggtcgcgaccagactgggcaacatggagaaaccccatctctaccaaatccccccagccaaaaaaaaaaaaaaaaaaaaattagcaggcatggtggcacgcctgtagttccagctattcgggaagctgaagtgggaggatcacttgagcccggaatgtggaggttgcagtcaactgagattgcaccactgcactccagccttttgagacagagctaggccttgtctcaaaagaaaagaaaaggctgggcacagtggctcatgcctgtaatctcagaactttgggaggccgaggtcggggggaccacctgaggtcaggagttcgagactagcctggccaacatggtaaaacccccatcgctatcaaaaatacaaaaattagccaggcatggtggtgcacgcctgtagtcccagctacttgggaggctgaggcaggagaatcgcttgaatcccggaggcggaggttgcagtgagctgagatcgtgccactgactccagcctgggcaacagagcaagattccatctcaggaaaaaaaaaaaagaaaaagaaaaagaaaagctcaagaccagatagatttactgatgaatcctaccaaacattttttaaaaaattaacactggtctgggtgcagtggctcatgtctggaatcccagcactttgggaggccacggcgggtgaatcacgaggtcaggagaccgagaccatcctggctaaaacggtaaaaccctgtcgctactaaaaatacaaaaaaattagccgggcatggtggcgggtacctgtagtcccagctactcaggaggctgaggcaggagaatggcgtgaacctgggaggcggagcttgcagtgagccgagattgcaccactgcactccaacctgggcaacagagcgatactccgtctcaaaaaaaaaaaaaaagaaagaaagaaaactatagaccaatatttcttatgaatatagatgcaaaaatcctaacagaatactagcaaactcagtgtaacaccatataaaagaattatatactatgaccaagtgggatttattccaggaatgcaaggtcagttcaacatctcagaatgatcaatataacacaccatgtagtaatcaatattttattgattaatatttataatcaacataatacactatattagtaaaagaaaaaaccctacatgatcatctcaatagacacagaaaaagcttttgacaaaccccaacaccccttcctgataaacacagggttccaaatgatactgtaaaaaagcaaaaaaacctacagagtcagagaaaatatttatgaattgtgtatctgatcagggaattgtatctagaatacataaagaatccttacaactcaacaataaaaagacaaaccaatttaaaaatgaacaaagggtttgaacagatattcctccaaagaaggtataccatggccaataagcacatggaaagatgctcagcattattagtcatcagggtactgcaaatgaaaactgcaatgaagtaccattcacaggcacttgcatggtgatactaaaaagagacaataacaagtgttgataaagatgtggagaaactgaaaccctctcacacactgctaatggggatgtaacatgtcacagctgctttgaaaaacaatttggcagttcttcaaaagttaaaccacagagttaccctatgacccagcaattctactcctaggcatataaccaaaagaatagaaagcatacatccagacaaaaacttatacaagaatgttcacagcagcattattcacaatagccaaacaagcagaaacaactcaaatgtccattaactgataaatgtataaataaaatattgtactgtacattcatataatggaatattatacagcccaaaaaggaatgaagtactgatatgtgctacaacacagacaaactttgaaaacattattctaagtgaaagaaaatggacacaaaaggccacatattgcatgatccatttatataaactgtctgaataggcaaatccatagaaacagaaagtaaattagtggttgccagtgggtagaggtaggggcaacgtgctaatgtgtatgggttttttcggaagcaataaaaatgttttagatagtgatgatgattgcacaactttgtaaatgtactaaaaataactactgtacactttaaaaggtttttttgtttttgtttttgtttgtttgttttttgtttttgagacagtctcaccctgtcacccaggctggagtgcagtggcgtgatctcggctcattgcaacctccatctcctgtgttcaagtgattctcttgcctcagcctcctgagtagctgggattacaagtgtacaccaccatgcccagctatttttgtatttttagtagagatgggtttttgctgtgttggccaggctggtcttgaactcctaacctcaagtaatcttcccacctcagcctcccaaagtgctgggattacaggcgtgagccaccgcacccggcctaaaagggtgaatttatggtatgtgaataatatcttaataaaaataaataaattagatcaactctgtttcttgacctaaattggatcagggtttgctattggttgaatgcagatgttgtgcaattattctgaacatcaactagtgatgtcatttacaagacagcaagttgctgtgtagtccttcccaaaatttatatattaaatagtatatatccatatttgtttactttttataacttaaaaaaaaagagacgaagtctcactatgtcacccaggctggtctcaaactcctggtctccagccattctccaacctaggcctcccaaagtgttgggattacaggtgtgagccacagctcccagcttatatgcatttttattgctctgatatatacttgagaatgtttataataataggttctgctccaaaacagtggtcacctgaaaagtcactggaaatacgtgcatatttataatgtgtaagttattcaaatcccaagtgaaaacattcatatgcaaacataataatgtctccaattcttctgttgagttagtttgttcattatgggccggtttgtaatttgttttatccaagtcctaccaactctgaggctttaagctgtctctggagagctgcctctggtgataagtttaattttacatttgttgggttgaggtgactgagacatgcagatggaaacacggactgaaactaaggagccaattcagggccgaattgtgtgttgcactggcgtctaagtgaagatcaacccatttggagaacagaacaacaagcaagaccaacaggtgaatttgaagaatgatcatgtttggggatggaaggaagtgcccgtgaaggagaggaaagcaagcagccagagaagagagtaagacaggctcatttcactagtacagctcctgggggaggtggttaagctgtctacctgagttgctcaggttccgagttcccatcatccctggatgggtctaagtcagctcagggagaaaaaggacacaacattctgaaatgtcagagacctgcctggttttcccttcttcccgcttatccttcccagcctctatccaacccttggcttcccaactgcgtatttaaaccccgcccctgttgaacccttcggcttttcttcactcccggcttcctccgtcacgtttggcccggctcagccgccgtgacaggcctttgcgcatgtgcagaagggaaacgtgaagaaggtgaagatggcggtggccagggccggggtcttgggagtccagtggctgcaaagggcatcccggaacgtgatgccgctgggcgcacggacaggtccgcgagaacgggcgagacctcagtgtgggaagggggtacctgaaatttggtgtatcgggaggggggatcgtagatgccgcggcggcagcctccgggtagggagtggaggtggcgttgatatatccagaaaatggggtggaggatcgcactgatcctgcgaagtcccgggctcggacctctgcagcccctgcgacttgaagccttcggagcggctggagagcgggctcgcttctgacctgttctcttctgcgttctagcctcccacatgaccaaggacatgttcccggggccctatcctaggaccccagaagaacgggccgccgccgccaagaagtataatatgcgtgtggaagactacgaaccttacccggatgatggcatggggtgagacagagagggtatgctcgcacccaagtagtgatgggagaaggccggctgggttgggtggcttgactgtgaccctttttcccgaaccttctcgtgacccctcagagtcaatggagtgggtgcttttctctgtggagggaggtgggaggggggtgggtgagcagctgcagctgagaggacttcaattttctccttggctcaggctgtttcctcaaatgaggaagccgaggttttaatggctccctcgaggacccccgaatagcaggagccttccttggctctatccagagcgtcgagtttcatttagattgagcatctgctgcgctcaggtgctgtcatccaggcatgtgaccaggctggagctggactcctgtcatgagaatcttatttgtaaacggagtactctatatttgtgtgtatgtctctttaaaaaaaatgtttttctgttagtgctgtggaaatcgtagcaactattaagcagattaaacagccagcccccttacgtactccagttgatgttatcctatcccttccacactct

SEQ ID NO: 5002 - DNA, 6000 bp, Homo sapiens
aattagaactcaggattaagaaactcactcaaaactgcacaactacatggagattaaacaacttcctcctgaatgactactgggtaaataacaaaattaaggcaaaaataaagaagttatttgaaactaataagaaccaagagacaatgtaccagaatctctgggacatggctaaaggactgttaagcgagaaatttatagcactaaatgcccacaacagaaagctggaaagatctaaaattgacatcctaacatcgtaattaaaagaactagagaagcaggtgcaaacaaattcaaaagctagcagaagacaagaaataactaagatcagagcacaactgaaggagatagagacatgaaaacccttaaaaaaatccaggagcttgttttttgaaaagattaacagaaggaccactagctagagtaataaagttctacaatttttttaaattaattttttctgagactttgggctgaagaggctttggagagaatgcaaaaattaaaatgtagtaggttatttccctttttgatgagtgtttgtctgagtcatttgtgtatccgtacagcagtgtaaaaagaatcttagattacagataaaaatatggggtcccattgcaacaggtagttgcccagtagtacaagcacaaattgacacagagagaccttgatttctggtggcacctactagctgtgcgaccctgggcgtttctgaattgtaccatgagaagttcactaggtttcattgctattatctgagaaaatacaatgttacttagcagagtgcctagacataagagatgatcaatgttaataagcattattgtaattattatttagcaaggttagtgcctttgagaagagggaagatgacatcataaagggagatacggggagtagccaggcctagaggtagagcatagttgagggacctcgtacaactgccagagaaggccccacaagaggtaggcttggtgctgaggaggagaagcccccactctcccaggagtgcactggtcaaagtgaatcaggatccagtcctgcagcaacaaggcaggttatctgctcattggagatgggccaggaagtgggggtaattgcagggacaagggcaaatgacaggtacttggaagtatcaggtgtaactaaaaatcctaagccatccagttgagtgaatggatcccctcttggccaaggggacccaagagaaaccttaaaaactgagttcctggctatgactgatggaaggtcagatatgccttgtcgtacctcctctcttttgcagtttagacacaaccactgaccagcattcatattaaaatagagactgtaagactggaatggactctttgtggcaataagatgccaaattatgaacaggtcctgagaccataccatacaagagttaagtaccataccctaagctaagttctaactgccactaggtttttatttttctctagcagctaaacaagcgctggccttgaggtaagcaatatgaaaacaattacaactcatccagcctgcaggcactgactgacacctcattctaccagccagaactacagctttgattggacgagagactgatttcagtaactttctcctgattggagaccactggccatggactggttctagccggttttcagaagctacatactgaatacctctgtgtgtctccttcaccttttgacatataggacctaattgtaatacatttaaactttaagtctccacctcaaggtgaacatgggttgtgtgttagatgcatgttcaatacacatgcatcaggatgacctttaatgaatattcatagcacctcctgtaacctattgaatatgtatgttttgccaacatgttcagagcgtaagtctcctgccccagtgcctcctcctgtgaagtgcctgcaaatgctggatggccaaggctgtgattcccagcctatcagagtggccgcctagcaggctgtaacccatttataagaaataaagtctattttctaaatttgtgtgattttttttggcaagttaacgtaggtgatagtgggaccagagaacttgctgaatagggattggactatttctccttagtgatctcatcaccaagtcttagagactgggacacagcttataaatgatgctcaattgagaccagcctggctaacatggagaaaccccatctctactaaaaacacaaacaaattagctggctgtggtggcacatgcctgtaatcccagatactcaggaggctgaggcaagtgaattgcttgaacttgggaggtggaggttgcggtgagccaagatcacaacattgcactccagcctgggcaacaagagcaaaactctgtctcaaaaaaaaaaaaaaaaaaaaagatgctcaagtggtccccggggatgagagctggcactgagaggagctcacagggagctgtgatcgggtgcccctctggtcctgagcctgctccctccttgcttctctgcctccactggactctcagcttaaagggcgtgactttcagtcccaactccctgctgccctctttgactgctgattctagactctaacttcagttaatctcagcacagagctcacaagacacaagccaagttcctttccttgacagttaagcccaactgttccctgagggcttattacagagaaccctgggctgggtgcagtggctcacgcttgtaatcccagcactttgggaggcctaggtgggtggatcacctgaggtcaggagttcgagaccagcctagccaccattaaatggcgaaaccctgtctctactaaaaatacaaaaaaattagccaggtgtgctggcacttgcctgtaatcccagctattcaggaagctgaggcaggagaatcacttgaacccaggtggtggaggttgcagtgagccaagatcatgccactgcactcatgcctgggtgacagagtgagactccatctaaaaaaaaaaaagcctgaaattttctaggaatatttgcctttcgtatttccatccgtgttactgtgtccggaattggtgggttcttggtctcactgacttcaagaatgaagccatggacccttgcggtgagtgttacagttcttaaagatcgtgtgtctgcagtttgttccttcagatgttcagatatgtccggagtttcttccttctggtgggttcgtggtctcgctgacttcaggagtgaagctgcagaccttcgcggtgagtgttatagctcttaaaggcagcacgtctggagttgtttgttccttctggtgggttcatggtcttgctggcttcaggagtgaagctgcagaccttcccggtgagtgtgacagctcataaaggtggcatggacccaaagagtgagcagcagcaagatttattgcgaggagtgaaagaacaaagcttccacagcatagaaagggacctgagctggttgccgctgctggctggggtggcctgcttttcttcccttatctggccccacccacgtcctgctgattggtccattttacagagagctgattggtcattttgacaaagtgctgattggtgcgtttacaaacctttagctacacacagagtgctgattggtgtgcttacaatcctttagctagacacaaacgttctccaagtccccaccagattagctagacacagagcgctgattggtgcttttacaatcctttagctagacagaaaagttctccaagtccccaccatcccagaagcccagctggcttcacctctcactggcactagccacgggactttgtggcacctatccggagcacctagcccgggcactccagcagcctagagggagctcgtcccagacaatcaagagcaaaagacgggaagcaagaaagagatggagacccgccatcgtggccaacgttctggtccacgcacgggattcagcctctgatcaagccccagttcccgcccacgcctctccctccacacctcccggcaagcagagggagccggctccggcctcggccagccccagagagggtcccccacagcgcagcggcgggctgaagggctccttgaagacggagagagctgaagctgaggctgaggaggcgccaagagcgagccagggctgctagcaagttgtcatctctcattactagcattctctcaggaatatcctaccgcagggttcccgtgtttcatatacaattagtgatgaggctaatcatcctgatctcaaatttcctctacctgcccaccagctgacttaaacccctatactgtgggcatgcattctgcccactctgaaatcttaggatttaacttctcttgcttcctagaaaatgaaccactttgttcctttagtcatttattcactaataatttgttgagaggttttgttttgaggagcatgaaggatctgatgtaagaactaccaccggtgctggtgatcacaatatatgcagctgattaaagttcctcatttatgctacctacatccctggtaagaatttcattccttcaaccaatacttttcatttgaaagcatctcattacgaaagacttcaatcttttaggcttctgcatcttgcaaaacaaatatggttccaaagagcctatcttttcaacaaatctttggtttgagcctggatgaaacagttattacagaatcaactggagaggaaaaaatcttcatctaacactgaagtctttctattctgcgaggtgaaatcctttgacctagattctgtcccttgaaaggcaagtgacagtaggtgagcctaagaaaattggttaattcttgatctaaaaagttaaattcatgaaccacactgatttgattaccttgaaaatctaccagacagaaagttctcccttttatccaccttcattgttaccttcagagcagctctctccatagcaactgaaaacttttctgggctgaaataatcctctctagctcccagtgcacagtcaaagaattttaaaaacagggaactttgtaactgtgaaatactctccaggatttaaaaggctgtggagctccagataaagaatcgtttatctttcttctgaaggtaagcactggggttagaaatgcttgcatcatcctctgtcacttttaaattgctaacataacaaccttaaagtgttgttgttgtttttaactcataaaagtaatcccagtacctttgttactagcccacagtcatttaccagctcatctctgggccaggatcggacatgagatgctgttaacattttacatgccttaagccatcaacagaaagataatttttttttccaggaagttgattggctctaaagtcatcccccactcctttagtcaccactgagtgagtgtgtgtgtgtgtgtgtgtcatgttcttgaggtctcgaaattctgtttttctaagatgcttcctgctctagaatcttgattcttagtaaactaaaaaaaagacctgtgttttctgaacattactattttcttctagtgcttttccttgtctaaaactctttttttttcttttttcttttttcttttttttttttttgagatggagtcttgttctgtcgcccaggctggagtgcagtggcacgatcttggctcactgcaacccccgcctcccgggttcaagcaattcttctgcctcagcctcccatgtaactgggactacaggcacgtgccaccatacctggctaatttttgtattttcagtagagacgggggtgtcaccatattggccaggctggtctcaaactcctgacctcgtgatctgcctgcttcagcctcccaaagtgctgggattactggtgtgagctaccgcgcctggcctaaaacttttaaactcaacatgatgttggtcatttagtagaatttattttctctttttcatgaggaccatgaatcacttggagttctttataatgggataaacataaggtgtttcccaacctgggtcctataacttgtaccacctgttggtaaatggagaaacttacgtgacgctatgtttagt

SEQ ID NO: 5003 - DNA, 6000 bp, Homo sapiens
tgggttgaaatccagctcagccatctggtgtccatcaggtggggacaacagaccctccctgcagagttatcatgaggactacataggatcatagatctcaatcactaagcacagtgtcaggctagctggaagaaaacggctgcgtggaggggatgatgtctggcacaagccagctcagaggcaccactcagagcccacctgcccctggagacacagagccaggtgagtcaggaagaattccactctccacttggccctagtgtgaccttgggcacatcattaatctctcttggcctccattcctttatttgtaagacagggacaacaagctccactttgcagggtcaccctgaggctcagaatgacatctacaaagtgcggagcccagcacggaggtattaagtgaggccccgtccccttcccagaggccaacaggatgccatggccagaccctcaggccctcccgctgaggactctctcccagctcctccactctcccaagcttcaatcagtctccctcagaggcatgagacagaaataaccagcccattccacgtctttacaaagacaaggaagtcctgtctcttggaccagttctccctgaccatgcccgtgaggtccttgccaagagctggtgaccaagcttgctgagacagcagatccaggactggctgtgcatggagcaatgggatcttccaggagtcctggctggggtggggtactatgggtatgagttatccactgcacatggcaaatgacccaacacttagtggcttcaaacaacaaacatggattatcttgcagatactcccagaaggcaagctctgctgagttgtgagttgcagggggctgtggccaggcaggttgtgtgagagcccagcagctgagggtgagccacaccctactgagctccaccctaccacactggctccgctctcagtggcccgcagtgatccagatcacacgagtaaaagaccagctggactccagaggagagcttcgccccatcttccccttgtgggtctctctctgatcactgtgcccaccacctccctgggccttagtggaacctcccttctctgcctctgcctccccatcatggtctggttcttagaagccagcagagagaggatgatgaatgtactgactttgcaaaggccacgggggacactccatccccagagagtcccacagcaacccagtagaagggtctggtggctttctgagtcgcggggaacctctctctcagtttcccttcccatgacagatgctatcctggaccccaaacccctcaagcataaccagacagatgaagtccatggcctcatcctacctaaggaccattgtctaggctggcagcacaggttgtatgacccagtgactggcactggtaatgatctcagccttcatgatatttaatattatagaaaccccacctcatgcccacaccggggctaccttcacccccagcccctcctggagggtctctccagaacaactgtaactttgtaccccacgacaaccacagcgttcactcctgccacacacagggctacctgggagaggtttgttcagcagttccagcatctcaggacaccataacctcctgtccctgtctttgtccttctgaatccccagggtgaagctcagggctcagaacacagtaggtgctctgaaaacatgtctgctgagtgaactttgcagaaagggccctggggagagtgaagagagggtctgaccacagtcctggtactgcccagctgtatggcctcgggccactccccatccttctctgagcttcagtcctctcacctgtacagtggaaatcagagcttacaaactatcagcccagagtcctcatctagtttggatacggtgtttacagttcattcggtgtttaattttattttgaaattcatttcaaaaatttgaaaactagatttctataaaacttaaagtcttcagcttttattgaaagatgagaaaacctgggtggcctgtgtggacccatagtcccatatacaataattggctggcctgggcagcagctacctctttacctgggacatccattagctatctggatacagtgccacctcccctcactccctacatacttaccagcttgcaccactcatgtgtatcacctgcctggcccccgcaggcatctgagtttgcaacccctgaatgagattctgagcttagcacaaactgattgttctttggctttgtgaggcctagaggtggtgttacaggatccctaggtgacaaaacccatcagcaccctggataaaaaaccatgtgagctgagtggagagaaacactgctgtttctgaggataacacagtctataaatagcctcagagccaggtgagtgctaacacctgcctgatgtcacctgggcccggagccctcaagggctgggcatgtgttcagctcatggcttagcctatagactatccttcttcctgataccactgagaacagaacaggaagggatgacatcatagctaagcctttggggaaggtaggcttttctctggcttaggaggtagtgatgacgtttgattttccaaagagagtggaaggagtaacatgaatgaaagaagctggttcccagtccagagtcctcagcatggagtctttgcactattcatggctccccagtgctatccaacaatgtcagacctcagccaggccttcagagccctctgtgattgggtccccacaggcctttcagctcatgctcactattaaaaccatctccctagtccctgagctccatagccccctggccaactccaccgtttctatcttactgtgttgtctgcccaggcttatctctcttgcctccccaccctgtcccaaggaccagcttcgtggtgagagtgagaagggtttgacatgcaataaccctgattgtgaagtcagacagactggtcccagttccaacagcctgcccttgggcaattcactccccagcccctggggcctggcttccccatctgcaaaacagagctgtctctcaggcagagttcacagctgggaaagggttctgagaactgaagtggtcaagtgaatgaaggcagcactcccctggggtggggatgctcatgcttcatcaggatggggcataaactgagtccccccaggagcaggcttgagaaacaacagggtacgctgagctacctgctgtggctgaaggtcctgtgagctcagggcctggaactggccgcagggaagcctggggccttaaggaagcttcatgacaaggcacatggcgtgattcctccactctcaaatccacaggatgcactggtagaggaaggtctgggacatgtgctgagggctcaagtgggctccccactcaggcctgctcacctcagggcacaatcataagaaaggaggggctgctccccagggcagagtgaggccccattctgggctgggacctggaatgcatcccacctgggcttcactgggtgcctaggcccctcctaggccaggaatcggagaagggggctatgaacttccagaagccaagctagccaaacttccagaggccaagctagcattcttatgaagctagggcactgctctgacctcatgaatttgcttggctggcattttgctgcctgacctgttcccatgagcccattcaggatctggggcaggtcagtccagagctggtccctactcctgcccacctgcctccaaggctcagccccacccctttctctgacccctcaggcctctaactgagaccgcagctctctgaatcccaaactgtgagaaagacagtccagactctgtccatcacagatgcccacaggcacagtacttagttgacaaatccatgtctctctcgttcattttatcctaagaacagacacgagaaaaaagcaggatgaggagcatgatcgcacccttaccctccagatgggaaactgaggcccagagaggcctggagcactggtgcaagctggtagcaatactccagggctccctagccctagccagtgccttcctgtgtccaggcctcagcttcccctggggacagtacaagtgttgggccagatgctctctcaggtccctgcgtggcatccatttattgcagacctcccaccaccttgcagtgagggtggctctggctgctgggaagcccactttcagcacgtggggtttaaatgctcctgctgtgggtctccccactgagtcccctcccagggtgcatgctgatgggagggggcagctggcagtctgccccggggctgtcagtgtgggtcctaggaggagggatcagacccagtcctggggagggctgggggcctgaaaggagcatgatgagcccaggctgcgttttcagtcttgctagaagcaggtctggtccccagaaacaactagagacaggcccaggccgggacaagcaggctagggggcatcatgggaggtgtctcagcttatctcctccctcttgcgcctctagctcactaatcccgcctctcatctcacctttctctaaccctctcagactgcaggacctagggcagcagggaagcttatttggcctgagccttacctgcaaagggctcaaaggtagacttttgctattatattcaaattgcaacgtatagatgctcatattttggaattaattacgttttagcagtttttctttttttaaaaaaatctgctggtaccttaataaacatggaaccagcaaccttttgccaggtgtctgttctccgggtctctgggcctggaggcgggagtgtttcaaagcacttcacgctccgcggccccaccggctggctgcgctgcccgctgcggccggcaggggtagtccacggacaggcctggaggaggcgggacgggggcagggccgggaacctgggcaagccaataaaggctgcggcgcgcggctgcgcgggactcggccttctgggcgcgcgcgacgtcagtttgagttctgtgttctccccgcccgtgtcccgcccgacccgcgcccgcgatgctggcgctgcgctgcggctcccgctggctcggcctgctctccgtcccgcgctccgtgccgctgcgcctccccgcggcccgcgcctgcagcaagggctccggcgacccgtcctcttcctcctcctccgggaacccgctcgtgtacctggacgtggacgccaacgggaagccgctcggccgcgtggtgctggaggtgagaccgctcgcagggccggcctgggcgcgggacacgggcccggggagagccctgggccccgggcggcgcggtgccgggcgcgctgggtgaccttgggcctccccatgccgagctctgggcctcagtttccccatttctgagaatgggcgtcagaatgatttcttccggcctccctcggagcactggagcgggggagacgggagggagggcacgtgtggaggagaaagctcaaggtcagatcgcagagagggagggctcagcacctctgggccggcccgggcacgagggaggggctccaggagccttctggggctgagcctagatccggagctccgaggtgggtgtcgggggtcttggggtgagcgtcgtggcccagcgggtgctcacgtggcggcccttgcacaacacggagcgcttcctggctccggccccgcccctgcggtcgggctcacactgggggtgctgggaaatggagcgagaggtggtttccagcagtagtgcgggcccagtaggcctcaggccccggccacctggtggaccccagaatgcccctcctgcgagtcgggacacactcagagacagtgtgcccggcgcctcaacccctgccactgtccttgggggccacactgagcacctcccctaactctgtttttgggtcttttctaaagcaaagtaagaaacagtcaccagggtagctttagagggaaagccctagtggagccttcaggtcggccacacattgacagcaggggtctgtttgtgttgactggcccgtatcccagggagccctt

SEQ ID NO: 5004 - DNA, 6000 bp, Homo sapiens
ctattcgttcagccagtcaataattacccattgaggacctattttgtgccagaccctatgctaatgctgaagcaaactatgaatgaaactcagcctcttccctggtgcacagccttctaggggagacacaaaagcagactgcacaaaagactttttttttagacaaggtctcactgcgctcactctggagtgcagtggtgcaatcatggctcactgcagcctcaacctctcagattcaagcaatcctctcacctcagcctcccaagtagctgggactacacctcagcctcccaagtagctgggactacaggtgtatgccatcacacccagctaattttttttttttttttttttttttttttttttttttttgtagagacaggttttcacggtgtttcccaggctggtcttaaactcctgggctcaagtgatctgcccacctcggcctcctaaagtgttgggattataggcatgagccaccgagtcaggcctactaaagtcttttaaaggctctgttgaggttccaaatagggagcagttctgcttggaggcagaggtatgctaggaaaaagaatcttctgggaagaaagagatcctttgatgtgttcctctactcagtctcagccatgtggcaggctgagaaagcaaaggagactactgtaggcaaagtcagggttagaggaggctctgcccacccgtatgaatgcccatacaagccaggagtcagaatgagtgggcaaaatggttactggagccactaacctattagatgggtacaaggaaacaggtggcaccacagagtccctcagttaaagagataggcaaggtctcagataggaaagggaccccatcctcatgtcagaggaaactgagatagccactctacacctggcccgggcacagcaagggggcaggggaagccacatgtcacagtagatgggtatccaggctccccaggcacactgagcccacagctgaactactaacctcagagctcactgagtggggcgggactcccagtttccagccaggggaggacatcctggcccagacctgcagaggagagtcttcaggaccttacctggactgggacagtacctgacggaattgtatctagagagggtatgtccagtacacagttgatacatccaagcctattcagatcccctgaccctattctgtcaagctcagtaccaaactctgccttgggccaggactttcctatcgtgagcaatcattttgttgaaactttggacagagcagctcaggatgccaacacaccaggacagaggtcagtctgtcaaatggtctcaccctcactgtctcagactgctggggcagaagcagggcactagaaacctattgcgactgtctacccgacctggctcccccctcatattgtcaggaaatgagcctgaatcgcaggcacatgctgctcaccacatcctcagtaccagatggagcctggaagtcacctggcccaactgctgtcagtgcaggtatgcacgtgtgtctatgcgtggagataagatgtgagtggattcacacattgttggatatgtgtgtatgtgtgtacaaatgggactataactcttgtgtatgtttgtgagcagctgtgtgaatttgtgtctatgcacatgggcaagggactgtgggttggcacactcaggtagatcagataaaggcaaagacatggatgtgcacgtgagcctgagttggcatattggcagacttacaacacatgcatgcccaggctaacagctgacacgccaattctcgcttatcaatagctggagaagctgccataaatccaccagaagaagagctgtcagaagctgactttaagatgacactatgtggtactgcactgcaggtaccatggcaaggaggtcccaggagacagggagctcaccacccttcaggggtgacgggcatttggaagacagtgtgactggtgtgcctgaggctgcccaggctctgtaagtgagggtcaggtcccatgtctcatggcagatgagtcctactgagccttgacaagccaagaccttccatactgcaaggtcaagatcagggtccatggtgagaaccaccataaagagctgctgttttcccaggtccttaggtgatttgaggacagggttgtatctagggtgaccgccaaataccaggttaccttaggctttgctggttttagcattgaaagtcctgcatccctggaaacccctcagtcccaggcaaatttgggcagctggttacactagcagatctgaacctaaaacagctgaaggaagcagcaggagttggagtggggggtgtggagggtctttctcagacccttctacatcagaatagaagtcagatgtaatggtgctgcctgtattctcagctgctcaggaggctgaggcaggagagtcttttgatccctagagttcagggccagcctgggcaacataataacaccctatctctaaaaagaaagaagaagaaaatacaaagtaaaatacaaaactggggctctggaaggaatgtgtgatgtgtgagtgagaggcctagaagctgaagcttcagtagattcaagatcatcttcttctgccatgaaaagggtttgaaccaggcgggcacagtggctcatgcctgtaatcccagcactttgggaggccaagatgggtggatcacctgaggtcaggagttcaagactagcctggccaacatggtgaaaccccgtctctaccaaaaaaaaaaaaaagaaaaaaaatttgctgggcatggtggcgtgcacctgtaatgccaatatttgaaaggctgaggcaggagaatcacttgaacctaggagacagaggttgcagtgagctgagatccgccattgcactccagcctgggtgaccgagtgagactccagctcaaaaaaaaaaagagtttgaaccttctttggagccaacccaaactgtatgtgaatccaagctctgcacctcagagagaataagtcacttgcttggtcgtacacagccaatgaggaaatctccctcctctgcaaagcagagaaaatcacattgggagagcagtgcaggtcaaataagataatatgggcaaatatacataagcacacatacagcacatggcatgtaggctactccttccccttccctctccagtgcatggctgttgactgagggaactgaggagagagaaatcaacggccctagattggtgaggagcagggctaacaggacccagggagagctggcttttctcggcccaccaagacatctactccaggaaaccttggctctgcctctggctcctgggaaatccacggcaagactcagtctccacatccctatatgggacttgcagaatacttgccttagctttgtcccagcactttgggaggcagattcagaacatctgtgcaatttaaagtgtgtcttttcagcaaaagagccaagcctaaggagactcaacaagggtttcggccaattaggcctgaaaactgctgcacattctaaaaccattgattcatcttccttcttctctgcaaatccctgacccttgctcacagtagatcatgtagggctagaccaagggatggggggtgctctgttccctcaaaggcccctggcagggggagggggggaatgctgagtcctcagctgtggagacctctcccaggagcacacagaggagggatctcctctatctgagaacacatccacccaagggcatcctgggaagtggcctggcttgggcttgaagtgacctgtacccccataaatggcccaaccaggaaaaggaaaacaggctgcatttccaagcaccctccagtgtcagagcaggagaacgaggaagcccaaggagctttaccagcagccaaaaaggttcctgggcttacctgtgtcttcaagttatcagcatccaggaccccaatagcagtgccttgctttgtgtaaataccctctaggaatgagatctcgtgcctctcgggcagttcagatctatcttggccagctctgtgcaagtctgtcctaagatggggcttaactctgccttcaggcccttcactcttccttggaaggtttgaagagtgggtcagctgccccttcatggtcccagactgggcactgactgggaatggggagcagaactgcctctcaccctggtggacacctgagggtcctccctgctgcccaccacacagatcagaccctttgggagaggtggtccagcctggggaacagggcaggaatgggttgagatcacagagagggggtcctgataaccccttaccatctgctgcccatccatcaccctttctctttgcctttggtctcacgcggcttatagaacctgcttagactgctaaggcaaggccctctcggccgctccactaacttttcttctggaatgcttagctcagagaagacagctaagcccctgaaagtcacagaggaagttgatgagaaaagaaaactgcgaagcccaagccccaccaggacttaagtaccctgggaaagcctcaggacaacttgggggaaagacactcctgtcccccatggtgtcctcctgtccaggactgggggccgccggcaaagggggcgtggcgggcggggagtcctcttgtcacgccctcctgcccccgcccgcggctgggagcctgtcgctccgctctgcgccgctaattggtctcgtcaggcggccggcaggagcagatccgagccgtgtcatcctcttagcgccctcacgccacccgccgctcccgccccgtgccccctcccgccgcggctgcagtcgccgctacccccattgtggtctctgccctccccgcgggcccagggcatgctccgtgcccctgcgcccggtctcggcggcggcaggcgacactccgcgccggcggagacatgaggcgctgccggtgggccgccctggccctggggctgctgcgcctctgcttgggtgagtggccgctgggccgcgctggccgcgtggatggcgagggagatgggcgctggcgtcacccaggtggccagagggacatggtcctggaccacttccagagtgggactcgggctggtggacgggagcggagaagtccttccatcttcctggcccattcggtagtggggagtggggtagcggagtagtggggagctccggggcgcttctccagagctggcatcctagggccccagggtttggcgcccggacccccgctgctctccgcttgctgggaaccagagctgtaggcttggtggcagctccgatgctgcgtggggcaggagatagtgccctgactcgcggcttgaccttggctgggctggggcactgcccctctccgagcgcgggtgcaatctgcccattgatgaaggaggggttggattgctacctgggttctaagcgcccacatgctacgtgtccctgacaagcccgagcccaccgggggcggagtgggggtcaggggcatcctctgggcggcgccccagtggggtccctcggtgcacttgggttggggaggcggagcgccctcctgcccagtagctgggcctgacgcgggaccgcgctggtgcgaagctccctcctggtgtctgggtgtcctttgcctgggtgtccgtctgttctgtgttctttttccagctcaggccaacttcgccccgcacttcttcgacaacggggtcggcagcaccaacggaaacatggctctgttcagcctcccagaggacacccctgtaggtgagtagccctggcacctgctcccgataggtctccctgaggggtgcaggcagacttagaacacaaagtgccccaggcaccacccaagttgctgcgcgcgcccgggggctccttgtttgctctccgaattcccctgggcaatggcaggaaagaaggtcattgctgccatggcgacttaagtctggccagtcctggagaccagggctcccccccacagacagggtcgccccgcgaggcaggcagctacagctgccccttatggctgtgtgaccttga

SEQ ID NO: 5005 - DNA, 6000 bp, Homo sapiens
tctgaggtcagggtgccagcatggtcaggttcagtgatggccatcttcctcttccaggtcacagacagccatcttctcctggtatcctcacatggaagaaagagggctggagagctctctgggggccctttaataagggcactaataccacttgtgagggttccatcctcatgacctagtcacatcctgaaggccataccgtctaataccatcacattagaggttaggatttcaacagatgagttttaggggaatacaaacgttcagtccataacttcgctcaacactcaaagtagttaacagtgaccccttctcttgtgtgctttttctaactaatcaattgcctcgtcctgtcaattgtcatgacacatttgctggattgtgtctcacatttgtccttttctttttcattcccaagcaacttcacccatagactgcagagataacctcaaaatctttgtttatgaatgacttaatttctttattacataaagtatatatgttcattgtagatgctttacaaaaatcaggtaagcaaaaaagaagaaaaaaattaatgtcttgaatcccaccactttgaaataactttttttttctgagataggttcttgttcagtcgcccaggttggagtgcggtggtgcgatcacagctccctgcagcctctacctcctgatctcaagccatccccccatctcagtcccagtctcagctgagactacaggcatgtgccaccaagcccagctaatttttgtaattttttgtagggcggggtttcaccatgttgcctaggctgctgtcagactcctgagttcaagtaatttgcctgtctcggcctcccaaagtgctgggattataggcatgagccactgtgtcctgccttgaaataatttcacttaatattttggtatatatacctctgtctgtgcatattaatggaattatgctgcaatactgtttgtaattaactgcatatcataaatattttttcatgtcaatagactttaacaatattattaggttggtacaaaagtaattgcggtttttgccactaaaagtaatggggaaaatcgctattatttttgtaccaacctaatagctgcgtagctttctattttacagatctaataccatttatttactcaacctcctactattaagtgtctaggctatttctgatcttttacttttatacccacactcatggtaagcacccttgcaactatattaatcacatacattcttaattatttctctaagatgaattcataaaagcagaattgtggggtcaaagcctatacacatttttaggttgtttgataataagccaaatgcaataaagtatcttaatctgtatcccaatgtccagtattctgttttcctccaacttatcttcctccttaagtttgtaaagaagaacactaataatgttgcctcccacttcaaaaattgtccaggattcaaaatcctcagtctaggctttgaagcccttctaatctgggcccggcccaccttttcagggtcacctctcactgtcctccctgtattaccctacaccccatgctattgcttctgaacactcttgatttctaccctgtcttcagccacactagatatgatccctttcgtgaactccgatagccatgtacatgtgcctcacttccagcattaattgtattctgttctatgtctcatgggctttttacgcactagtcttacctcccttcccacaccacaagtgcttgtaatgctgggaccaccccctgagtccccgacagtagaagtgtaactgtcagaattgtcttggtgatgctgcagtaacaacaaccctcaggtctccgaggctgaaaacaagacaagtttatttctcatcatgctacatgtccatctcgggtcatccaggggcctctgttacatgacatcctcactctgggattcaggggccctttcatctgaaactgatgtggcagcagagggaacagagacctggagagcctcccgttggcaattaattgttcctgtctgaaagtgatatttctgcccacaaaccatttgttaaaatcagtcacatggctgtaccagagggaggaagagtaatcttcccatgtaactgggagaaggaaacaatcatataatataaggggaacttgaagtctctatcacaatagctagaatggtgccttgcttgtaacagacaatcaatagacaaatgttgaaagaatgaacaaatgaggccaggtgaagtggctcacacctgtaatcccagcactttgggaggccaaggagggcagattacctaaagagttcgagaccagcctggccaacatggtgaaaccttgtctctactaaaaatacaaaaaaattagccaggtatggtggcatgcacctgtaatcccagctactccggaggctgaggcaagagattcgcttgaacccgggaggcggaggttgcagtaagccaagatcgcgcctgggcaatagagggagactccatctcaaaaaaacaaaaaagaaagaaagaatgaacaaatgaatgaatctctaactagttataaaaacaaaagaatgctgactataataggatgtttctttttcaaattaatattcacttttataagattatgaaagatgggccgggcacggtggctcatacctgtaatcccagcactttgggaggccgaggcgggtggatcacgaggtcaggagatcaagatcatcctggctaacacagtgaaaccccgtctctactaaaaatacaaaaaattagccgggcatggtggcaggagcctgtagtcccagctactcgggaggctgaggcaggagaatggcatgaacccaggaggcagaggttgcagtgagccgagatcgcaccactgcactctagcctgggcaatagagcaagactctgtctcaaaaaaaaaaaaaaaaagattatgaaagttgaacatatatgggcattttgttttttctttttctattaagtataagtctgtatatgaaatgcaaatatgtgtttttccctctctgtttcaagagggaaggatgaaaccaggaaatcgtgagcacaccacatacttacaggagaagtaggaactgtaccatgagtcacacaaaataactaggtaaaaaagagtgtccaaaattgttagataaggaagatggtcccataggaggggtgactcagttgactcaactctctcctgggaaatacacttctgcattatcctatttataataacagggtgttatgaagtaaatagtcacccaaagaggaacctcctgagagtagagttgagtgtgacataggacagtccaagaaaatatgtgcacctgacaaggtgctttgaggtagcaggtgaagctcaatcacaagaagtggcataactcaacaaatgactctttctgtacccctgggaaaaccatgtttcccaccaagaatctctcaattcatgacagggaatgtgcaacctcaacggatctctctttcttttgtgactattaagattactatctctcaggctgacacaggtggatcacctgaggttgggagttcaagactagcctggccaacatggtgaaaccccatctctaccaaaaatacaaaaattagctgggcgtggtggcacccacctgtagtcccagctactcgggaggctgaggcaggagaatcacttgaacctaggagacggaggttgcagtgagctgagatcgcaccactgcactccagcctggcaatagagcgagactcagtctcaaaaaaaaaaaaaaaaaaaaagaaaaagattactatctagagaggtaaatcttagagaactcaatgaaactcatagggtttctatttttgaagcaaacttaaatgtgggtgtaacaataatttttagagtcactgtaacatgtgtgtgttttccacttaagagaatttgtcatattaggtttgtagctttattgaagtgtttaaaacaccttgactaagtttgaaaccaacatttaagtatcgaaggcaattggttcatgaattaatagtttgaattattagttgcataatagtgtttaaatatttgaggaaatgtgtttaatagatgtaaaagcttagtaaagtgaacattaaacaaaactaagtagtggtaagtgttctttctatgccagtagcccctgagacgttaaggatcctagcaacagacaagatatctatcatctagtagatttagtagactgtatgttgtagcaaaatcgcatgacctctggctattactattgaaaacaaaatcctaactaagatacttagcagaaaaacccagccagcaactatgtaggttaccttttgtaattacagtctctcgacaagggttattattcaattcatgacttgattaggtttggatcattggcaaatattttgctatgttcacctctttagtaataagcttgaggtttactcctttaaaacacttctgaggtcaagctttctgaagtgacagggattgagaggtgaaggttctagagaaagaggaggccaagcaaccttggtgatcaaaagacttttaagaaaaggaaagattaatattcacctttatgttgcagtgatgcaaactgttccatatctcccagatgttcattacagttgctatataaacaaaaaaaatccaagcacttccgaggtctaaatagttttacttcctatagctatcatacaagaacgattcaaagtgccaattgttgccaatgtcgtgtcattcatggatatgtcagtgattcttccttgctgtggacagcagccgacattcagttatttttctggaatagacacctcagcttgctacttgctgggctgatctaagatactctgaagattcgctagggacttatgagctactaatgctcagggatttagtgtcctgaagaactctttaatcctgtgcttcctgaatcccaccctaagccagggccttctgtcacatcccaagagttacaggcagtttgaaagctctgctttctgcttgacctttggaagtcctatgagggaccatttacggtttcctcagtaatttccaccaggatgaatttccttctcatcactctgcctcaggtagtgctctgaaggtcgtcctttctgaacaaacgcagcaaagcaagccacaccatgggtgagatcaaccaagttgccgtggagaaatacctggaggagaaccctcagtttgccaaggagtactttgacaggaagttgcgggtggaggtgctgggagaaatcttcaagaacagccaggtgccagtccagtccagcatgtccttctctgagctgacccaggtggaggagtcagccctgtgcttggagctgctgtggaccgtgcaggaggaggggggcaccccagagcagggggttcacagggccctgcagaggctggcccacctgctccaggctgaccgctgcagcatgttcctgtgccggtcccggaacggcatacctgaggtggcctctaggttgctggatgtcacccccacctccaagtttgaggacaacctggtgggccctgacaaagaagttgtgtttccattggacattgggatagtgggttgggctgctcacacgaagaaaactcataatgtcccagatgtgaaaaaggtaggtggccttatgacagtggggcagaggtcttggcagggtcagggaggaacaaatgggaaagagagatagtgctatccttgtggcattagtttggcaataaccgggggaatgtgggtggcagggaagaggatcacccaggcctagtgttgccaaatttagcaaatgaaatttcaagttgcccagttgaacttgaatttcagataaacaatgaattattattttctgaagtataagtatgtcccatgtaaagtttggcattttatcaggtgatcctacctggccctggtgcattccacacaccctcccttacgcctcctccagtgctctgggggactttccttctcagcaacaccagcaaaacaaactaccccactaggga

SEQ ID NO: 5006 - DNA, 6000 bp, Homo sapiens
cttctaccttgcctggtgttccaagtctggagcctctgattcaatttctcaagagattaaacctctgtcagggctgggtttggggtagtgtttagcttcttgggatgagagggagagtatgggtccttattctgctctcaaccattccccttatttttatcctagagccccacctctgccttcctggtaactcttgcatctgagtcctgaggctttctggggatctttgggagaaacagatttgtttcttgttgttacttatctctgatggtgtgtatgttttagttattacgtctcaattcacttttctccttcattgacacttccaaatgccttgtcacctctcatctgcaagttggctgttttctcattttctttatcattgtgagtttatacctgaaaaaaattaaaagaaaaaacaaaaaacaaaaacctttcctatcatgttggcagagtttccagagggagcagaggtaaatgcacatacttgatctactttgtttatcaggaagccctagcccatatttttattgaattagatttcactaaagacaagtttctgcaattggctattagcaatcaactttttttggtgacaagactgaatatttaggattaaaagtttaaggatgttcattttatttcccagctaaaaaagaatgtagtagcccagcatagtgaatttataatctttggatttatttccttggatttacttataacaatatgtttgaaatgtgttaagtagaaaaattggcagaagtgtatgtgtgtgtttgcaactgtgacagcaagggaaaccgatggaagaaaagaatgaatccaagagaaagcagaatgttagattttgattgggacggtggtggtgtttcagatccatagccatataaacattttaaatatcatcaataattttttaataagtacctaaatttgatggttgtttttttaaactgtctaacgttacagaccattcatcatctatttgtgtcttaagaatactgccccagtttcgctgtgggtccctttgagtgaatgcatttctagcttttgaggccacgctatctgtagttctcattatcttggttgctttcagaagcctcatataagccaaagggtgaacaataaccagagaacagagattcttaaattaagcaactgaaaagagtctgctttggttcattagcccaaataggatcttttactttttgagtagcaatcaaaagatattggatctatcatttctcttgttctcttaaaaaatcacttaaatttcctttaaacaatctggtgatgtgatgtcagatttttgcccatcatattataacatcattgttaagtagtatgaatggaaatgaaacatacacctcaaaatatctaacggtcctgatataaggctaaagaaaacaaatagtcttttcttatctttccccttggatgaatttaaaatagataattcttaacagtttcatcctacttccgtagggtgaattttcccccagtatggctttggagtaaattttcacctttttgctagatttatgactgctattaccaatactattaattatttcagtatgatatagcacttctaggaggctgaccctacttaattggaaaaaaagaaaatatgttggagctttaacatttcttgatcatagaaggtactgaaacataactcatgattctaggcaaactttgccattgagtttttgtgtgaccatataaaataatttaagttttctgtgtctacatttgtaaagtatatgacactcaactgtataatgagctcacagtctagtgagcttgatagaagataagctaatctggggtagaaatcatgctttattcatatttgttttctcttgcttaaattcataatagttactcagtaagtgttgactaaaagtgtttgagagagaaacaaaatacaaggtgagtgaaaattctgagatccttgtgagaataattcatataaatttaatatattcagcttgattctaaaggcaatgttgagaggaggcccgtggggctgcatgttcttcagtgtaatgtgaagtactgagctgattatagtggttattcaattaaaagatatgtattttaaaattattattatactttaagttctgggatacatgtgcagaacgtgcaggtttattacataggtatacacgtgccacggtggtttgctgcacccatcatcccgtcatctacattaggtatttctcctaatgctatctctcccctagccccccaccccacaacaggccctggtgtgtgatgttcccctccctctgtccatgtgttctcattgttcaactcccacttatgagtatatttttaatgggcaagctctgctcaaatacaggctacagtcagtatgtgactgagctgtgatctctctcgtcaaagggactacagcgcaccctttgaattaccttcacactcactgacggttttaagagtttggccactttccccacgtctgaaagcgactctaccttagatgtgagaaagatgcggctgactttggctggcagatggagaagaatggaaaagcagcagacagtgttcatgcatggctgacactagaaagaattcttctggatttcacagtcattgaaatgaaaagatgtgatccagaacaggatcttccttttaactggtgtctgcagtgttctctcctctgcttcttcactcatttcaagaagtctctaaggggcagcctgatgtggaaaagatgttaagggaagaagagggcatcctaattctaggtttgataaggacatttttgatactggtaaaaccctgaaattatggaaattatgatttgttctgtatgccaacgagaatcgtggttttccttttgctcttttccttgcgaaggagccaactccttctggatctttgtttttattttttcctccttaagtcactgctgaggtatttttaaaccaagccaacacgtatattttattcaccgaaggaagaacaaagcatctgctaatagaagcagtgaaaaaagcacagcagtcagaggcctcgtgtctaaagctcagttcattactcctaacctgccattggccaatatttcaacctttctgagttgctctttctcatctgcaaaatggggttaatggaggatttcatctgcaagtggggataagagacatgaaaagaactgacgcgaaataaacacgagttgaatcctaacaataatattttgactatgtagttacaacaaacttttctttcttctttttttttttttctgtgagaagtgcctttggtggattttgaattctttttcatactgcctgttctttggtgggactccagcaacattgctgtaactcgaggatatatggctgcaatgtgtgtttggcttcctttctcaagggggtcaaataaaaaggcaactgtttagagaaggcaccaaagtacaaaacaaaaatctcagaatatgccagccaatcttggaaagtcatctgaagaagaaaaagtgctgctgaggaaggaaaacggcccttttgtgggcatcacttctgctcttctgaaaaaaagccccgatgctgcaatatttttcaaggcagaatatcgtcccagatggaggagggagcactgacaagcagaaaaggagagacgtgcggtttcgaggcagcgtctgtaaggggtggagagcgcggggctcggagcctcgcagttctttgttgggggcgcgggcttcgttattcccgaggcagcaatggctccccctcggaggtccctccgcggagaccgcctcgcgcctctcgcagtccccaatccccgcccctcccagccctcgctgaccccacaacgtggtcggactgcggtgcctttaaggcttttgcctgctgcacatgctcagctctttgtgtgttgttggagtttttctctcttaagagaaaaagaagaaataggcaggaggatggggcggaggaagggggaagcgctagggaaaaagcgttgcacttttgcagctgcagacggcggacgggaaggacttcttttctgctgaagctgcgaagcctgtgtcgatctctcattcgtggggctcccggggcgcggggtgcgggtggggccggggtgcccgcaccggccggggggaagggcacgcgggccacacctggggggcctgtctccagtcagcgcgcgggccaggcggggtgggcgcgcgcgcgtgggggagtccccggtccctgtcaggggcggggcgagaccaaggcgccgggcctgtggggaggagtgtaggcgcgcgcgagggcggggggcggccccacgcatcgtgggctcccggcgctgccgctgcggccggctcgaggcaccggagacagaatggctgccggggcgcccttgaccgccgggcgggcgaggcggggctgaccgccgcctccttgatcgcccccttccacgttgggcgcgcccacttcggggcgcccgctcggcccccgccctcctgggcgcgcggcgctcggagccgaggcagttggcgcgggccgcgggcgaggcggggccgcgcgcggggtcccctcctcctcccggtcaggtcccctcaggagcgccgggcgcagtctgcgcctcccgctccccgcctccggccgggtccgggacgccgcggctgtggggtcggcccgctaaggacaaggtcgggagactgggtggcgatgcccgagtgcgactggaggcagccgagcggaggcgacggcggttgggatctgtccctcctgaccggggagcgggactcggacgggcgccggtgaggaggaggagaagcggcggcggagaggttttctgcggccggaattcccttcaacagcatccctgtcggcgcccgcgagcgcagtctcgccgggcaggggcgccggggaagatggagactgggggccgggcccgcactggtaccccgcagccagcggccccgggggtgtggagggctcggccggcgggcggcggcggcgggggcgcctcctcctggctgctggacgggaacagctggctgctgtgctatggcttcctctacctggcgctctacgcgcaggtgtcccagtccaagccgtgcgagaggaccggctcctgcttctcgggccgctgtgtcaactccacctgcctctgcgacccgggctgggtgggggaccagtgccagcactgccagggcaggttcaagtaagtgccttcgccggaccccgaacctccagccctgcctcgctcccgtcgcggccttccccgcccccctcgcggcctcccccgcccccgtcgctgcctctgatcccccggccgtgagtgaacctcagcgcgcggcgggagcgggcgagagtggggcccgcgccgcgccccctccagccccggggcgccccgggagagctcgggcccgcgcggagccctgaccaacggggagctaggcatttctcgagcgttccagatgtccgcagcgacttctgatccgctgctcagcacgaacattttcacaatcagttatgatgcccagcaccattttcttgggataatatttaaaaatcagaaattgtccaagttacttatgaaatacatgcgcattgtgaaaaattcacaaaagtgtaaaggttcagttatgatctatgagtgcctctctctttccccatcctcttctctctagaggtgaccccttctaacatttatttagtcatcatagtgatgttaataagtagagtttatgatggacttgctaagtgccaaacactcttctaagcgctttatgtcaattttctcatttattccctacaacaactctgtgagttgctagaattattatgctggatttacggagagaaatcgaggcgatacattgaagtaacttggccaggattacacagtagtaagggccgagttatgattccaaatcagctggcacattctggagccagtacacactccagaatgtgtacttttaacgaatttgctgtgttgtatttgctaggacaatcttgaattgagaaatac

SEQ ID NO: 5007 - DNA, 6000 bp, Homo sapiens
ctagccaggctctgtctgcagacaattatcttgagtgagtcacttaacctcagtgtttttatatgcaatggagtaagtctgacccacccggcaggagtactgaagagcgatgattattagacgctagaaatgcactttacggctgcgcagtgctagacgcagacatgccgcagggcaccttctgaatctgctgtggacatgcatgagggatgctggctggaagcctctgataactatgaatccataagcaaattggttactgtcttaaacgaagtaacaatgtgatatttagtgctgtcctttttaaaaagctcgcaatatattgttgtctaataaaagtcttgggccgaatttccctcctgggagaacaagagctttgggccaagtggctgaccaggttgaagagggttggcagctgctgaggaattcatccatggtaggaggaggaaaatcgggcaggctctgctccccatctccctctctgctccttgcagactaggtgggcccaggatctccttaagccaggtaagtaggtctttaggaaactcgttattattattattttggcaaaggagcaaatacacggggcaatatttcaagggtgaagaagggcacacaagggagaggcatcctccctctcacctggtttcatgagtgtggcttttaacacaggtgacacaagtggccaatgtctttctgaacataggagagccaggccccgggcacagtgacaggtctgccatgcccatgcagcggtcggcatgctgatatgatctaaggtgagggcccagccaggtcagccgggagaaagtgaacacaggaagggcacacccaggaccccagggccccagaactcaggtgagcatgaagggagccagcagaggagactgggggtggtcagcgcagttgggagggaagagcaggaatgccacagatgccagggcaaggctcacttccaagaggcagccagtggtcaaccgtattggaaggtcagctgcaatcaggcctggggggctggcccttgaattaggatgccccatggggtgtgggcatgagaagcacaattcgagggcctggacaagagtggtccattggcatgcggggcagagatgggcagacttttaggacaaggtttgcagcaaggagagcagagaggggggaggaaaatggaggggcacaggctggaggcttccagagatctgagagaccgcagcatgcttgtgaactgccgacgtgacccaggagggggtggccttgggcggggacaggcacctcattccatgtagcagcatggaggatgtgcaggacagacaccagatgctggatgtgttgacttagtggcgtgatcacagtcagaatccaaatggagtcactggtattaaaaaccctgacatatagactgtggaagggcatgaagggagggttcttatgcagacatgcttgatagcaagaacaatcacaaaagactgcaaaaatcacagccgtgcacaaagaccatcacaacttacacacacaaacacttctgggaagacatctgcccagtagctgcctgtccagcctcagactggcaccatccttcctggagatccttgtagccaaggatcattgattcaaaacaatgatgtaatcctcctgtttcctttgaaaatctttgtcttcctttaccttccttgacccacacccaatttacgatggcacacatattctattgcaatgaatgttcccgagtaaatctcattttcttttagagagcctctctctgttatttagggtgacagtgggaaaatcccagactgcaaatccttcctcaacaaagggcaaacgtttcctccagggagcgtagttggtggttagagaaggggaaggctgcagtggcctcttggagtggtggagtgcacatgcgcagagccaggaggcctagtgctcaacgtgggtgtgcctgagacctgggagatgccaggggcatggaaataaggtgttgtctagtttttcccccaatttagttttctctaatttgggcgcaggttcactgtaagcaagtaaatcagtcctgggggccagctgggtgagtgctggggggcagggagaggggagggagtgggtacacaaagtgattctaccctcagagagaagcagagtaaggcaggaagaagaggtgtgcacatgcgtggtcatgtgtgcacgtgtgcatgttcgtgcatgcgcatgtgcagatgtgtgtgcgtgcaagtgcatgcgtgtgcatgtgtttctgtgtgggtgtgcacgtgtggcggtggctaacgaaggcatgggagcagcatgggctgtaggtttccatgaggtcccacggaagtgaaaccaaaggagaggaggtggtggggagggcaaggtgcctggattcggccttggtgtggtcattggtgatgagaacatccaggctatgcccagggccgtggatgcagaagtgggaggtccaggccgcacccccttgggttctggaggttctggtaatgagcacggaatataggaggcaggagaactgtgaggggctgaacctgtggtgggtgaggggtgcatgggaaagaggaggtggctgcctggaggaagggcagaggccaacgtccaggcatggcaggagctggctggcgaggagaggaggaggggggagcagggagggcacaaggggtgggggacgctgcctcagccgggtgtgagggcacagcctgcggggagaagtgaggaggcaatgtcccttctcagaaagcacgttccagggatcagtgacacccccacatttggtttctactaagggtacccttagcatgtgctgattttgttaaaaagaaaaataagcgactacatcagtcagcttcagctgctgtagcgaaatatcacaggctgggaggctgaaacaagacttttacttctcacagttctgggggctggaaatccaagatcaagttccagcagcgttggatttctggtgcagggtttgtggctggctggggtgaagcttcccactgtgcactcacactgccacttcttttgcacatgtaagggtggggacagcactgagccctttctattaaacactagccctattgcacgacttaacattaaacaccagccctactgcacgacttaacattaattacccccgctagcccacctccgaatacagtcacattggaggttagggcttcaacccatgaatttgcggggtggggtggggtggggcgggcggaattcagtctgtagcaggcacctactgactaaagtagacattggtttatacatcaaatggattttgctggagtcctgctcagcggtggccgtaaggaggaaccctgggggtgttaacacaagccagtgatgcggcctcagcacaggcctggggcccgagcctgcagcaccattcctgccgccccgccctggcagcaggtgtcttcctagaacagaacaagccccttttgatgtcattgggcattgccttggcggtttactcagaagctggaggctagcctcgctagagcccattgccaggccctgaccgcccctaaatctgtgtccacaaaatcctccggagtgcctgctccgcatggtggccactggccacacagggctgctgagcactggaagcggccttgtgagctgctgccaagaggcaggtgcccgtgcaaagccttcctgtgaaggaatctcactgaggttgttaaattctggttacatgttgaatgatgtatctatctattgggttaagtaaaacgtattgttaactttggctattacttgttacctttaaaaaatgtagctactggaagctttaagatgacaaatgtggttctcctcctccatctacaggcatgtcccggttcacggcggctgtgtccccgcggcctcagacccagggtccagcccatgctctggcccctccggcggccaggatcagcatcgctgccccggggcccgcgccgagccggctgctcctccgtgctctgcgctcctgggcccgcaccagccccctcccctggagcccccttcgtccctgcgagggttccctgcacgccccgcgctgagacccagcctggcccgggccggagccctccgcgacgtcaggatgcgcctggcctcacgccgcctcccctccgtcttctctgggccgcagccgctcctcgtgagtgaggtcgcggccagggagccgggtggacgcgccgggaagctgcacggtccacgctccgtctgcgcggagagccgggcgcgcgtggcccggcccctgcaggcgcgactgccgccgccccggtgggctcccctcccccgcacgcccggcacgcggctggacgactgcggccgcgcgggggctggaacatcccctcagagccgcaagagagcgcacccgccgccggcgcccggaacccagggcccctttaagaggcgccgccggagcagggccgtgacgtcatagaagtgcgaagggcggagtctgtgcgcagccgcggcgcggggggcggggcgggggcgcggcgttcttgcgggcctgactgacaggagcgccctccgggagcgaccagtactaggccgccggtcgcaagagcgccccgcgtaggccccgccccgaaaggaggccccgccccggggcaggccccgcctccacaaggacaccaagtcccgcacaagccacgccccccgcaggccccgccccactctgttcagatctaggcccaactcaggctccgcacctcaaggctccgcccccagcaaggctccgccccaggcccggctccaccccgcacaggccccaccccgagtcaggctccgccccgcccaggccccgccccgggctcggctccgcggggcgggacttgccctcagcctgagtcggcggcggctgcgggaactttcccagcggatctaatggctgcgcgcgggccgctgtgaggcgcggcggcgagcgacgggcgcggggccgcggagcagcgagcgagcgagcgagcgcgaggccggagccccggccaggcccggccgacccgccgagcccgcgatgcgccccggggccgccccccggcgcagctgacgccccgcggccccgcgaagaccccggccggccggtcccggaggaagcggccgccgccgccgccgcccagcccagcgcccgcgccgcccgggcaccatggcggggaaggcggccgccccgggcaccgcggtgctgctggtcacggccaacgtgggctcgctcttcgacgacgtaagtcccccgtgccggcggcaggccccaagcccggaacccccgaccctgaccccggggtcccgaactgcaagccttggaccctggaccgtgaacctccagacccagaggccccagactctgatccctgtacccgggaccccagactcctgtcctgattcccaagtctgggagcccagacccctgtcttgatccccaagcccgagacctgaagacctgggccctgaatccccgaaccccatcctccagactccagcagctgaccgttgaccctgggaccctgcctctgaactcctgtctgcaaatcctgacctcgaaactccaatattaaaaccctgtcagaacccctgttaacagttcctggaacccaaaccccagaaaccgggtctgtgcgcaccaaacccagccccagccctgatttccgaatcctcagaaccctggccctggaatgcccatccccaaccctggccctgaaccccaggtccatggtcactggaaccacaaatcctgactgcagaactctggttacagaacctgctctcaaacgtctgtctctggtccctgagccctggaccccaaaccctgaaacataaccacaaaccctaacccaggaacttctgacacagggctgtggccccaacctcctgtccctgttccccaatcactgaattctagccctagaatcccagccttcatactgtggccctttgcctctaaagccaatctagcctgactctgaaccctgaatttcaacctcaggccccagcttatggccc

SEQ ID NO: 5008 - DNA, 6000 bp, Homo sapiens
atcattctctgtcatgtgtggtaactcctcaagatgggtgggtttactttgtaacaatagatagctgtgttttcatagcagtggtataggaatgaggcagtagttgttaaggtagtcttctgtgccttcagaccagggttgagtcctgactatccctttgtaataatcttaggcaacttacttgacttttttgatgttcatatttcctcacctgtaaaacaggaatgtctcatagaactgctgtggaaatttgattagacaatgtatataaagtgcttgggaaataaatgttcagcaaatgttgcgtattattagctcaaatgttgcttattattagctaagtccaagttctaagtcctttcttttattggcttattactttcttttactcaaaccttactccttcattaacagtttatgagaaattatgctatcattttgcatttatcattttggggatccttgattacccttctaataaatttttgagatctattttataactttgtatttctaagattagacttttttcagtgttttaaatcagttttgcaagaactcagattccaagccctatattttattaattcctactcttttgctaaaagctgaatgactatccatttctgttattttctcagcttaagatgtgccgtatccaaagccagtggctctttgctagcttgtgtattgtcgcttttctcacaactcatggagacctctacagcaccagcatttcctggaagctctgcccataattagttttgcagaagtgcagccatgttacatcactgctcaggaggtcatgcagttgcacattctgtactctacttttatgagagaaaagcacatggcaggaaggcaagctgatatcaggtattttatttttttaaagaaagcaagttccagggtatatatcttggggtcattatacatgtggcccaatgcagtacacctacaactgtagcacaggctataattaaatatatagactttacaaaatactccagtaatcagagttgaaggaagtaaaatttaatactttacttacttttttgcctttattaaaggcatttaagttttttagcggatgttaatgtttacaaatgtcaccacaatacaggtaatttccaatttgaagtgtagttgcttgcaaaagtatatctgacagacattttcaatgtattttctagaaggaacacattatattttgttttgagacggagtctcattctgtcgcccaggctggagtgcagtggcacagtcttggctcattgcaacctccgcctcccagattcaagcagttctcctgcttcagcttcccgagtagctgggatttcaggtgcgtgccaccatacctggctaatttttgtattttagtaaagacggagtttcaccatgttggccaggctggtctcgaactcctgacctcaagtaatccacctgcctcggcctccaaaagtgctggaattacaggcatgagccaccatgtccagccagaatacattgtataagaaaattgatttcaattataatgtacctgtggtacttaactaccaaggattgggaactgtttgaccataatttttccatctgttggataagagctgaatcagaatgtcattctaagctaatagtggctatcatccatgacctaaaacggactcttgttaggggactgaagattggcaaagggagaagctagaggccatatagaagaggaaagcatgaaggtagaaaccacaatcaggactgccttcaaatatgaacttccagggatacttcttggttctgggtagctcccccaccacactgttttcttttgctgtcctcaggaatcagcttgcttgtttcgtttcattgctatcatctgtagtttctaatgagtttttcactttctgtgatctctacagaacagattttacttttctctcttctcccctacatttgtgtctgtgaagtatgcatgctggtgtttttactacttttaaggaaagagaagtatttagaaacaaaaacgtatttcatctgtctttgccacaaggattttttcctccctagttacattttcacgggaaaaacaagttgtacataagtgcatcttacatttcagaggaaagtcagactggagttatagtggacttcttatcattagttaggtagaggtagaggcagcagcctggtcttaacaggactctgcctctgtagggagggatgaggaaactaaagactacaggagtcaactgcactggggtactgggttacaggaaggctagtgatcttgctaacctagaagactagaaagtagaggaaattcatatgcccttttcctgagtttgaaaaggctttgttctttcatctcacagggagacttcagcacaaatgatagaagaaaatttgaactgccttggccatttaagcactattattcatgaggcaaatgaggaacagggcaatagtatgatggtaagttttgtgtggatatgggtgcctgctttggctatgttgggtgcaaaaggtttaactttccatgctagccttatctggcatttgggatgcatatgggaaatagaagaactcaagaggaaagagcatttggggaatatcctcaaccttaaatccttatctgccgttactcagggatatactaggattatgtcatcaattatcttcaataatagcatttttggtcaaattaaatgagtggtaagcttcttcacaatgtgaccattgaaattgaatggtttgttctgtacctttttgcttcagcaatcaattttctccattaagatgggacttgtactttaattcagatatggtacctcccgaatagaaaataaattatgttaatatagttgtaataataagtgtgtgttaagatttggttactataaactactgatttgttaaaacttgaggaaattaccataaaatgtctactgaatcaatttttcctgcatttagtcttaatgtcaattctgtacatttcctctttcattaagaaaaatagcagtggccaggcatggtggctcacgcctgtaatcctagcactttgggaggccaaggcaggtggattgcttgagcccaggagtttgagactagcctggccaacatgggaaaccctgtctttataaaaaatataaaaattggccaggtgtggtggcacacacctgtggtcccagctacttgggaggctgaggcaggaagatcgcttgagttcaagagtttcaggctgcagtgagccgtaatcctgccattgcactccagcctgtgacagagtgagactttgtctcggggaaaaaaaaaaaaaaaaaggataatggtggccagccatatgacatgtacctgtagtccgagttactagggaggctgaggcagaaggattgcatgagcccaggagttcaaggctgcagtgcattatgattggacttgtgaatagccactgtactccagcttggcaacatagcaagatcctgctctcttaagaaaaaaaaaaaaaagaaaagaaaaggaaagaataattgtttacttcaaatatttatgaaaaaaactctgaaatttttttaaatcaggaaataaggtaaatgaaatgatttttcaacttttgattatgaaatgtccaaacagaaaacttgcaaaaatgaacacccatatacttataacttatagtcaacatctaattgtaactttttcatgcctggttttagaatcttgattggagttggttaacagaatgagttgtcacttgttcactgtccccaaacctatggaagttgttgctatacatgttggaaatgtgtttttcccccatgaaaccattcttcagacatcagtcaatggaagaaatggctatgaacagaaactacatttctactatgatcagaagaacatgattttacaagtataacagttttgagtaattcaagcctctaaacagacaggaatttagaaaaagtcaatgtacttgtttgaatatttgttttaataccacagctatttagaagcatcatcacgacacatttgccttcagtcttggtaaaacattacttatttaactgattaaaaataccttctatgtattagtgtcaacttttaacttttgggcgtaagaccaaatgtagttttgtatacagagaagaaaacctcaagtaataggcattttaagtaaaagtctacctgtgtttttttctaaaaaggctgctcacaagttctatttcttgaagaataaattctacctccttgtgttgcactgaacaggttctcttcctggcatcataaggagttggtgtaatcattttaaattccactgaaaatttaacagtatccccttctcatcgaagggattgtgtatctgtgcttctaatattagttggctttcataaatcatgttgttgtgtgtatatgtatttaagatgtacatttaataatatcaaagagaagatgcctgttaatttataatgtatttgaaaattacatgttttttcatttgtaaaaatgagtcatttgtttaaacaatctttcatgtcttgtcatacaaatttataaaggtctgcactcctttatctgtaattgtaattccaaaatccaaaaagctctgaaaacaaggtttccataagcttggtgacaaaattcatttgcttgcaatctaatctgaactgaccttgaatctttttatcccatttagtgtgaatattcctttattttgctgcttgatgatgagagggagggctgctgccacagactgtggtgagggctggttaatgtagtatggtatatgcacaaaactacttttctaaaatctaaaatttcataattctgaaacaacttgccccaagggtttcagagaaaggactgtggacctctatcatctgctaagtaatttagaagatattatttgtcttaaaaaatgtgaaatgcttttatattctaatagtttttcactttgtgtattaaatggtttttaaattactttcttgatctctattcattataaaaatcagattataataaaacagttgaatatggcttaggaaaatatgaaggttccatgaagtggaattaagagcatagaataactgtactttccttaggaataataggacttatggtaaaggtagtattgggcaacttctttaagagtgttttcctctgagatgtcctatcaccactatctacatctaaaaaacatgctcgattcttgccctataaactgatgtcacagccccaccatccccatttttgctagtggtatcattttcctagtcaaccaaattttttagtcatcacatatcactgttcgtcatctattataataggcagtctctctcttgtttccctggttttagaagattttagtaataaacatttattgggtacctgttacttggagggtattaagctagatggcaagatctgaaacaacataggcagtatagtaaaagtgcttatctgggagtctgaacattacaagccatccaagcattgcaattattgttaaggattattttcaatggtcatgcattttctaatattttaataattggttaaagatttgttatagcgtgggggccgctgctggtgtgtggctggggttatgtcagggcagcctgatctatataatttgggcagatggtgtgagtcagaacagactattatagtgggatccccaaacttgcttttgatgcatgagttggaccactattttttggtgggtaacaacttttcagaggggaatggcagttgtgaattgtatacatttcattctttaagcaatattatgaaaaacttcagagaatgtctacagaaaacagggtatggagcaagttattttccattctttttgctttttggaagttaaaatagctaagctctgcaaatatcatttatttggaacagataaggtcccagacattcctagataataaaaatcaaatgaatgatacaggtaagtgtatttattgaagggtgtgggtagagtggtctgggaagtcttgctttaat

SEQ ID NO: 5009 - DNA, 6000 bp, Homo sapiens
caagcgctggccttgaggtaagcaatatgaaaacaattacaactcatccagcctgcaggcactgactgacacctcattctaccagccagaactacagctttgattggacgagagactgatttcagtaactttctcctgattggagaccactggccatggactggttctagccggttttcagaagctacatactgaatacctctgtgtgtctccttcaccttttgacatataggacctaattgtaatacatttaaactttaagtctccacctcaaggtgaacatgggttgtgtgttagatgcatgttcaatacacatgcatcaggatgacctttaatgaatattcatagcacctcctgtaacctattgaatatgtatgttttgccaacatgttcagagcgtaagtctcctgccccagtgcctcctcctgtgaagtgcctgcaaatgctggatggccaaggctgtgattcccagcctatcagagtggccgcctagcaggctgtaacccatttataagaaataaagtctattttctaaatttgtgtgattttttttggcaagttaacgtaggtgatagtgggaccagagaacttgctgaatagggattggactatttctccttagtgatctcatcaccaagtcttagagactgggacacagcttataaatgatgctcaattgagaccagcctggctaacatggagaaaccccatctctactaaaaacacaaacaaattagctggctgtggtggcacatgcctgtaatcccagatactcaggaggctgaggcaagtgaattgcttgaacttgggaggtggaggttgcggtgagccaagatcacaacattgcactccagcctgggcaacaagagcaaaactctgtctcaaaaaaaaaaaaaaaaaaaaagatgctcaagtggtccccggggatgagagctggcactgagaggagctcacagggagctgtgatcgggtgcccctctggtcctgagcctgctccctccttgcttctctgcctccactggactctcagcttaaagggcgtgactttcagtcccaactccctgctgccctctttgactgctgattctagactctaacttcagttaatctcagcacagagctcacaagacacaagccaagttcctttccttgacagttaagcccaactgttccctgagggcttattacagagaaccctgggctgggtgcagtggctcacgcttgtaatcccagcactttgggaggcctaggtgggtggatcacctgaggtcaggagttcgagaccagcctagccaccattaaatggcgaaaccctgtctctactaaaaatacaaaaaaattagccaggtgtgctggcacttgcctgtaatcccagctattcaggaagctgaggcaggagaatcacttgaacccaggtggtggaggttgcagtgagccaagatcatgccactgcactcatgcctgggtgacagagtgagactccatctaaaaaaaaaaaagcctgaaattttctaggaatatttgcctttcgtatttccatccgtgttactgtgtccggaattggtgggttcttggtctcactgacttcaagaatgaagccatggacccttgcggtgagtgttacagttcttaaagatcgtgtgtctgcagtttgttccttcagatgttcagatatgtccggagtttcttccttctggtgggttcgtggtctcgctgacttcaggagtgaagctgcagaccttcgcggtgagtgttatagctcttaaaggcagcacgtctggagttgtttgttccttctggtgggttcatggtcttgctggcttcaggagtgaagctgcagaccttcccggtgagtgtgacagctcataaaggtggcatggacccaaagagtgagcagcagcaagatttattgcgaggagtgaaagaacaaagcttccacagcatagaaagggacctgagctggttgccgctgctggctggggtggcctgcttttcttcccttatctggccccacccacgtcctgctgattggtccattttacagagagctgattggtcattttgacaaagtgctgattggtgcgtttacaaacctttagctacacacagagtgctgattggtgtgcttacaatcctttagctagacacaaacgttctccaagtccccaccagattagctagacacagagcgctgattggtgcttttacaatcctttagctagacagaaaagttctccaagtccccaccatcccagaagcccagctggcttcacctctcactggcactagccacgggactttgtggcacctatccggagcacctagcccgggcactccagcagcctagagggagctcgtcccagacaatcaagagcaaaagacgggaagcaagaaagagatggagacccgccatcgtggccaacgttctggtccacgcacgggattcagcctctgatcaagccccagttcccgcccacgcctctccctccacacctcccggcaagcagagggagccggctccggcctcggccagccccagagagggtcccccacagcgcagcggcgggctgaagggctccttgaagacggagagagctgaagctgaggctgaggaggcgccaagagcgagccagggctgctagcaagttgtcatctctcattactagcattctctcaggaatatcctaccgcagggttcccgtgtttcatatacaattagtgatgaggctaatcatcctgatctcaaatttcctctacctgcccaccagctgacttaaacccctatactgtgggcatgcattctgcccactctgaaatcttaggatttaacttctcttgcttcctagaaaatgaaccactttgttcctttagtcatttattcactaataatttgttgagaggttttgttttgaggagcatgaaggatctgatgtaagaactaccaccggtgctggtgatcacaatatatgcagctgattaaagttcctcatttatgctacctacatccctggtaagaatttcattccttcaaccaatacttttcatttgaaagcatctcattacgaaagacttcaatcttttaggcttctgcatcttgcaaaacaaatatggttccaaagagcctatcttttcaacaaatctttggtttgagcctggatgaaacagttattacagaatcaactggagaggaaaaaatcttcatctaacactgaagtctttctattctgcgaggtgaaatcctttgacctagattctgtcccttgaaaggcaagtgacagtaggtgagcctaagaaaattggttaattcttgatctaaaaagttaaattcatgaaccacactgatttgattaccttgaaaatctaccagacagaaagttctcccttttatccaccttcattgttaccttcagagcagctctctccatagcaactgaaaacttttctgggctgaaataatcctctctagctcccagtgcacagtcaaagaattttaaaaacagggaactttgtaactgtgaaatactctccaggatttaaaaggctgtggagctccagataaagaatcgtttatctttcttctgaaggtaagcactggggttagaaatgcttgcatcatcctctgtcacttttaaattgctaacataacaaccttaaagtgttgttgttgtttttaactcataaaagtaatcccagtacctttgttactagcccacagtcatttaccagctcatctctgggccaggatcggacatgagatgctgttaacattttacatgccttaagccatcaacagaaagataatttttttttccaggaagttgattggctctaaagtcatcccccactcctttagtcaccactgagtgagtgtgtgtgtgtgtgtgtgtcatgttcttgaggtctcgaaattctgtttttctaagatgcttcctgctctagaatcttgattcttagtaaactaaaaaaaagacctgtgttttctgaacattactattttcttctagtgcttttccttgtctaaaactctttttttttcttttttcttttttcttttttttttttttgagatggagtcttgttctgtcgcccaggctggagtgcagtggcacgatcttggctcactgcaacccccgcctcccgggttcaagcaattcttctgcctcagcctcccatgtaactgggactacaggcacgtgccaccatacctggctaatttttgtattttcagtagagacgggggtgtcaccatattggccaggctggtctcaaactcctgacctcgtgatctgcctgcttcagcctcccaaagtgctgggattactggtgtgagctaccgcgcctggcctaaaacttttaaactcaacatgatgttggtcatttagtagaatttattttctctttttcatgaggaccatgaatcacttggagttctttataatgggataaacataaggtgtttcccaacctgggtcctataacttgtaccacctgttggtaaatggagaaacttacgtgacgctatgtttagtttagggagagagaatctagcaagctttttggctgctgtgcagtttgaaagtctacagccatggtgctttcctgccatttggggttagaaattacctacagacccccgctgtgtagaaacagcttgtcattgcaaatcagcttagccacccaattaatgaatcctttcaaacatgttgcaggcacaataattgaaggctttatttttcccctttaccacagaaattcctttggttacaagtttaccccataaacggcaacacactcacctccatccaagacagactcaaggtggaggaagcgtggaaatgtgcttccggacaaagctctcagtatcctgggtgccattgtttcttctactcagccgtgttttttctactgagacagacaaaccctcagcccaggatagcagaagccgtgggagttcaggccaaccggcagacctgctacaggttctctctgctggtgaccacccaccccacaaccactcaagaagcctcatcaaaacattgttggagaaaactgggtgcccacggaggagaaacggaatgcaaggagattgcaatctggttagtgaaatagaatggggtcaggtatcagggcatgtccaaaagaaagcaatggattctatagggatttatttcagtaaagcaaaatcacaggcaaatcttccaatatgcaattgagcaatgcattctggtaaaataatttccatatttgggatacagcaaatcagcattctatgtatagcacctagggacatttttgttgttgaaaggatgatgtttatgtaaggctttctagaacccttctgcatatttagaggcatttatttgtgagcgcgaacttttagtcctcttttctgattgactaatcttttcttaaagccttcagtgcacttgcacgtgactagttttagttgctatttgtttgctggagcataatgcgatctgatatttgcccaacattgggtttttgagtactttttcctggcatggtattttctaatattatgcatggcgggtagttaatgattggataatcatcttaacgatgaggaatctgagctggggagacagatgctgcaggtggagctgaagtcgcacccatggctcctgaggcctgagtcacagcctgatcttagcctacaaagcgaatctcaaccctgattggaatcagctgcataggtttcccagcatacccatgtttaggtgtcatcctctagagactgagattttacttgcctgggatagaacttttaaaagtctctccaggttattatttattttattttatttattgtgagacagagtctcgccctgttgcccaggctggagtgcaatggcataatcttggttcactgcaacctccacctcgtgggtgcaagtgattctcctgcctcagcctcccaagtagctgggattacaggcacccaccaccacggccggctaatttttttgtatctttagtaga

SEQ ID NO: 5010 - DNA, 6000 bp, Homo sapiens
gaatggagggagaggaaatatgcgtgtgtaagtctgtgtaagagcttaatcttcaccatctgaagaaggaagtcaggcatattatctgaaactgggaactaggcatgctgtttagaacagatgaaaatacaagaaacaaaaacaaaaacaaactctttatagctgtttatttagaattaaaagtgcttacctccatgattctggaatatgctttgggaagatagggggcagtggatttttttttttttttgataaaccttgtagaaatattggacttttgggcctcacacatgtatatatttaaaaatgataaaataaaagcaaagtataacagtacagaaattaaatgatgcacaagttagtggatcaaggataaatgttcaaaaattgggaaaattagtgcattgacatatacttggaaatatctggaaaatatgatatatgggaaaaattaagtttgatgcttaccagatatacaaaaataagttgcaaaaagattgaagaccaaaatagtaaaagccaacagaaaaacctttactggaaaattagagattatttttaaaatctcagtttactgagtaaacaagcacagatcataaggtgacctaaaggtaagaccaactttctgtaaaacaaggtttcataaactaagtgaaaaaaagatgctgtagcatggaagaatatatggtaatacatatagccagcaaaggattagtatccagaatatttaatcaagaatcctttaaattattaagaaaaagacaaaaagcaaatagaaaaatgtgcaagtcttaaacagtgatttcatagaagactaaaacaaataacctatacatgtgaaaataagttgactcaccagtaactggaaaaatgtaaaatcaaaccattcatcagattggtaaaaattttaagtctgatagaactacatgttgtagagaatataaaacaagaggaactgttgtacactgctaatgtgagtcaacacaactactttggggagcaaattgggaaaatctagtaaaatcgaagttgtgtcttttcttatacctcttggaaatctagagaaacattcaaaatatgcacaagatacatataagagtgaatataccaacatgacttgtaataggaaaaaaatctttaaaaaggctaattattaacagcttaatgggtaaatattttgtgtagtcataacatggaaaactctaacatggttacaatgagcacacagtaccacttgtatctataaatttaaatgagctgttgaattgacatttctccaaagatatacaaatgtccaataagcacatgaaaagatgctcaacatcactaatcattagggaatgcaagtcaaaaccacaatgatatactaattcatactcattaggatggctatgataaaaaaacagaagataacaagggttgacgaggatgtggagacatatgaacccttttgcattactggtaaaaatgtaaaatggtccagctactatggaaaacagaatggcagtttcttaaaaaattgaacacagaattactatatgatctgttaatcaaatggacctcatacaagttatttaccttcatgtaggtctgattcttcatttctaacatagggtaatacctgctccatcaatttcactggattcttataaagaccattttaagatatgcgatgaaaacactttggaacttttatgtgtacttaatttataaaagtatacagtttatactttatataatttcttttgcaccaacctaatagtgctacaaacatataatgtacatttattaaattaactctaacatgtaaaattggcagtcttaatctttatcataggcctccataataatattttctaaaatgtgatcttcagagcattgactcttgaggatcttaataggcattatgtgaaaagtgcttctttggataaaacattgggaaaacactgtgttaaataaagttaggttaggtttctgtacctttacactctctcttttgagaatatttaataggcagatataccatgtggactaaaaagacagattatacactttttcgggggagatttgtgtttcctggattatactttagcatatacaggtcaacatatattttattgttctcagtctttcagcatcattctctttttttttttaattatactttaagttctagggttcatgtgcacaacgtgcacgtttgttacgtatgtatacatgtgccatgttggtgttcagcatcattttctaaacttacagttttggtttttataattttttgatgttcattaataaaatattgagttgaaaccaaatttattttattattgttatagatgtaattacttaaataagaaaacaagtaattcattactttaacttttacaactaactgtacttaagattattttcttgttccataaaggcttttacctaaacaaaattaatttgttttaaaaaatcttgtatctatatgctttcatgaaataccaaagcatgcctttataaatatgacatttctaagaagttgaaatctaaaacactgtattgagaatgttcctagtcactgaatgatgaattattttaaatctcaaatttacgttagtatatatgtcagttctgagtttatattgaaataatacacatttttcttaaccactttccatagtttctatatagttcatagattatttatgattttcattttttatctagaagttttgcagttaaaataattcccttctatataaaaaagcttttttgagaattcaaatcattaaagtgatttaaatgttttatcctgatgattatatttttaggtattctttcagtgaacattgtatctgccattgacttttgtatgcatacatgtcatatttgatttagtatttaactttcaaagaggtgtgccctatactgacattcataagttttacttggaatatttaataaatatatgtcttcgaaattatcttccaatataaaatacctctaagttcattcttttcattttcttgttctcatatgcttaaaattatttgtgagaattctaggcaagagttatttttatttaatgaataatgttagttgagtaaatacactaaattgtaggtcatggaaaattaatgagaatttttttttgcttcctgcttatgcatagtgtatctttaattcggccaatgatgttttcatattatttgtcttagtttattcttttatttcattttttgtttttctgttttcttttttctagcttgtgatgaatggaaaatactaccaaaaccaaatcttcatagagatgtcaacagatttggacactctgcagtagtcattaacgggtaaaagaagcacatttccaatttttagagggtcacttatatcagtcatactatcctcatattctggtattctttttgaaaattatcattggtacttaatggtattggattttatgcatctcttctctaccatagaatgcattttgatttgtcaatcatatctttttttcctttcttgtttaatatatttaagggacatgggagtaggtaaaggaaaggtgctgagataagacatcagatacccttttatgtcatcctgccttcttttctttttccagagatcagataaggaatgactcttcttttaaaaagatggaactgaaatgatagagaggctagccccatatttctatcaaggagaacaaggaaagtgagaagaattagattctcattttagttctgtcatttactaaatgtgtgatttttgacaagtctcttaacctctctggaccttaaaatcattatatccattgagaaattggactcaatggtcattacattgccttccccatttaagttaatataatttttgtatttctatggcaaaaatttggtaatttggaatccagtgacagtaaacaatctgctagctcatttagtggcttaacatttgtaaatcagaatgacctttttataagcccattttattaccaccttatcctaaatatgtaaaaattctccactattgccacaaaatgacttaaccacaatgaaactgtgtaactgatatcaagtggctgtccaaacagtaatacatgaaaactgtgaaacataaaacctccagggttctctggttgatttttattttacttttttaaaataataaaagacattcttgaagacttttttgactgattcaatttattatgttaataatatttttgacatgaaaaatatgctgttttaagggcattggcactgcttggtattaatttagtattgtctaggcttctctttccagactgaatttaaaaaatctttttgattattttactcttagttttcttattttaaaagaatgaaacaccataagaagaactcggtatctaatttcaaaattctgtgtctatattgaaaagttataattctagatagcagttctaaagtgtgtcttgtccatgtatagctattatctatttttttaaaacattgttttctatattattaaaaaaatacttatttttctgacaaaggaatattgtatataatcattgtttcttttcctttcttgtattaacaataaaacatgttttgaagacttagtgttttcttaatatattaagatttatagaatatttcatattttgtctggaaagtcttcaagaaattatatagtagttcctctggtgtttttatatcatattgtatgctagaaatatgattttaaagaacagtactaacagaagtacttaaaatagtataaaatgtatatttaaatctatgcttatttttataactaaatcagtagatagggacttttaatagcgtttctttaagattcttgttttgtttttaataggtccatgtatatatttgggggattttctagtgtactccttaatgatatccttgtatacaagcctccaaattgcaaggctttcagagatgaagaactttgtaaaaatgctggtccagggataaaatgtgtttggaataaaaatcactgtgaatcttgggaatctgggaatactaataatattcttagagcaaagtgccctcctaaaacaggtaaatttctttttcttttcgtctttgtggcagcaaaatttctcttctacagaagtagaaatatcttctgcttataagaattactttagtagctacagaaatgaaaaatttgtattaccctaattaggaattctaatgtttgaacctagtgattaataatttaatacatttattagctatttttagctttatttttgaaatctgtatatatagtatatatatcaatattttatatataacattgtcatatatatgaattattttctaatataagtttaaaatgctttccagtacatcatttctaagaagtgctgttagattcaaagaaataaaatgaaataatttattttccatgtggtatttttttttcttcctgaattattgccaaaccacaccataaagtaaaaaaatgttacagcatttcatgactaatgatctggttttatatttcttataaaatggtgaataaataaatgagacttatgaaaagttaccagtcaattattaatcagttagctaattaattatttggataaatattgtttagttttttaagtgctgagagtttttatacatttttgcggttacaattaataaatgtatttttaagttttactaatctatattaattcagatgtcttttatatctttagaaaggatgataaacagtatttgttatgatgttttcttttgtatgtatagtaatacactttgttcagtaaaatatatgtaaatcctttgactttctctaaaatacgtaaatttatttattttagtttattttttgagacagagtctcactctgtcacccaggctggagtgcagtggtgtgatcaaactctgtctcctggtttcaagcaattctgctgccttagctttccgagtagctggaattacaggcatgtgccactatgcctggctaatttttgtattt

SEQ ID NO: 5011 - DNA, 6000 bp, Homo sapiens
ggtcaaattaaatgagtggtaagcttcttcacaatgtgaccattgaaattgaatggtttgttctgtacctttttgcttcagcaatcaattttctccattaagatgggacttgtactttaattcagatatggtacctcccgaatagaaaataaattatgttaatatagttgtaataataagtgtgtgttaagatttggttactataaactactgatttgttaaaacttgaggaaattaccataaaatgtctactgaatcaatttttcctgcatttagtcttaatgtcaattctgtacatttcctctttcattaagaaaaatagcagtggccaggcatggtggctcacgcctgtaatcctagcactttgggaggccaaggcaggtggattgcttgagcccaggagtttgagactagcctggccaacatgggaaaccctgtctttataaaaaatataaaaattggccaggtgtggtggcacacacctgtggtcccagctacttgggaggctgaggcaggaagatcgcttgagttcaagagtttcaggctgcagtgagccgtaatcctgccattgcactccagcctgtgacagagtgagactttgtctcggggaaaaaaaaaaaaaaaaaggataatggtggccagccatatgacatgtacctgtagtccgagttactagggaggctgaggcagaaggattgcatgagcccaggagttcaaggctgcagtgcattatgattggacttgtgaatagccactgtactccagcttggcaacatagcaagatcctgctctcttaagaaaaaaaaaaaaaagaaaagaaaaggaaagaataattgtttacttcaaatatttatgaaaaaaactctgaaatttttttaaatcaggaaataaggtaaatgaaatgatttttcaacttttgattatgaaatgtccaaacagaaaacttgcaaaaatgaacacccatatacttataacttatagtcaacatctaattgtaactttttcatgcctggttttagaatcttgattggagttggttaacagaatgagttgtcacttgttcactgtccccaaacctatggaagttgttgctatacatgttggaaatgtgtttttcccccatgaaaccattcttcagacatcagtcaatggaagaaatggctatgaacagaaactacatttctactatgatcagaagaacatgattttacaagtataacagttttgagtaattcaagcctctaaacagacaggaatttagaaaaagtcaatgtacttgtttgaatatttgttttaataccacagctatttagaagcatcatcacgacacatttgccttcagtcttggtaaaacattacttatttaactgattaaaaataccttctatgtattagtgtcaacttttaacttttgggcgtaagaccaaatgtagttttgtatacagagaagaaaacctcaagtaataggcattttaagtaaaagtctacctgtgtttttttctaaaaaggctgctcacaagttctatttcttgaagaataaattctacctccttgtgttgcactgaacaggttctcttcctggcatcataaggagttggtgtaatcattttaaattccactgaaaatttaacagtatccccttctcatcgaagggattgtgtatctgtgcttctaatattagttggctttcataaatcatgttgttgtgtgtatatgtatttaagatgtacatttaataatatcaaagagaagatgcctgttaatttataatgtatttgaaaattacatgttttttcatttgtaaaaatgagtcatttgtttaaacaatctttcatgtcttgtcatacaaatttataaaggtctgcactcctttatctgtaattgtaattccaaaatccaaaaagctctgaaaacaaggtttccataagcttggtgacaaaattcatttgcttgcaatctaatctgaactgaccttgaatctttttatcccatttagtgtgaatattcctttattttgctgcttgatgatgagagggagggctgctgccacagactgtggtgagggctggttaatgtagtatggtatatgcacaaaactacttttctaaaatctaaaatttcataattctgaaacaacttgccccaagggtttcagagaaaggactgtggacctctatcatctgctaagtaatttagaagatattatttgtcttaaaaaatgtgaaatgcttttatattctaatagtttttcactttgtgtattaaatggtttttaaattactttcttgatctctattcattataaaaatcagattataataaaacagttgaatatggcttaggaaaatatgaaggttccatgaagtggaattaagagcatagaataactgtactttccttaggaataataggacttatggtaaaggtagtattgggcaacttctttaagagtgttttcctctgagatgtcctatcaccactatctacatctaaaaaacatgctcgattcttgccctataaactgatgtcacagccccaccatccccatttttgctagtggtatcattttcctagtcaaccaaattttttagtcatcacatatcactgttcgtcatctattataataggcagtctctctcttgtttccctggttttagaagattttagtaataaacatttattgggtacctgttacttggagggtattaagctagatggcaagatctgaaacaacataggcagtatagtaaaagtgcttatctgggagtctgaacattacaagccatccaagcattgcaattattgttaaggattattttcaatggtcatgcattttctaatattttaataattggttaaagatttgttatagcgtgggggccgctgctggtgtgtggctggggttatgtcagggcagcctgatctatataatttgggcagatggtgtgagtcagaacagactattatagtgggatccccaaacttgcttttgatgcatgagttggaccactattttttggtgggtaacaacttttcagaggggaatggcagttgtgaattgtatacatttcattctttaagcaatattatgaaaaacttcagagaatgtctacagaaaacagggtatggagcaagttattttccattctttttgctttttggaagttaaaatagctaagctctgcaaatatcatttatttggaacagataaggtcccagacattcctagataataaaaatcaaatgaatgatacaggtaagtgtatttattgaagggtgtgggtagagtggtctgggaagtcttgctttaatgaagacggattgattctatttacctcttcttacttccactactaagtaaccctgggcctgcagtttcctaaccacttgacttccttgccaacagtctgtctccactttcagccgttttatagattcattggccctaaagcactgctttcccatacttccctacccaagagggcaggggtccccaagccctgggccgcggaccggaaccagacagtggcctgttaggaaccaagccggatagcaggaggtgagcggcgggcgagtgagcattatcgccttgagctctgcctgctgtcagattagcgagtggcatcagattctcataggcacgcgaaccctattgtgaactgcacatgtgaggtttgccggctccctgtgagaatctaatgcctgatgatctgaagtggaacagtttcatccccaacccacacacacccccaccccgtccgctgggttagaggactttacaaccctagtccaccttgtccagttatagttccacctctagcctttcaaggcttaaaccattaatgtccttaatttctcttgtattcatctatctcccaactatacctttttccttcccttttttatttttggcaatatgtgcccatggttttttaatttaaaacgaacagaatatgtagtgacgcctaccatagcactccttcccatcacacaagccttcaaggaaactgaagtacttactttggtctccctggaggattccctccgcctcccgccccatgtgcttagcaattctgttcctgtagtctggatggccttcataaagccctcactggaccagcattctggcacataataggaacacttaaaaaacgagagaatgatgccgttatatctaatatcttcctcttctgaactttcacagcactttatttgcaacaagtttagttgctcctgaagggcaggatctctgccggaagcaagtgcgtgccacacagtggggctccgcatacactgcaaaaggacaaataaaccgaacagctaccgtttgagagtgagcgagtgggttctctgcacaagaacaaaccaaccagtcccttgtccgaaagggcgtctccttttctctgcttcgctgctcactccagactgcgggctgtcctcttccgaagcagttaaccagcagtgtacagaaagcgacttgcctccaaaggagcctgcgcggcccgcggctaggagaattttgtcccatgcgctccccgtctcactagccgcgggccggggctacgccgtgtgcgtccccgcgcagccgcagtgctgggcgagtgggcggggccggctgttggcggcggttggctcggcgcgggagtcggctgcacgtgcgggcgggggcgatgcgtcactgatcggtgaggcgcggccgaggggtcggctttcctcgcgagcctgcggctgggcttcttctcagttagtgccttccacccgggagcgacccttgggagagggagtttcaggaagctcaccgagcaggggcggcccactggcctccgggggcggaggagttggcaaggggtcagcgggctcagccagaagggaagaatgaggggacaggggtactggactccccggctcagcctgcgagagagcgccaagtttccggagggagagggtagaaactggagggggtggacctgtcactcacgggactgagggtccttttctcccgctcccaggaggaacgagaatgaatatgactcaagcccgggttctggtggctgcagtggtggggttggtggctgtcctgctctacgcctccatccacaagattgaggagggccatctggctgtgtactacaggtgagcggcatgtgcagtcagttagggctctagagcagattaaaagggtactccagagtggagtctgggaagttgttccctctgcaacgttcgggggcgcatgtcccatctctagggagagcacgggggtcgaagcgggcttttgcggagcaccctccagatgttggacagttttagtgctatgttcgttttgttgcagagattaagtctccctacggttattcctatacacagcaaactcaattatttgtagaaaaatgaagaaggaagaaaggaagtagtcactctacctctaactgaagagatggataaattatagttcgttcaactgtacaggctttagtttgccgctgtagatgctgtatgtttatggttgtttcttagactttttcatttaaaagcttccagtgtctggttacgtcttgtaacaccatgatgactgtgatggtgcttatgtccctggacctccagggacataagcacaacactgatgggccatgctcctccctccttactgttgctgttcaagttggggacaggagtggtgtgggagctgttgctctcttgttgagctcgcttagcttttccttcagcctaattaccacaagttccttttgatacagactagtaagagaggccagtttgtggagaaattgggataatggtgtattcaaaaagagcgtcaactttttgcttgtttccactatccctcaaaactgatatttctactttcaaatccatcctgaatcctagaaaaagagcaattttaatggtatatcttagcagatggagctctacataagaaattacagattagtccagatttccttccagtttaaaagcattgtctttctgacagtaaaacca

SEQ ID NO: 5012 - DNA, 6000 bp, Homo sapiens
agctctggggatagtgggacccttctacaaatccaagttcctaggtgccaaccaaggacgagtttacaaaaggcctttctaaggattgcagtatcagccctgctttcttaactcacttctgtacaacttacttttcatttatgatagtggaagttctgaccagggaatgagttgttgctgttggtagctcacttttccctcctgaaatttttagtgaatttctaagatgaaggaataagcaagagtaatcaatttaaaatctaccaattgagtcctctttggtgattgtcaaccactgaagtggcatgtgaggaaactgatgggtcctgctttgtctcaccaccagtcatttaaatagcgaaagtaccattgaggtgaatagaaagtgcatagttacaagcccaagtgttcatgctgtgtatatttcaaatacttttctatgagcttctctctctgtctctctctctctctctctttaaatccaaaataacagtgaggctgagatccatggaaatgaagtttagttatttgggaatttgagtaaagatttactgaacatagaaatttgtttttctttgagaatgaggatacatattgagtaagagccctgaattaagatactagagatccagattctccatttattagatcaacatattttacccagtagttgtttatccagtaaataagtctaataagttacccagtaaaaaagcttatccatagttaagtaatacatttagtgggtaaacttattggataaacagactatctgcttgtcatcttcgttccttaatttctttattagataattccttgcaatttttttcccacacaaaagggaagaaaaggcagtttaagctctgtaaaagaatagtactgtggaaactttaggtctaataatgattagttttgtttcattatgaatacaatgtaaaaaaaattgactatcatgagatctgttgttcttggcttaaaaaacagatcaaatagatgaaaacctgaagcaagctctgcagaaagacttaaacctcatggccccaggtctcactatacaggtaagttcttttcctagggaagttctctggggattttgagagctttgagtttgttcctcctttcattggattgttttattcagcaattatttgagatgctatggtgatttatagaatacctttctcaatttgactttagatctctgccaaaataaaatactcttgtagcttactatgggtgacatttgtgaactcctagagggaactgataagctgaggctcttacaaggaagtaaaattcatatttctgccatgtatgaagcattaagatacagtaatggttataaatcagtgtaagcataatccctgccctcagtaagattatgaaaagggagttcaagtgtaaaatttgaacaatcctggacaaaatagttatcacaaagtattaattgacagatgaatctattgaatgattattgctgtaagagtaagagaacattggaagacagtgtgtctaggagagggctgtgattgagttgagattttaagtaggtttggaaaaattaattggatttaaatgggggaagaatgagaaaggtatttcaagtgggagggacagccctagtaaaaacaaggtagcaggtgaatttagtggtagtggtgatggtgacgttgggaaatagaatggtgagaggttttacccctgcttttttttgggtcactgtgttttccagattgtgggttgtaaaatcaactttagtgagtcatgaacagcattttaaataaaatggaatagaataggaaaagaaatggtatgtaataagtttaaatattctgtgacacttgtgtttcacagtgtggcggggtaggtgtttatattggacgtcagtgcaaaatgtgtttcttactgtgtccactgtcagtaacattcgaaagccactgctctggatccagatgacctaagaagttatattgaggcttctctagtgtcctttctcaggagctctaggagaccagttgattgttgattgttgtgatgaacattactgcaactaaagcttatcacatgtctctcaattctttacactcagcaccactgctactgagagtgtgcgctcactgtgattgtatgtgttcgtgcttctcaaaaacaagactgaaagataggtggggttttcctcatggcctcattcatgcaatgtcattatctcaggcgcttgagggtgagccaccagagttaaggggtcgtttgaaatgtccagaggtaactttgtaaaatcctctgagttgttcaagtcagttgtagctggagtagctttttagttttaaagatagtgaatgtgaaggtcagctcttagattctgcccagggtgttactcagagatctagctcattcaactgttgtttagaattccttgccttatattacttagccatttttctgttcccagttttttgctattaaacaatagtgtaatgaacattcatgacacatgttcttgtatgtacaaattatctttcaaactgactgtacaaatgtacattcttaacagcaatatgtgcaaataattgtgacccatgaactcaccaacattggaagcaatcagacatactgattgttaccatatggatgggtgggcaattatatctccctttgatttgcattcctttggttgttaatgaggttgaacatcttttgatacatttattggtcatttatactgtcttctgctgattgcctattcatatcttttgcccatttttctgttggattgttttctttcttactgatttgttctgtataaatttggaatttttatacacacacgttatttatgttgtagaaaaaagttagatactaggaaaatgatgaagaataaaatgaaattcaccagtaatcttattatgcagggataacatcatttgttatatctttctcgactattcttaatgtatatgaacaaatgtttgtagatataaatgcatacatgctcaactaaagcagaatcataccatacttgcttttttcactaacattgtctatgaacatctttccaaaacaaaaatataggtttggtaaatcattacttttaatggttatatttagtgaatctctatggtttcaaattttttactactgtatgcatgttggaatgaccaagcttatatattctgtacatctttttaaatccctctcttacaataaattcttgaagtgggattgatgatcaaagtgtatgccctgtttgggggcttattgatacatactaccgaatcaccttttagaaaaattttagcagctccccccctcattagcagtgttggtaagctgtagttcttacacatttgattgcatgattgtacccaaataattagcagatgcaagctttccctttctctcttaatccttttggagaaaattagtctgttattttgtgttaattattgaagttgaataccctaggttattagctgtttttatttcatttataaattgttggttttgctcatttttgtagttaatggtttttctaactgattttaataagctatttttggctgggcatagcggctcacatctgtaatcccaccactttaggaggctgaggtggaaagctcccttgagcccaggagtttgaggtcagcttggacaacatagtgagaccccttctccacaaaaaatttttttaaaaaattaggtaggtgtggtggcatgtgcctgtagtcccagctacttgggaggctgaggtgggaggatgacttgaacacagcaggttgaggctgcagtgaactgtgttcatgctgtactcttgtctgggcaacagagcaaaaccctgtctataaataaataaataaatagcatttgtatatagagaacttgtttttgaaccttaccctttgagaggggtagaattcgtttttaaaaataaactttttcatatgttagttattgtagctcttttttatatttataggaaacattttcttcaaattttttctttgtcatttaactttgttttttccttgctgataactttgaagtgttcatgttttacatagtaatttcagtgattttgtctttatggtgtgttgctgagctggcatgttttaagagcttttcaccaccttaaaagtatagcaattaaaattagaaattataaaaattgtatctgcttttacagttgtattcttagatttaaatcttttaattcatctgcaacccattttgatctcagttgcaaggtaggccttcagctccatcccctcaaccccaaattgggtaacagcggtaattactgaatagtttatttttccatcttcccccttctttgaaatagtttttatgttacatactgcattccattatatactagagtctttttctgaacttagttctgttccattgatcttcccattcctactctttcattagttattgagtccttggtcttttctcatcaaatcgaattttctcctgtgtttttcatcttgtcagttaatggtaactctttcccctcaagccaatctagaagtgtaggaggcatctttgacaatcgcctcaccctcagcatctaatcagtccctatgtcctgcagattccaccaccaaaatccatgtattaataaaactgaccacacctccatcttcactgtcatctcaagccaagctaccaactctaaccttgacatgtgcagtagcagtagccgcctgtcttctttccccactttcacttttacctttgtctacttcattttctgcacaacagccagaaggatcttttgaatttacttatatttatttgctgtttttataaaaagttattgattgaaaaaatgtagttttgttatacgttcttaaagtggtagagatctccattgttttagggtttaaaaaaattttaaaataatttttatattttgcaataacttaagcataccctgagaagagaagagctcctttgctttggttgcttttgtcttgttataaaattttttttacaatagttggaatgcattttaagaatttcaaggctgtttttgagctttgttatttttaacacattaccatatggttgtgataattcaactttttattttaaaatctggcaagagacatcatcttttaaaaaataatggcctttgctgtttctgccagcttaatcttccagatgagttttcattatcgatattttcaagctatatcaggcacctaagtggtcatatacatgttgttttgttttgttttgttttgagacagggtctccctctgttgcccaggctggagtgcagtggcatgatcataggtcactgcagccttgaactcctgggctcaagtgattctcctgccttagcctcccaagtagctaggagtacaggtacacacccccacatctggctaatttttttattttttgtagagatgggcctttgccgtgttgcccaggctggtctcaaactcctggcctcatgcaatcctccaatataagttaaaaatagaaacatagtttatggctttactttatcatatcagcctttttggtttttagaatttctgatttaggggagaaactcatatcctaagttaaattaataccaatggatttaatgaattttaatgctgttcaatatgtagtcttttttttttttaatcattgaggaatgtgattgattcttggtagatttatcttatatctacaacttgaattcactgccttctagtaatttttgggttactatttttacagtcactattatatttttttcctttccatatatttatataccatttttcttcttgaaaaactactctggcaaattagaatgatgaaaatggtcatctttgattttttttttcctatgttatttaagggagtgactatattatagactggcttttgatatataatatatgcttaaaacccaggggtcagtttcaatacatatattcctttcattagccatttttttcctccattcactctatgtatgtgagtgggatgggg

SEQ ID NO: 5013 - DNA, 6000 bp, Homo sapiens
tgctatcaacactttggagatttgcagataggtaaactgagtctcaaaagcgacttgttcagaaccatatactagtaagttgctgagccctgctaaacccagggactttattcacatttttttgtttgtttgagacagagtcttgctctgttgcccaggctggagtgcagtggcgtgatcttggctcactgcaacctccacttcccaggtacaagtgattctcctgcctcagcctcccgagtagctggaattataggcacatgccaccatgcccggctaatttttgtatttttagtagagacagtgtttcaccatgttggccaggctggtctcgaactcctgacttcaggtgatctgcccgcctcagtctcccaaagtgttgggattacaggcattagccaccacgcccggctgacactgctttgtcgatggcatcgacaagaggaaaagtcaagtgccagtaggagcttggggacatggagaaaggtactggacacaagataatcaggagatgccacttgattaccacagttgcaatttcttgagcaagtttaaacatcataaggatgcagagaactttttgagaacatttctcaagccgtgttgcataagctgtgctcctggggccaatacgggttgatccacacacatggggaatgcttaaccctaagcaggagaaagcaatcggattttgcccaggtaggtgaccaaaggtgaataaagcagtccactggtggccttgaacaatcagagatgtgagacttgtcacatgatgaccctcctttagcacagtcaaacccctgctgatcacaagcctcctccagaatccaaaattacccaatgggaaccatataccatctcctgttgcttttcctgcttctctggaccatactgttagcttcctgctcatcaaccctatcctaaggtccagttatgcaaggcaggggtctttttgcaattatttaaaaggcttgtaggtgagaggtagtggctcccttttcctttgtcatcagcttatctaacataaggtggttgattctggtacagttcttcctcctttttcttttttttttctggagagtttccaaatttattgcttatcaatggactcatcttggaaattgagctgtaaaacaccaggatagaggatagtcttggttgccaaatctgttcccccaccagggcagtgttgtatacttccaaaactttctaggtctcctccaaatgactcaagggatgggaatttcaccacctctcatgggaggttgttttatagcctcttacatcttacccatgatgaaagttctgatgaaacatttttttcccctttggttcattcattacccttagataatcccctaaagagcaccttcacaatccctctccttctttggggcttatgccttcaactatctgcacatggctgtcaggaccccatcccacacacatgcatctgcacatggctgtcaggaccccatcccacacacatgcacctgcactccttagctcttcagccaggcctacccacatacagttcttttcatctttcctcatacatcaaaacctcaagtgaattggaagcgggattatggctctcttctcaagattttctcacgtcagctgcatcccttctcctcaaccacatgccaggtttgtgtatgccaatagccattcaccaatggaaatgaggtttttctggaatgctgtgttctatagttaaaaaaaaaaaagattcctcctacccatagcttatatctaggttggatcaatatttatacaaactataataaggaggaaaaatctaaaagaagtctgggactaccttaaatctccaaccccccaagaaacatttaaactacaaataaaaatctcaaaataatatatttcccttaaacataggctatgaattaataaaataaattcaatcaccttttggtaaaggaagcatgaaaagattgactactcatttctttatggatgaaaaattagcatggatgagtgccccaaatgaaaaagaacccttccttttcttcttattttgtcatttccttcccactgacttggtcagaagccacctccttttgttcttcaaccactctgaatagctggtagtttccatggtctctgaagggattcacgcacaccacagttctcggcggcaatagggaccaccagaggtcctcaccctcgttatgcaacctcaggccttccccctcctctgttttctcccaactgcactaagggccagtcttctacaaccctaggggcatcacagacatcttcagagccccaagaccccacctatcattcctatgcttagaaggaacctcttcttttccaaaccttcccatccaaacctgatggggctcttccttcccaaacctcgcccatccatcaagatctagcttctgtttcatttcctccagaggaagcttccttttcccctaaacttcataatgtttagtgtctataccattaaaataggctacctcacattattcatgcctccatttgctgctgctgcttttttttttttttttttttgaaacaagctctttctctgtcaccaaggctggagtgcaatggcatgaacacggctcactgcagccctgacctcccgggctcaagcaatcctcctgcctcagcctcctgtgtatttgggatcacagacatgcattaccatgcccagctaattttttgatttttttgtagagacagggtctcactttgttgcccaggctggtcttgaactcctagtctcaagctcggcctcccaaagtgctgatgttagccactgtgcctggcccatttgctccattttttaaagttttattttatttttaattgataaataataattctatatacttatgaggtacaatgtgacattttgatacatgtatacattgtggagtgatcaaatcaggtgaattagcatattcattacttcaaatatttatcatttctttgtagtaagaactttttaaatcctctctgttagctattttgaagtacacagtacctcattatcaactgtagtcaccacactgtgcaacagaacaacagaacatatttctcttgcctgattgaaagcttttatccatcgaccactctcttcccctctcacacacccctcacccccagcctctggtaaccaccattctactctctacttctacgagttcaatttttttagtttccacatataagtgagagcatagggcatctgtctcattatgcctggcttatttcacttaacataatgttctctaggtttatctatgttgtcgtaaatgacagaattttctgtgttttttttttcaaggctgaatatattatattgtgcatatataccacatcttttaaatcctttcgtcagttgatggatacttagattgtttccatatcttggctattattaataatcctgcaatgaacatgggagaggagacatctattcaacacactgatttcaattcctttgagattcttggaacatatggtaattctatttttagttttttgaggaacctccatactgttttccaagatgtccgtactaatttacaatacagccaagcatacaaggggccccttttctccacagccttgccaacacttgttatctttctttctttcttttttcttgagacagggtcttgctctgttgctcaggctggagtgcagtggtgtgatttcagctgactgcagcctcaacgcctcagcctccccagctcaagtggttctcccaccccagccacctgagtagcagctgggactacatgcacgcaccccatgcctggctaatttttgttgttttgttgttgttttgtagaggcggtgtttcaccatgttgcccgggctggtcttgaactcctgagctcaagtgatcctcctgccctggcctcccaaagtgctggaattacaggtgtgggcaaccacacccagccaagatctctttatagggacactcaagactgattattttgacaaggctgatgttttgctgaatgtgaaggtgggcttcaggccagtgagtagccctgggtggggagccaggagttaggagaggaaagtctctgctctagcctcaaggaggagaaactgcagggtgaccaccacaacctgtgggatcagccccattctggggcatcatgcatgcctataggggagctggagcaggtgatcagaagctggagcagggcataggcagggatgtgcttgggggcccatgacacagttttaattcagagacctgcagttataaagaaagcagattaatcctgatatcatggatagttccactttgtgctcaagtttacgattctaggcccaggactaagcagagccatgggaaaaggttcccagctcagctgggtccagatatccactcccctttagtcccacatcatactgtccttgtcctttgttctccgatccagcctcccaaccaggtcttagcctttttcccatactgagccccacacccttaaggaaccccctctcttggtgtatctcacctgtaagccatggaaaggcaagcttcagaacaaggaatatagacaacctaggactctgtggtcctctcccctgccccctcagtgccctgaagtatgtgagactggggttcctcctgccactgtcctttccccacggctgagagggtgaagtgagggaagggagctgcccatctctgctccaccaggggacagctgaaggtgagacaggacaggagcctcagacccattgactgaacctgggaggtgggcagagcctgggagggggacagcgctcttcagctttcctcccagccttggtccccaccccaatccatgtcggcccttttaggagcttttagtggaaatgagctcagacccgcagcacaggcccccggctcccctcctgtctcagctcctcccattgctctttgatcgtctcttctgtccgacctctgggccatctctccaccaggcacatctgcgagcagcccccttcatccccagcatcgccttttcctcccgtttctccttccactcccagctccacatcctcctcctattctcccctctcccctcttcaaacccccaccttccagttccctcacctcccctttcggctggtcccctggggcttgcagcaagagggagagagagctcctgacaggattgatggtccttccccaccctgtcctctcatccgctccctccccagcaggcacagacatccccctacaaaaggcaggagcccaggctgtgtggaaacagctgctctcagacgcctttccatttgctctctgctggctaggctgggctgtgcctctgctccctcttcctctagctgagagtgggcacctggggtaccgggcccccccacctcattccccatgaatgctgtgggaagtcctgaggggcaggagctgcaaaagctggggagtggagcctgggacaaccccgcctacagtggtcccccttccccacacgggacgctgagagtctgcaccatctccagcacggggcctctccagccccaacccaagaagcctgaagatgaaccccaggagacggcatacaggacccaggtgtccagctgctgcctccatatctgtcaaggcatcagaggtaccagatagggggacagttctcctgggatattagaatcaggaggagtcaccaaaagcttttgggcagggggtgggggtggaatgtgatctgaagaagaggtgacctttcggtgtcactttggggtgtatgaattgcccatggtagtgctgcatgacccagaacacagaggccagctgagcggtctaccggttgtgggagcctggcatggtcatcacctggggatccagagaggtatgtgggagctggtttgagggaggacatggatgtgatgatgccctagactaccccacctggaacaggtgcctcctttccatgccttcattctctacaagccagggccttcacccctgtcgacctcagggagctgatgggaagagca

SEQ ID NO: 5014 - DNA, 6000 bp, Homo sapiens
tggagctaatgagctcaagtttcctgctgtttgccatgctgccctttcctctgcttccttcctgatgacttcattaagtttcctatagcatagcagaaattgaaggaaagctcctgagactttggggcccagggcagacacactctcctcctccttcccctttttgtttctcaggcaatctacacagctatttcctgtggggaaatctccttgaagagtctgccagattcctcttggaaccctctcagagtagggacttgggccctctgaccctttctctacaggcttttaccctgctgacccaggcaacactgggttagggttctgtgggtagagagtatgtgaggtgagcagtgggcacacagcaaggatacgccccagactttcctctcgagtgggcaggcatctttagaaggagtgctagactaggagttaagaaccctcggccctgctcccaagctgggactcactagcaatgtcacctggccctggccattgaaattggcctccttggatcctactcttgccatctgtgccagaaaaggactgcatctctaaatgctccttctaaccccaaaatgtaaataaatccaaagggagagtgaagagactagaaacacatctaaagagaggtggtgctagagcatgagtcttctggcctcagtttctcctcctccatcagatcactgagcagcccagtcccccttctgcatagccaaagcagagacagatgtcagcctcagccctcctttcttgtctgtgcctgcttctacctccccaggagcccagatgctcttcttacatcctccagagtttgttcctgtccacccctcttctctccttccctgctgtcaaggaactgtttgctcatttgcctgcagggataatagctgttaagggttcatttcctaagagagagacttctagtgccccgtgtagcaggcactgtcctctgccgtttagaactgactctctcctgttttctctctggctgcgccctcccaccttccccaactaccctttcccaggttcgatccattagcaccaacgtccggagaaacctggccttccacacactcagccaagaagtcctgctcaaggagttctccactatctcctgaggccacgcctacctgagcagcctctgactgcccttacccatgaggatcatgggctggagggggagcgaggggagagggggctgcccccgaggttggagagaaacacagataccaagttctcttggtgaagaccgcacttcaatggagcttgggcagcaggggcaggagggtcaagccagggataatcttatttggggaggaatgggtgggcacagtggggagaggcctccaggaatgtggggacttccagagtgggctccctaaacagcccctcacatttccaatcttgaggttacaagctgtagctactgactaattttcgggagctggtgaggcaagcctcagggtaatgccagcaccctgaaagtcagtggctctgctcggcttctgaaaacagatcaactctcagatatagctggagctacatcctgcttcctttgggcctggggctgtgcttggcttgaaatctgtgtcccctgcctgcactggcactttgtccagtcatcgggacctttggctcagatttagggtaagataggaatagggtacctttttccttttttttctgagacggagtctcactctgtcgcccaggctggaatgcagtggcgtgatctcggctttactgcagcctccgcttcctgggttcaagcgattctcctgcctcagcctcccgagtagctgggactacaggagcgtgtgccacgcccggctaattttttgtatttttagtagagatggggtttcaccatgttacccaggatggtctcaatatcctgagttcatgatccacccaccttggcctcccaaagtgctgggattacaggcgtgagccaccacacccagccagttttcctattttctgaattcagaattgacttctctgggaaaactggagatgagaatctgcccagtgctctgctgtccagtcaccgccttttgaattttagttttggcaccaggagtaccgttagctttccccttcttctggcccatttgactcatcagcacaatagggtcaccaccttaacttttaatttctaatctgctttactgtctttagggtgtgtatgaaataaacattgacaggctttctggagccctcaaggtgcctactttgctggttccctttccagcagctcccccacctcccttagccccccctcctctggcagcctctcctgcctctgctgagctcccctccacgtgttccacccccttaccctgctgttgtttacatccaacctgcctgagaatttcctctggggaggaatctattcctgtcatggtctagtgcctgggagggagagaactttctgggggtagggtgccctccatctgaaacaggccaggtgagcatcatgcataaggcctccattctgtccgctcagattctgggtggggccacaggcaaatctcctgacttatggggagttggcttgtggttcctcccttggatagcctccatggaaccactataggctttcccaacagctgcctctgaaatagctgctgcttcgagatcctccctttttaaagcactttctaaagccctcaggatggcgggagcaaacagcactggtatattctaggagtaagtgcaggaattcagcagtgagagcatgtctgggaccacctggactgccatccatttaacctcaaatctctttgggatactcgccctccctgggaaccagagttctggctctaacattgagcagctatgcactagttccagagaagccactaacaggctgccatgtgtagatgtaggttcttaagagatcacaggctgggtcatctgatcactggatggatagctcagcctggggcatttagtgttttccctggtgataaatccccaaggcagctggatttggagctggtggcaagttgaaattattaaaaattgatttgtgtgggactgtctttagtgttgctttttttttccttaatctctgttgcccagactcattcctcaaagatagaggtaaggtaatctcctaggtgctgctgccatctggctaggggacccctacctgcccttgtgaactctcctccttcctctgagtctcctggccctagtagaggtcagttgggttcggagagctgtaacctctcttgtcctctgggtagaaggagggagaagagagttagttcccttatctccaaacttagtggtattgaggaggcaagccaacccatttggccacttacggattcctgccagcctttcctccaagtgaatgaggacaggtctagggcatggggcactaagcagagggctccttgccctccattgtaaaggcccttctcttgaccagtttattcacatatacctatcccagaactccaaacgagagtgcccattctctcctggaaatcaaccttaacaggagctgcccaagcactttctatgcccagcctctataccaggtctgtggagcctcctccagagccaagggagatccaagcgcagggcattgctcctaaagacaatcttaccctcagccacttgtccccctcttaggcctgaactcccgccacaattcctgctgggttgattaaatcaagtggttggaaattaaagccaattgaagagattaagtgtgcttgagtcactttaaagtttttggtcttaacaggtcactcctttggacccaccagacaaggtcccctcatcctcatagcaacgggttggggggcttttgggtgtggagcccaggaagcatcctgaggaaggtcagacctgtgacgctcaaaacactcaggatccattcctgggagatgaggcagcccagcttccgtgctagccctgcctttggaaaggagctaatcttaaggaaggggtttcataacaagggcatttctttcctactctgtatcctgacttggatccccaaacctgtcagttgctccccatatctgctggaaaacaaggaatctaggacaggacaggtgacaaaagagaagggcagaaaagttgctgcaggggaggaacaaaagagcaaggatgtcttgagaaactgacctggttcactagtttttttatcttcctagtcggcctatggggttcattagatcagtgaaggaggcaccctgagagtgaataggttccagagacggggtcctggagtgggtgagagttggggtccttctggaacttgagagaagatgaaacagtagtccattggcccacgatgagcctgctaatattagaggctgggttgactcttcctttgcatccctaacctgctttaagcacggtggggactgtctgggaccacgagagacgcatacacgggaggaggaacaacagagaaaatacaggctgacatggagacaaacggagcggggactcagatatgataccccaggctctgcctcagccagaactgtgttgacgaagggggacggggtgcctgagaattgggggcggggtttcctcctctcagtggggctcttctgtcccgcgctctcctcctcccccaccccccccccccgccaagccccgtgacttctgctttaggggcagattgctggggagctagtctccttccccgcactttgcagttcaccctttcaccgggtgcctcccccgggctgcaaagggtggggggcgggggtagggggagccaatcccggcagcgccaaagaggggaggaggcggtgacagccgcggggagggggcgggaggagagaggcagctcggctcggctccgcgctcagctccgctctgcctccggctctgcgctcacctgctgcctagtgttccctctcctgctccaggacctccgggtagacctcagaccccgggcccattcccagactcagcctcagcccggacttccccagccccgacagcacagtaggccgccagggggcgccgtgtgagcgccctatcccggccacccggcgccccctcccacggcccgggcgggagcggggcgccgggggccatgcggggccagggccgcaaggagagtttgtccgattcccgagacctggacggctcctacgaccagctcacgggtgagtcagtgacgtgggggtcgcgggagggagggtggattccattcctccagacccttccgcctctccgaccccggcctggcccgcacccacactctgccccattcccaggcactcttatggccggtctgggcggcaggacactgggggttcaaagccttgggtcccgcaggggttggggaggaacagaagaggcaggtgtggagaggcagcaggtgtgggcgtatgtgacacagggctgagagggtgtctggagtgggaggtgttacgtgcgtgagcacctgtcattctgtgtgtgtgtgtgtgtgtgcgcgcgcacctcccacagctggttgccatgtgccctgggcttggtgacagctagggtgagtgtgattgtatgtggcagtgcaattgtatggtctcgtcagatgtttgagtttgcgtaggaccctggttgtactgatgaagttgttttgaccatgtgtctctatgtgcaacgatgtgttgtgagtgtgtaattctgtatgaagtggtgtgtaactaccagaatgtgtcagggctctactttagggtggcttgtctctttgtaagccttcatgaccataagccctctgggcaagaatttgttaaagtaggttgtgttgtgttttgtggttgtgagattagtgttcagtgctagttgtgtactttcatgtggtgatgtctgcagcggggctctgtgagtgtctatgacgtgtctcatccctgctgcctctctggcttcctggtacagataggggtctttagtacaccccactccttcaccaatttttccacaaatagcccaggtggacccaaggagggactttagtgttcagctgcccag

SEQ ID NO: 5015 - DNA, 6000 bp, Homo sapiens
tcctctttctagaattttgccttcccagcctccacctgttggctttctaattttggtaagtcctgctttcaaactttagtgcaagtagctcctccatctgactgtgctcaaggttctctgtatttacatcttagaactgtacttgcaggagccgagtgtggtggctcacacttgtgatccagctacttgggaggctgaaatgggaggattgcttgacgtcaggagttcaagaccagcctgggcaacacagcaagaccctgctccccacaaaaatactgtacttgtgacatcttgagcttgtctttcccataccccatcctttgttggggccaattctccatggtgtttctacccatcttatggcagcttttgtctcagactatctttccaaggatgtttacttagcaaacagccttggaagatagtatctctctctggggcagagaaaagattttatttcctgagcagtataataatctccccctcagggattgtgaaccccgaaaatttgagaaatttcagaatttagaatttaaatttgagaatttagaaagtttattttgccaggtcaggcatagtagctcatgcttataatcctagaactttgggaggccaatgtgggtggatcacctgaggtcaggagttcgagagcagcctggccaacatggtgaaaccccatctctactaaaaatacagaaatcagccgggtgtgatggcaggtgtctgtaatcccagctacttgggaggctgaagcaggagaatcgcttgaacctgggagacggaggttgcattgagctgagattgtgccacttcactccagtgtggcagtgtgggcgaaagagcgaaactctatctcctctgtctcaaaaaaaaaaaacaaaaagcaaaaaaaaaaaaacctggcgccgtggctcacgcctgtaatcctagcacttcgggagaccgaggtgggcggatcacctgaggtcaggagtttgagagcagcctggccaacacagtaaagcagccatctctttagtgtggtaaaattacaaaaattagccgggcgtggtggtggcgctcctgtaatcccagctactcaggaggctgaggctgaagaatcgcttgaatccaggaggcagaggttgcagtgagcagagatcacaccattgcactccagcctgggtggtaagagcgaaactcagtctcaaaaagagaaaaaaaagaaagtttattttgccgaggtcgaggacacttagccttgacacagcctcaggaggtcttgacgacatgtaaccaaggtggtcagagcacagcttggttttatacattttagagaaacgtaagacatcaatcaacatatgtaaaataaacattggttcggtcaagaaaggcaggacaacttaaagtggtcaggaagggcgggacaactcgaagtggggagagggcttccaggtcacaagtaggtgagagacaaatggttgcaatgagtttctgattagcctctccaaaggaggcaatcagatacgcatttatctcagtgagcggaaggatgactttgaacagaatgggaggcaggtttgccctaagcagttcccagcttgacttttccctttagcttaatgatcttgggggcccaagatattttcctttcacagtatgaaggttgggcagatttgttagcagctccttctaagacacgtggttttgtaagcttagggttccttggctgtgacacgaatgcatgctgtgcacagcatccacctaagctgctctggcatcatccttgagggacacagaggacagggggaattgaggcaaaacacgaagcttacactgcctgctgggccacaagtaagagagtcttttgtccttgacccatacgtctcatgtcttctgctagcatctgtgagcctctgaaactatggcagactaacttgatagtttgcaagtagggtaaacttttggaccctcccctgttcttgacatctttacacacacttgactgttaagtgccttgagagtagggactgtgtctcagtggactttgcttaccctgtggatgacacaaagtagttgcttgtggtaggtagtaactacctactaatgccgctttggtctaaaggactttggatgtaagcactcatatttatttactaaattcagctctggaaaaaactgccattattcccctgtttagccacagatcttcttcccctggtcattaggtattgtgtacattccttgggtttgcagaaggtgaagccacagagaaagtgaagtgcagggggctacaaattgctacagaaaattcacattgtgaataagccctgctgcaggtagtggaggtgactcatttatcagactgggtgtttcggggaggtagggtgctgtggtgcagttgggatggaaatgccggtctttgttgttagcctcacaataacatcaaacataccagactatttcccagaagagccaggatgactgcaaaccgacctgtctgagctcgaatgaaggaatgaatgagggcttctggtgcctgatgtcttagaagtaaattctgctaaccttttgcaacatgagtaagcccagtcatgaccaggcaagacagctggctgggcttgctcatgggagggaaatcttccaggctgcagctttcatctgggttttgaactgtggaagcctatccttttctggtttaggaggagggtagaacgttgagagcatttgagcagacatggctttcagagccagagaaagtcaagggggaaaaggctttgctcagagactatggctgatggctattaaagatcacttcgtttcatttgtcattttatagattaaaaaaatgaggtaggccgagcgcggtggctcacacctgtaatcccagcactttgggaggccgagactggcagatcacgaggtcaggagatcgagaccatcctggctaacatggtgaaaccccgactctactaaaaatacaaaaaattagccgggcgtggtggcaggcacctgtggtctcagctactcgggaggctgaggcaggagaatggcgtgaacccggaaggtggagattgcagtgagccgagatcgcgccactgcactccagtctgggcgacagagcgagactccgtctcaaaaaaaaaagaagaaaacccaaaaaaaccactgaggtctaccggcgacattattggatagatgactgctttgggagttccagttgaacccatttctatttcattagactgctcattttttctttttcctttggctctgttaaaagaaaaaattacaaagaatttagtttaaacatcttaactggcttttagttccaattctacaattgggcaacgcttcattctgtaaaatggaatgaatgttccaatgagaagaggaagttggtattacagacagaaaaggaccgaggaaagcagaaacaaaaagtggattagttggtagaaagttacttttcttgtaaaggttaaagaacacgggacttcttcatgccagctaaaactgacctgtttggggatttttgttttgagacagggtcttactccagcgggcaggctggagtgcagtagtggcaccatctaagcttactacagcctcaacctcccaggctcaagcgatcctccctcctcagcctcccaattagctgggactacaggcgccagccaccacgcccggctattttttttttttttttttttttttttggtagaggcagggtattactatgcctaggctggtccggaactcctgagctcaggcgatccgcccacctcggcatccaaaagtgctggtattacaggtgtgagccaccgcgcccagcctgtttggggatctggctagcatctgtttctctcctgatttcttggaaggtcagataaagatcctagctttggcgtggtagtgtgaaacttcagcatgagtaaccccattttggtttggtctgatgggcctaatgcaggaggtcagtctaaactaacggtctcccatatacattttatctaatagctctgtcacccttcctgcacacccggggaactcgggtgcggcattctaacgcctgctcagcatgattccacattttctccaggcccataatccagaggaggttgggcccggagcaggcttgcctcgccaagctccggctccgtgcgtgtgtgaagcagtgccatgcctgagtggggaggagccgcggaagagaaagcgtaaggcggcgtggaaatgggtggggcacgctaggacccgctcacatttgttcagggagaggcagtcccaaaaagcctctcaggcacacaacccagcacagcaaggcagtcacaccaaggtgggaaaagagggcagaagagcgcgaggggctggaggtggcgcccctgtgtcccactcgttctccctgggctgggaaagagaagcggtccctcagaagcgcaggctgcgctagcttaggatggacgtgggtaacgctcagctgactccccgcaggcaccctatgcagggctttgtttcgggggggaacccgcaccagcgcgtaaggggagtaggagagatctacgtgaccctggtgcgcagccgcgccctatcgccccggccacgcgccgacgccccgccccgtccgtgacgcgttcgcgcggggcctccgccccatccccctcccaggcggtccccagcgcgctgcctccgccgttccccgccccctcgcctctgaggctgcccggatagctgcctgatccaaggcccagcagcttctgccttccggatccccaccgacggacggaggcagcccacctgcaggaccggggcgctgtcggtccacgtggccgctctggagcaggttggagttggcagcgggctgcgctgcagggacaggcgcggcggacagccccgggggcagcggcggggtcctgtctgggagaggacagggttgcggcgggcggaacggtgtctccttcacttcgccctccagctgctggagctgcagcccgaccgcgagcgtgccaagcggcttcagcagctagcggagcggtggcggcggcccccctcaggacaccaccaggtaccgccgcgcccgcctcacgccgacccaggggcctaggccgcggcggccaagccggaggcccgcgccggactcggagtcggccctggcttcctaagatggccgcgctgccccgcggcccctcgcccctctctgcccgggatctccctttggccctttgaccccagcttaccgcacttcttgtccctcccgcagattcccctcttcccgcggcctcgccatggcgacccacggacagacttgcgcgcgtcgtaagtaaagctgggatctctgcgggatggggcggcggagagtcgaagcctgtcgaccagaaacccagtttgtttccccctatctttccaagaacttggaaattcggctgcttttggtggtcgccccaccgtctgaccacctcctctgcggaggaggggctgggctgctggatttcaaatggggaacaaggcccggggagttggtctgtggccgcatggacttttcagcctttgtacatgtctttgacgtatagaagtaaaaagttgttaattggggattctgcctttggaggatcggatcaatcacttttctagaggaagtagcagtccctcttgtgagagcgcaaggtcattacttgtgctcctaagggcgtggacgtgctttgtggaatgaatgagctggtgtaatgagctcagattgcctgcccttaagcagcacagcattggccgaggacttgagagtcacattagtaagtttgaagcgctatttgatatttagttgatgtagacatttgagtgaaacacacatggcagtattttttccaagtttcaatatttaaattcccagtattaaattctcttcccactccagggtgttggttttcccctcagcgaagatattaaaggacgtatcagggtaaagggcctagtcttaggtttcggttttatctaatttagttaaatcagctcatctcagtgaattttggc

SEQ ID NO: 5016 - DNA, 6000 bp, Homo sapiens
agaggcagcagacattagtccaggaacccgggtcttggctggactgctgaatggagtcagagcagagggggctcccattaggtcagagcagaacctgagaatactcaacctggagaaggtggagatgagtggggaggggtgtggctgcccacctccaatatcgtaagccttgctgggggcagaaggagtgagatgtcctttgtgtggcttcagaggaccagggccagggccaacatggggtgtgtgtttccagagaccaggctttctgaaacaggcctgcccactacctgtccactcactgaccgtgaggtccctgtgtgaaacctcccaacagagaccccatgggttgctctcctgactccaatagtcaccataatcaaatgtggctagtccagtttccatgtcattttggcaagtagtgattgattactatttgctttcatcagaaggcatgtgctctgtgattataaggaaatgtcaccagtggcctgtgctggcttcccacagtttcctcatcttcctgtagggtacagttcctcctgggctggaattatcccttgagtggggacactcagacctcaggttgccaacttactgatgccagtggttctttaaaaggttctgttgggctgggtgcagtggctcccagcactttgggaggctgaggcgggcagatcacgtgaggccaggagttcaagaccagccagaccaacatagcaaaaccctgtctctactaaaaatgcaaaaaattaggtggatgtggtggcacacatttgtaatcccagctacttgggaggctgaggcatgaaaattgcttgaacccaggaggtggagattgcagtgagctgagatcatgtcactgcactctagcctgtgtgacaaaacgtgaccctgttctcaaaaaaaataaaagggggggggggctttgttgtatggtgcatgcagaactgtgagctgcctctagcttcagaggaatgaagggataggtcctgagagcaatgcctgatgccatttgcagaaaacaggttctagtataaatgacaggtcccagccttatgtggaactgctataactgtcttccccttcatcctgggaactaaactatttccttcaataaagatatgctcctttgctttggcagaggacaggatgtagatgtatgtgtgtgtgtggtagggcttatgtgctataaacaggcttgcagaccacagcatgcagttggggcattcaataaatgtttagcaacttaatagccatttattgagcacctactgtgtagcaggctccacagctattgaatgaaaaaaagcacctgcaattatatctgtctggaaaatagaacaactggcttcaggaagtggctattatccctctggcttcctcgtaagcgagagtatggattattatggtgtgcattagtttagcctcattttcaaagtcattttgtacccgtgacttgttttagctttcctctgtcccttccatacttaaatttcctttgtttgtttaggttttttgttttatgttatgctttcgtataaattgccttactatcattctgggataagattgggtataaaaaatgcatacaattatagggagcaggaagaagagaaggtcagcaaaattaagcaacttgcctgacattgcacaggatctgcctaatgagcggaggagtggggatctgaccccacaaccaccatctggccagagcctcaccatcccctgggccagaagctggccccggaagaacagcctgctgttctggaaagagcatggcctcctgggtcagaatgacccagctctgatgagcagcatcaccactttctaattacaacagtgggcaagtcatctagattctgagctttaggtctttgagatgtaaaatagacataataagaaccactttgcaggctgttatgaggattcaaacagtgtaatatgatcagctcctactgtgttctctataaaaggtcgctcatgtcagtgctggcaggataaggctactggtcaatgtggccatcaggctgacaactactaaccagcttttatggagctctgattactggctggatctcgagctaacggtctgtatgtgttccctcttctcattttgtcgcaatatcctgtgaggtaggtacatttattataacctcaggctttagtgatgagagagctaaatttgagaggctccaagcctggatttgaatggatatccatgaacacgaagctctactgtctatccatagctagctagtttttcaactgctgacatcctcaaaggccctgaggtcctgcctatctgtccctgaggttcctgcaactgccaggaggctcagcctcctcacccctaccagcagagacttattaaggccagtgaacaggcagacatgtagccacggagttggcccgacatgatccatatgaggtggtgcaacactgcggctgtccagttcaccatgtggtgtgccatgagagaggtctgtagtgttctggggcaatctaagcatgaccccaaaccatataaatgcacatgtatcttaacaactaagtcactgaatgcacagccacattctgtgtcttacatgctgatcagtgccctaagcacttaaaggacattatatcaatatctaaccacagccatcttagtcaagttttcattactcattagtacattcacacatttattgacacaacagacagccttagtggtaccagccactgtgcttgctcagggaaaacagagtaacccacagctcctgtcctgaagggtctgctcatctaagtggcggtcaacagtttatgttgcaaagatgagaacactgatctttagtaggagcaagtccctggtccaggtgaggtctggtgcctccaaagccaatctttgcactgagccaggccattcccagccatcaggaggccatgctgtactggacccatgatgctgacacatcttgggaccccctcagggttgtggctcttgtctccaccagacacaagcccatgtgtgggaattgagcaagacctcatgtttgtggtcacagctgacctggaatgcaggtccagggtagagatcacacaactgtccagtgggcagtgaatttttcctggctataaacaactgttgctctctaacgacacatacccagagaactcagagggacctctactgatgatatcagtcgaaaatatcaccatggatcaggcttaaagagctccactccccaatgaaagcttgggtgtttggggtctgggtactaccagctaccactggctctctgttaagacttctgggttacagacaaaataccacaaccaaagaaaaccacaatggggagtatagaagcagcatgggttgtcccaccattgcacacatgatgaaatcgaaactgcctctcatgccccctcagagcctgtgttctgggctctgccttcttccctgtcctcacctaatgcctgctcccatatcacccaatagtctcactggccatttttctgcttcttaaatgtgctaagtgctaccccagacatgactttcacatggggttttagtcttaggaagtttcttcctcccccaagttgaaagccaaccctggcagcctcataatgacttttggcaagacatttcacctctctgtgccttgatttccttctctgtaaaatgggaaaataggaataaccatctcaaaggactggcatgcaaatgaggattcaacactatttgccaagcatggaggatactccttggcactagaacatgctagacccatgtgagctgttttataattagtcatccttcaagcttccccttacatgttagctccttagtgagggtttctctagtcctccagtggacagcactcaccatgtggtgtttcctggaacctctactttgattcatttttttaaatcacagctctgcctgcactttgattgagctaatttttttagggtcagtgattgtatctctagaccataagcttagtagtgctgaacatcatactaggcaaagcacagaagatcctcaaatcaaatgactgtaagaataatttggtgaatcccagtgggagagacttaggatatagtaatgaaagctcaaaagaaagcattttcatgatcaggaatatcctaaatccacaacctaaatgtttgcctctttcatgtctatttcctagttttatcttgagctcttgccacagaatccatgtaatgggccttatgtgatttgctgttagactttatccttgggcagtggaatagggtgggagagggcagaggggctgttggggaggggagtgacaaaacctaatgtgcgttttgggaataacactttacctgcagtgtggagagtagactgggaagagaagagctaaggcagaaagctgctaggatggctcaatgttgtctgtggtggggccagcatggtggggcaggggccagggccccggtggctgagttgatgacgtcagtggctatagctcaccttgattgtgtcttacaggatcctggagctgcaggacacaggggacctggatgtgctgaagcagaagtggtggccgcacatgggccgctgtgacctcaccagccatgccagcgcccaggccgacggcaaatccctcaagctgcacagcttcgccggggtcttctgcatcctggccattggcctgctcctggcctgcctggtggctgccctggagttgtggtggaacagcaaccggtgccaccaggagacccccaaggaggtcagcaccctggggcctgccctccctttcacagcctagaggcaggagtgtcacactgggccattgggagggcaggttgtttctagttagtatttacctgagtcatcttgtctggaggcagcagtgttttatattgggggattttgttattgttttattttgtttttaaaactagagaagaaatgtaggggatgttttcatgcttgaacaaagtgctgcagtaccagccttagccactaaagtcctgtatttatctatagagcaggtacagcgtgggcagcgccagagagcccttccctaccctgccccgcccatgtgcctccaccctgacctggagagaccacctgtagggtaagagaggagcccattccttcctgattctcttttacttctcaccaagggacacagggcgctgctctcccagcgcatcaggggatccctgtccctcccagcactcctttctccctatattcctcctgcttgcagggcccagccttgcccctgtccctcctgggtgcacccagcctgggggacactagctctgtccacactccgggttctgggcacacatttctccccatgtgtgccaactgcaaactgattctgcccctccacacttccttcttactgggtttgtgttctgcaagctcttttttaaatttttttttttttctgaaataaagccttcaccaaggtcccccggagacctttgccctacggaagggtggaaagtagtgtcatttggtggtgatgctttgccagcagaaactccacatgcccagccacaccatccgtggggctgtcactctctgccacatagacctcagctatgtctagaaccacagctctgcttagagactctgtgggtgcagatggatataaacctcaaacaggaagtggtaaagcaacctgcatcaaacccaaaagcacttctgttttgttttgttttttgtctgtttttgtttttactggaggctcagatagtacagggcagttcattaaatggtttcagaggtagaaggtccaaggggcacaaaaaataaactgggacaggaaagaaaaacagccaggaggaggtaagagccggcgggctcttctcagactgatttggggaagggatttggcacctctggacagcaaggctgggtccaccatgtgtgtggcctgggtgtctggccacatcgcaccctccattcattggtccataagggcattcctggcaggtcaggggtgaggacaggggtgggcgtccctcgct

SEQ ID NO: 5017 - DNA, 6000 bp, Homo sapiens
tagcaacgggttggggggcttttgggtgtggagcccaggaagcatcctgaggaaggtcagacctgtgacgctcaaaacactcaggatccattcctgggagatgaggcagcccagcttccgtgctagccctgcctttggaaaggagctaatcttaaggaaggggtttcataacaagggcatttctttcctactctgtatcctgacttggatccccaaacctgtcagttgctccccatatctgctggaaaacaaggaatctaggacaggacaggtgacaaaagagaagggcagaaaagttgctgcaggggaggaacaaaagagcaaggatgtcttgagaaactgacctggttcactagtttttttatcttcctagtcggcctatggggttcattagatcagtgaaggaggcaccctgagagtgaataggttccagagacggggtcctggagtgggtgagagttggggtccttctggaacttgagagaagatgaaacagtagtccattggcccacgatgagcctgctaatattagaggctgggttgactcttcctttgcatccctaacctgctttaagcacggtggggactgtctgggaccacgagagacgcatacacgggaggaggaacaacagagaaaatacaggctgacatggagacaaacggagcggggactcagatatgataccccaggctctgcctcagccagaactgtgttgacgaagggggacggggtgcctgagaattgggggcggggtttcctcctctcagtggggctcttctgtcccgcgctctcctcctcccccaccccccccccccgccaagccccgtgacttctgctttaggggcagattgctggggagctagtctccttccccgcactttgcagttcaccctttcaccgggtgcctcccccgggctgcaaagggtggggggcgggggtagggggagccaatcccggcagcgccaaagaggggaggaggcggtgacagccgcggggagggggcgggaggagagaggcagctcggctcggctccgcgctcagctccgctctgcctccggctctgcgctcacctgctgcctagtgttccctctcctgctccaggacctccgggtagacctcagaccccgggcccattcccagactcagcctcagcccggacttccccagccccgacagcacagtaggccgccagggggcgccgtgtgagcgccctatcccggccacccggcgccccctcccacggcccgggcgggagcggggcgccgggggccatgcggggccagggccgcaaggagagtttgtccgattcccgagacctggacggctcctacgaccagctcacgggtgagtcagtgacgtgggggtcgcgggagggagggtggattccattcctccagacccttccgcctctccgaccccggcctggcccgcacccacactctgccccattcccaggcactcttatggccggtctgggcggcaggacactgggggttcaaagccttgggtcccgcaggggttggggaggaacagaagaggcaggtgtggagaggcagcaggtgtgggcgtatgtgacacagggctgagagggtgtctggagtgggaggtgttacgtgcgtgagcacctgtcattctgtgtgtgtgtgtgtgtgtgcgcgcgcacctcccacagctggttgccatgtgccctgggcttggtgacagctagggtgagtgtgattgtatgtggcagtgcaattgtatggtctcgtcagatgtttgagtttgcgtaggaccctggttgtactgatgaagttgttttgaccatgtgtctctatgtgcaacgatgtgttgtgagtgtgtaattctgtatgaagtggtgtgtaactaccagaatgtgtcagggctctactttagggtggcttgtctctttgtaagccttcatgaccataagccctctgggcaagaatttgttaaagtaggttgtgttgtgttttgtggttgtgagattagtgttcagtgctagttgtgtactttcatgtggtgatgtctgcagcggggctctgtgagtgtctatgacgtgtctcatccctgctgcctctctggcttcctggtacagataggggtctttagtacaccccactccttcaccaatttttccacaaatagcccaggtggacccaaggagggactttagtgttcagctgcccagtctggtttccaagagaccttatggctccagcacctggcccctgtagggaggctttagttagtgctgggtcagccctctctccccacaccaaatcatgtactgagattattcttacaactgaatccttcaacccccaacaaacctttcagaacttcactcaaaccccaggaaaacacatcctcttccttcccctccagagacagagctagaagctctaggcctgggaagtgccatgtggtgtcctgcatgtccaccaaaccacttggctgcccgggcatcctctctttcccacatggggaggtatgtgaggccagtacatctgtgcatgtgcatgttcctgggtttggtaggaagagccatgtgtttgtgtaggtgactgtgtcaccctgggtacatttccatgtatgtgtttgtgtctctcattgtgcagcctgctctagaaagccagcagagtgggaggagggaggctgtctccctgaggccaaaacaaagctggggaggtggagggaggccatgatccttgtccttcctgaggggagtgagattgagacctgggaagggggaggggactaggatgaggtgccttgagcatgtgtcttcccccatcccccatcactgtccctagggaggccctagtcaggatcaggggagccactcaggctggccccagatgagagaccatgccagatgtgcctcagagctggatggaatccaaaggacccactgtccagctcttccatgaattctgttcccatcaccagcttaggattcttgagagtagtaagggcctaggggccttcaatagtatcacattagtcagtgtttgcttccagctttaatgggttctcacccttagtgaaaccatcccttccccacttggctatttgaatgagattgggtgggggaagcatttgtatttggagatgccctgccccagttcagtcaggaatggaagtgtaccagctatgtgacttttgttctcttggcctcacctttctcatctgtaaaagggaatgttacttcctgcctgcctgcctacctcccaaggaaaatggaaaggtcaaatgttgacaagtatcaagaattgtggtccgggtctacagcagcctagctgtagatagctccacacacgacttggaaagtagaaataggactaccaggagctctcctctcgaagggcggcttattttatagcgggagacaaatcgggttgggacgccagtgtcaacgaagactcccgggcgggcgggcggcgctgagctctgagcgctgagagatgcctaagctgaagcatgaaggggagtcgttgtccgcggtgctgaagcgcgcgccaggcttcgcctccccttccctgcagttgggattcctgggatcggatttagggtagtctgcagctcccgtcttcccggcccatcaggcttgcagggaagcagctggaaagttacacctcagggcatcctgggtacctccgaacattttacttccccactcccaccccaagctcaaaagggagctgggagagactctttaggaaaacaaaacaaaacaaaaaacagtccgagccccgcccggacccctgtctaatccctcaggtcttcccagcccggcggggccgctgggcagtgcggttccgaggggaaaggccgcgtttagcagcggccctgtctgagcggaagagagaaaggccaagagaagatgcggagagggttggagcctggctggctagccctgagctcggtcccccgactgggatctcagtggagtccctccggccctgagtattgttgccggggcgggggcgcccccgtgtggctgcgaggagccatgcgcacggagctgctttgcggtggggatagtcgccgtcaagtggacaagatttgcccagagttaggaggtcattctcaccacttaaatgtagggttttcaaccaatcatgcgggatcccagtcgaaagagcgggactatatctctcccgtaggctttcccaggaattttaaggcgttagagagtcctggaagtgtttacttggggtctaacctgatagagatgagtccggagtccaggaaaggggcgcagcgggaccgaagtggggggggggtgcggggggggctcttctcgaagcattcggctgtagccagcgtatggtggtagtctgtgaacctgccgcaccgagacaaacacaaatagaaacagttatgagagcaaggaatttggagccaggagacagaaggcagtggggcacaactctgctgcctcttctttgccaccccaatacactggcctctttctccttcctcctggctttcttccattggcccaggaagtgtggggagttgccatgacaactctgtcctcttaccccttcggctctttatgccaaaatggtgggggcggggtgcagggtgcggggaggagtgcgacaggcggagaaaggggggctgaaagggggcaataaaagatacggttcattccccatccagctcttttctcaaaacccacatgtgcctgcctggcctccccgccagaacccagaaaaatgctccctgagaaggctgagtccgcgccgcccctccccgccaccccccccccccgtccaggaactttgggggcggctgcttcacatgatggggccagggtgagctcctctcgtgcggccaggagaacatgggaaggctccagggtttcgatcctatgcctgccgggccggccctcccgcgccgcccacgcgggcctacccgggtgagggcggagaccggaccgccccggggcctgggggtggagcttagacgccgagctcgccgccaaaccatgaaccgatgcccccgcaggtgccggagcccgctggggcaggcagcgcgatccctctaccagctggtgactgggtcgctgtccccaggtatgatgaggaagggaagggaggggcaggatccttcaaaaagtgagcgaagtgggttaggagctccgcagaggtagggagggaagggcccctcaaatagatggagggagcaacatccctccaaggaaagggcttccaagacgagatcctggacagaagcggagcaggggatgggcctccttactgagcaggaggaagacagcgctcttcaaagaggaaaggagaggggcatcaaggtccctcacaatggtggagggggcggggcttctcaccgaaggcagaggagggggccttaactgaggggcagggcgcctcccagggatgaaaggaggaggcctgcagcagagcagggaaaaagttcagtcctttcctgcatttcttggctgaaggggtcttaagatgaagggttcagtgtccagaaggaaaaaaccctgagatgggcctagaccaacatgaactcagctagcaagttcatacatgacatgggactgatagacttgtgtggcttaaggattgtatgtctctgttttctctctctctgggagtgtgtattaatgggattgtgcattactaagttgtgcatcactgggctatgtatggctgagtctgtgtctccctggggttgtgatcactgggattctgtgacactgagactgtgtgtacctggagttctgtactttaggactgggttgagggttcctgagcctctaagttggttgtgtagccttcgtgaggttgtaccttggtgtgaaatttgtggagtgtatgaggtgtggattgttgagtatcccacggcactgctgaggtgtatgcacatctccacttgcatttccttatgactgcttgggcagggcccatagaacgcaacgtctcctctgtacctgacctcaaacagaccaaaacaacctggtc

SEQ ID NO: 5018 - DNA, 6000 bp, Homo sapiens
gtggtggtttagagtgaaggctgagtcagactgggttaaaattgaagctctgatcttgaagatttgcttaacttctctttgacttagtttcaccacctgtaatatgaggataatagtatgccttcataggcttattgtgaaaattcggtgttacaacacctgtaagcacatagtgcattatctagtacatagtgaatgctcagtcaccgttagccagcagcggtagtaatggtgttactaacccagaggccctagtcttgtggctcattggctctgtaggcctctccccacccctttacacacacaaacaccccaccaagaagaagcagggaagaggagggagggactccggggatgctggctgggaggggtggctcccttagaaggttcagatttccctcctacagcagctgggcttctccatcagctcaataacagttcctaaggagcaggcagggctttagcatctcccggatgaggtcccagccacatacggagccagcacagtcccccctcctctcccaagaagcttgggtttcttgaccccaaaggcagctgcagtaagtcccctccccagagggtcctgatggggttaagtggcctttttctgcctaggctactactgtatcttatcccccctcccttgggcctcagtttcactgcctgtggcctgtgggaagagagtgcttccctcctcacagtctccatggcaaccaaatcgatattggtgatatcctcctagcaggagaggtcactgccttctccgccattattctcatacaattccatgccaatacaatgacaaaacagtagacccaccctccaaattatacaacacatccatacctaacaaacttcagacccacatcctacaaccctactaaaacacaggaacctcactccccatgcacactcacaaatacttcaacacactcctacacatgcagaccatagacacccagctcacatacccatatacgcaagagtcaaaatgcataaccatacgccaaacacacacctctgtgacaggtgcacagtcacgtgtaagcacacaaagacacacataagaggagacatatgcactgccatactgacaaacacaggaatatacacacaggaaaacacctggccaccacaacatattctgacccatgcatctgattacttatacatgtgcagatggtggtttctcatgcacatacaccctgcccttccctgccttctccctaagctcagctcctccctctgccccttccctttggcacagagtagccacaggatgtctaggggaagcacttctcagggacagaggcgggtcactgctccctccctctggcccatatcttggccaaaagttcccaaggaggtgccagtccaaaggctgaggtggccctgcgaagaggaagaggcggcggctgtggttgggaggcttgtggggcagaggcggggtgatgggggagaggaaggagatcctgggagggagagtgggagggaggctgcaggcagtcctactcaggctggggagtctgagggggaggtggtgtgaggcggtgaaccggcgtatctgaacctgggccctgtaggggccatgccccaggcccaccatgaacctggaagggctggagatggttgctgtgctcgtggtcctcgctctgtttgtcaaggtcctggagcagtttggcctctttgagcctgtctccttggaaggtaatccaggtgtcctggcatgtctgagctgctggctggtggggcagctgccccacagcactagggagggtgtttgtctgtcttcatgactggggcagggatgagcaggtgagtgatggcacagggatctgggaggtgagtaggggtgcttgggggatacaacatctgggaggggtgaagaggaggcctcaaggagtagatatggagggaggagggaatctgggggaccaaggtgtcaggaggtgatgaggggtgcagtgtgggaggactggggtgtggagatgaggaggtgaggggattctgggcgataccaggaggggtctggagatagggaaggagtgtctagagtagaggagggaggttctagggatcctgagataacaacggatttctggggggtcctttttggagtcaggggcccaccacggtgcctgtgcatcctctccacacctccatctgtgcagtgtagcttatggggtgtgtgggcatagtgtgtgagagacacagggtgtgactttgtgttcctgtatgtgagagagtacaaagtgtgtaactgtgagcctgtgtatgggacagggatatgactgtatgtgtgagagtgacagggcatgtggctttgtgagaaggtggatgtggccaggcctgagtggcacagtatgtggctgagcctctgggtatcaggttgtgcatgtggctgtttccagaatttcctgaggatataccagctccatacccaaggcttgggaggaggtgggttctggagggaagagtgtgaacattgtgaaggagacatttatagcccagctatgattggggatgaggagtggatcagatcagggaccctgcttcccaagtccccttgcctctccaagctcctatcaggatccaagtgcagagtgatctccagggcctagacattgggagtggaaaatcaactcccctccccagcccaccccaaagtcagtagggagagtaatattggggtggagtggggagcacttctgcctcccccttgggagttttgacctctccctcctcttcacggctagaactgtgtaactccgtagcatggctgttccccagtaccaccagggacaggaagacagactagaaccatgatggaggactgcagggtagatacctggaagaactggaaaaatatgaaggaaactgggaacaagaggaaggtgcatgaattgcctgctctagggttcagtaagagcagaaaactcctagctcaccctccatcctctgctgcatttattggggtggagtggggaacagggagttggacctagataaactgggacagctgggctgagcttgttctcattcaatctggaaaaggtgaagttgattgagctctaacttgccattccttttagatgggaaagggggaagagagggcatctggaaatcccaggagtcttgggctgaaggcagccattctgttctcacctttagaggagacagaggcttagaagcaggtagggggctggggtggggggcaggagagccacccccgagtcgggcaactacaccattggaggccccaggcgcaatccagctttgggaaactagagtccaggctaatggagccctgggccagaggccaggaatgccatcgatccccctgcctggcccactgcctccctcccacctctccatggctcctggggtgggagggaggtaaggatgtgttgaaggagaggaggtggttactcacccagtcacctcctgagaacagggcctgatctggagggtgaagcctggattgggagggtggggtatatggagggggagtaacctttaactaaaggaagttggacccctccaggaatggactgaggccaactttagtcactgtgtcagatccagtgggatctgatccaggaatctggatgcagtgcagctgggagacacagacacacacacacacacacacacacacacacacacacacacacacagtaacactgagggtcctctgggggtgcaattagagctgtagagcatgtgcagaaataagggagaagaggggaaggggagccatgatcagtgggccatggatagccccacaatacaccagaatactcgcctccaagatctcttattgccacaaagtttactattatttcaccctcaaagagcaagccatactggaagagactgtgaaggggccacagtttagggtagatgagttagctgatgaggaaccctgccctttggcagaaagattctgggcaccttggaatgaggaggggttacaggaaagaaaagtgggtgtacccaggaaaaatgaagcctctgtgggtgaggtattgaggtacagccttagatatctgggtgccatggggacccaggtcacagtatgatatggatatgtgtcatgacaaccttgatatgtctcataatgttataaggtcacaatgtcatagtgttctttgtagactcacatgtcatgatgtcccagaggcattgtgtgttcttgtgtggtttgatcatgctgtgtgtgagatggcctatatgggtctccatgtgtatgcatcctgttttacttaggtcacatttgtatatgtttgtgttaaggagttagcaggtcattgtgtgtgtgtgtgtgagcatgcatattacgccatcaggtgtgagttactggatatcaagctgtcactggcacccatcactgtgatgtattgttctacatgtcactatacacgcctgtcactgtaggtgtgtgtatgagagaggtgttcttacccaggcaatccttgggttggacatcatcctgagaggtccagccatggcacttgagccaagggtactaggtcagcaaagacactgaggccactgccacctcatccttgccgcctcgctgtcaccggccacgtcccattaaaccaagtgcctgagcctcacctctatggactcactgggctcccctaacccgattccaaccacccttgccattcctttcctccccttaattcctcccccagcccggtccccagatggggttgatttgtgactggcggggaggggacagggaacagagggacaatgggagttaatgtgccttcctggggtcttctctcttcccaggccaccctccagggcccactaaaaaagcgctgaagcagcgattcctcaagctgctgccgtgctgcgggccccaagccctgccctcagtcagtgaaagcaagtgcctctcatgtgcttccgggggcggggctcgatgtgtgcgtgcgtgtctgtgcatgagtgtgtgcgcgtgtgccccaggcctgcgagtgtgcgcatgctccaggcctgcatgtgtgggggggcgtgccccaggcctgcgtgtgtgggggtggggcctgccccaggcctgtgcgtgtgtatgtgtgtgcatgtgcgcgcgagcgtgccccaggccggcgtgtgtgtgtgggggggcgtgccctacccctgcatgtgtgtggagggcgtgccccaggcccgcgcgcgtgtgtgtgtgtatggggaggcgtgccgcacgcctgcgtgtgggggaggggcgtgccccaggcctgcgtgcgtgtgtgtgtgtgtgtgtgtgtgtgtgtgggcgtgaccagcgtggcgagggcgggtgctggcaaggctggagcataagggggcgtggctactgtgtgcgtgtgcggctgaagccagcgtgtgtgggcgtggtcagttgggagcgggtgtgtgtcaccgctcccgcaaaactgtgggacccgagagtgtgggtgtgaccattgtgaccaggctgaggcctgagcctgtgtagctgtggcggcctgtgtagaccaggcggccgtgagggtctgtatgtggcttagctgggttagtgtcttcaactccgtgcggccgcccccttccccaccgtgttttggacccctgatgtgtgttgcctatgccccgacaggatggtgacaggtgtagaggatggcgcctgccctcctccagacgccagggtatttgggttttctgtgccagcctggtcccctgctgagtgatctccagttgagtgacctcgctttgtctctaggtctccatttcctcagttgggccttgcccacctcataggatcatactgcattttgcaaaccataaaggcccgctttgtagttatttgagcatgctgttgtgttggacttagatgggtcccacacgggggtggattcggaaaaggacaggcgtgagtcccgcaagcttgtgtgcatggggtccgtttcgtgtgtgtctgtgctggttgggtgtgcctttgcacgggctgggttgtgaggtttgctc

SEQ ID NO: 5019 - DNA, 6000 bp, Homo sapiens
gcaagggcatatgttttcatttctcttgggtatatacctagaagtgaaattcacttcacgaggcagcaggaaggagaagtgccaagtgaagggggaagagcccctaatcaaactatcagatctcctgagatcaccattatcatgagaacagcatgggagaacctcccccatgatccaatgacctccacctggtctcttccttgactcacggggattatggggattacaattcaagatgaggtttgggtgcgggcacaaagtctaaccatatctccagaggagaggtagtgttagaaatttggctccatttgtcccttagattccccaaaagatggtgcctcataactatctggaataacaaaagatgatgggcatgtgtctatatgtgtgtgtgggtgcccataaggcaagggttctaatttctgccatgtcactaatttgctgtgtgaccctgagtaagtcacttagccttcctgagcatagtttccctgtttgtaaaacaaggaggttggactacatgatttttgagctcttcccatccctgaaagtccatatcctgtcatactttttacctaatgagatattaactccggcttcattttaggacttagggtcctgggaactggcagctatcagcaaataatctccaaatgaaatttgaacacagtggagcttaatgtatttttgtatttgggctttgggagatcaaattttgaattggcaatatagggaattcagttactatttttgacaagcggttggacttattgaatgatacattggatctggcagcattactaatgaatcaaggaacaaggacagagttaacattttcaaaatagttgaagggccttaaaaaattgaccctaatgaggacactagattctttttagaaaccacagaatttgccttgcaaagaccctcattatgcagaatgagctacttaaagacagaggagagaagtggtatgaggggaggagggttaggaggagaaataaagctttggggatgatgggagctcaaattgtctaagcaagaggactattattttgctcacaatagatcagttagattcttacttgtgtttgtttgttgggagaggaggaaagtggccctcatgaaattgtgagggtaggaaggtagggttcgtgggtctttgtgatgcttgtggaaataaaaggttttctttctgtacagcaaaattgttattaatgacacagaaaaatcagagctaatttgcactaatgtgatgacacatcctaagatcagctttttgggtgatagtctgatcctgtgtgattgtttgacgtgccctagggttacctcaatctagaggttccctactgggtcaagttagggatggatggggctggaacctaagctatggatgaactccctggccatagcctaccaagaggcagagaggatgaagggcattggagaaagtggaaatacggtctagaacttctgcctcagctgctgagtgtctccgtgatcttactgctgacaaggggtcctagggtgtgtatacacaagagttgctggagctaccctggcttgtgagtcttcatgcatggctctgcgcatggaattgtagcctgtggatgcgagaagggaactttcattccagatcatggtgtaggtttcatggcattgtcaacacggattagtcagtagtgatttcctggagcactttgttgagaggattctaagtttcatatctaggtttagcctaaaagagtaccttcatgcattagcaatgtctgccacaagtgagaagggtaagaagtatgtcatagccatgtattttcaatatctgacccaattttggagacaaattgaggccaaaagagggcaagtgacctatctgaggttacactgctagttagacagctggggaataaacccaggtctcctttctctgatgccaaagtatttttcattttgccatgctgggagctactttcataaagtcttctgttccataaggatagtcactaagtatgtaggaaaacataaagccaggaatgactgggcatgtgataacatataaacaacccactttgagccatatagtgaactctgcttttgttcttggtacaaccggtcccaaaatagcacgtgtctgcttgcattgtctgtgaaagctgcagtactgtggaagccacagaaacactgttctttgagcaattaacctttttaaaggaaagttcattattttatagagacacatgaagtatttacaattctttccaatattttaccctcataacttaaaatttggggtctttgccctttggaattcttagtatctgcttttctcctaaaggtgaagttgctaacttaggctttggaaggttttcattttattacaaaggtttgtgtctaatgggctctctaatgctgattccctcttcatgcctccagctgctgggagtgtaacctgttcttcaggaattgccttggtggaagggaattgccttgttcatggtgtgccctttgtccaggggcagtctccatttaggaactgtcagcaaaggggttcaaaagcagctctgaagagccattctggctccagtcctccccatggagtcagctgaagtttctgttgcaagtacatcagttaaactttttcctgtgctgaatcctgcttgccttaccttcttacaggcattgttcctgagagcgcacaccaataaacattttgtatgtatatcaccatctcagagtctatttgatagaatagttacccaagctattctggcttctgaaggtgctgaaccaagggacagaaatataaagttggataatggagaatttacccaatatgagagcatttttccctggacacacaattttagcactttggcaaagaccccaggagacagtgctagaatggctcttggaaacttggagaatgcaatgacccacaccaaatgaagtagaactatcagaactgcccaggtagatggtgaagccatcagaaggctcagagaaggagccctgctggaatatttatataagataaggccagaaaaatgtttagttgaccattttccatagacgggccaggagaacgttctcaccaaagtaataaggaatatgctagtgaagtgagcactgatgtggccttggatacatacaccagtgtgtggtcattgatctggttagtgcatttatttcatctccaattgtattagtcagggtgatccagagaaacagaaccaatggagccaatggtatcagtccctgtctgagtccataggcctgggcgttaggagcactgatgtctgagagcaggagaagatggatgtctcagcttaagcagagagcaaatttgctcttcctctgccttttgtcctattgaggccctcaatgtattggatgatgtctactcggagaaggggatcttctttgctcagcctgccaattcaaatactagtctcttccagaagcactctcatagacatacccagaaataatattttaccagctatctgggcatcttttagctcagtcaagttgacacataaaaattaaccatcacaaattcaccttttatcaacttggcacccatatacattgccttaaacaacacttcatctccccacagagacaataacaaggtcataattctgtttaatgtgataaaactaactctgtgtacaactgaaaacctactaatcccttccctagaagatgaggtaaagtccttgaatagtgtttactcttctgctgatattccataacttaaatactgtgatgtaaaattaacaatacttatatactgacataaagtcaacataacttatattacatgataacataagaggaaagaaagcaaggatacttgcttaatgtatgtatatatacacataaatgtgtatgaataaaaattcctcataatgaataaagaagaaatctttatgacaattacagtccttgcccctgtaactggtcatatatatggtcatagctactatttataactgacttctgtcactcattcggtattctctttgctttcagcaagcatctctgctgattgtggttctttacctgggatacttagggaagagttacacaaactttcattcctgaagggtctggaccattagtagtcttgcctggattggtttgttgtggttttccattgaccttaattaatcacaggacatgataatactaagagatgccctaagggaaatcctgcatttcagacaaactcttcctcacctgcattgtggaataatatcccaatttacccttggtaatcaggatcaatcacccctgccaacagtgtaactcccttctttccctgttgattcagaggcacaaggaacccaaagtggccgggtggcaatcttaacttctagtttaatggaatcattattgtgtctcctgctagaggcattcctctgacctctgggccagtggaggtcagcgactaagacctctgaaccagcagggcataaagttatgggaataggaagcaacaattttgttagtgagtccttagggtagtggtgactggtaccaccccaccttcaccgtttgattcctggacccattaatcctggatatgggagacacagaaccatatactggatacttattcagagaatctatcaagccaactgcttcaggctggtggagaacatgaaaaaagcagtgaattccatgagcatagggccattgccacactccttttgcagtgaagtgagttccttgatcagaggcaatgttgtgtggaatatcatgatggcgtataaggaattctgtaagcttatggatagtagttttgtcagaagcgttgcattcagggaaggcaaatccatattcaaagtaaatatctattctaataagaacaaaacatagcccccttcataatggaagcaagtcagtgtaatcaacctgctaccaggtagctggctgatcaccctggggaatggtgccatatcagggactcgctgttggtctttgctgttggcagattaggtactcggtggtggccacaggcaagttagctttgctgagtggaagttcctgtttctgagcccggccataaagtccatccttgctactgtggccaccttattcatgaacctactgggtgatgacaagagaggctgaccagtattttatccacttttgttgaatattaacatggaacacaaatatcttcacttttctgctcattcagagtcatttatccacataccctttctccatatttctttgttaccaattttgcagtcatgtttcttccaggtccctgaccatccagccaaaacactggctacagcccatggattggtatagaatcatgtctttggccatttctccttctaagcaaagtgcacaaccagatgcactgcctacagttctgtctactgagagcattttctttcaacactgtgttcaggtatgttccagaaagggactgcagtggtatagtagtgtacttttgaatggttcctgcatttcatgcagaaccatctgtaagtctggcttgagtgttctcttcctctgtcagctgactacagaaaactcctcatgtgaccatctcagtgcaggctaagaaacagagggcagtgtagctgtagcagcagtggggaccatgggcgtttgggccgcttcttcatgtaactcatttgtgtgttcgggcctgctggggccctgatcacatatgtaccactgccatttgatgatggaatgtttctgggcacactcatctttatggctgggtggatgtaggtttgataatctccatcatagcatttttttaattcaccagtctgactcccaccaaaaatctgatggattctggtggttgacagtagaccactgtagcttcagacaagtagtgatcccaattgtggttgctatgctggatattgtatctttgctagagtaggttaacatagtttcagatatgtagaccagtgtgtggctattgagctgatgagtgcatttttcccatctctatcaataagaaat

SEQ ID NO: 5020 - DNA, 6000 bp, Homo sapiens
aaagaaaaagtcgccaagggacaaaattcttggtttgccttcaaggtggaattgaaaagccttgtagaaaatgtaaggtccgtgcaagccacacggtgagccgacccactgcagggggggaaaaaaacaccaaataaataatgtagccatcagagcacaaacatctattcccagacacatttacacacagacatccactctcttaatacagacgacccaacagatataacgctgggtggaaaaataatagcacccacaaattttctgcttccctaaaaaaaaaaaaaaaaaaactcagggccccccaccgccacttctacccacctccccatttgaggcggtaaaattacattatgtatgtatgatcagtgcagggatttttttaaacaataaaaatgattttgggggatgcagagggtaaaagtttggtgaaaagtttgtggggggtgtgggtgggtgcagaggtgtgggtgagctggggggttggggggtgccggggggtgccgggatcggaggagcggaggagagcgaaatacctggagtgagttgggctccatctcgacgttctgaattgattgaactcaacattctctccaaacttgttggcttgaatggattgcatcaggtcctggcagggaaacgcattctctgccttcagccggcgtaatgtctcaatataaaactgagctcttgcctcccttcgggcaccgaaatgattgaaaatatgtcctaatatttctataacgactcaattttcagctcctgaaaaaactatgtgggttttcttccaaagatggattgatcaaattcataatcgagagaaaggcgccatacgatctcggcgggaagaggatggatcaaggcaaaaaacacacaagaagatttgtaaaaataaaaagcaccctaaaactgtgtggagatgtgattcctctctctctaaccgctcctgtctgggatatcgtctgatgagatttttggaggagaggaggggtagcgagctccactgtgcatctgacaggacctgcttgtatatgtctaatataaagaacatttcctgcagagattccggggcgctgctcctctttctaatgcttcttagcagatttgctgttattagacatgtagatttgtttgatagttaaattacgcttcctcactgccatgttttcgagaactaatctgttaaattatcttttgatgcctatttacatggaagggaaaagtgggttatcgattatataaacatataaatattaatgcatttgttcgcttcgcaaaaaaatactcagcaaaaaaaaaagagacaagtgagcagtgcacacacatcttaggatttcgcaaacaatattgaacggacagcgactgcatttagggactggaacaataaacgatgcatgataaatcaataaatgcgagaagcgagtctgctcagaatatgaattcaggctcccggttctgcgtgtgcattctttaattttgaagtatatacactagtacgtgtttacaatgctgatggacgccaagggcgctctcaaatgataatgtgtttatataacccagcgctacaggaataatataccgactcctaccccacccccatcccctcccccgccaaaaaagggaggggagcttcctcaataatagtttgaaactgaaaaaatccatttgcaaactagttaaatacaaccagaaattaagctgttgaaaaccgggggcatgaaccgtaagacaataaaggctttaaatgtgtatatttattgttctggagccctggagcattgcgaggtttgcatgcacggctattatgcaaacacagagaaacttaagagcgacagaacaaggaacaggcagagactgcaaagccctcgcaagctccgacccagctgccggtcctccgccaggctagattgcattttcgcagtgttgatttaaaatggtgtactcgcttcccccacgttcccccacccccttccccgctctcctcccactccttccagcacaccccccctccagcttttattatattggcaccaatctttccaaagtgggtctggcatgctaaaaaagtaaacatgtactatatggggaataaggtctgtatagtatgacagttgaaacttgatctgtgataaaattacaggatgttgaaattactagtaagctatttttaacgctttcgcaacgtttcacctctagtcacagcatctagttgaaacaggattactttaatgaaaattatattcacatggctgaagttaatacacccggcagagcacaaatgcctcatattcagtgacttgaggtggaaagaccctctgtgtgtatttttatgccttttcataacgtctgcgtccgctgcagtaagaattagggcacttaacattatctaaaccacatttttgattcagaatatggggaagtaataaaaggcaaaatctatctcgtttctatacacacagagataaacgaaagaaaatggcagatcctctaattacaataaataataaaagcccatgccaaagagccggtattctgaaagctgtcgaaaactattttaataatttaaagtaatatcacaactctgcaccatggaggactacaattcgcagtctcccatctttaacattagccaaattatgacttgcacatcactctttaattatctcttgaaatttcatctgatctttctattttataaacatgggttacaaagagaaattatagctctcctgcgctttctctctctctttttaactttataatgcatactgcagacgtttgattagaatcgcccattttgttcatttttaacatatgaatggacttgactgaggggcattttacatgtcttttttaaaaatagatatgcctaaagcttctgttagtctctgtcgtgttagcgtaaatatatacatccagttcaagaaatcctatattaaaaaaacttgagttgcagtattttgacaagatcgtatttgagatcgactctgagtcagtttcctgtatgaccaatgcagcagcatttatgcaggaaacctcaacagaatgcctgagggtatccctcaattgtatattaaatctctttcttaaaaaattatacagctctttacagcatctaagctacttctactgtctttggtgctgtaagtctttaagtgtgtaacgaacttcatctaattagaaaccctgtttcttcagctcttcaaggtaggcactgaactaggatgcatgctgccttatctctccgataaggtttctgagatgttaacaattgcagggatctgggtctgaatatttttgaatatccgcagccttgtaatcagatgaatgctaaatttcaaaaccgaatcacaggggtatctttccccctctttttacagcactgcccccaccccccgtgaacataataaatctaataaatcaaaccaatactgtgaatgccttttaaaattacagatcacaatagtgtttacccctcccccccaaaaatccctcaattttacctcttctttaatgtgatgtttgataggcacctgtaaattatctgtgtagcaaatatccatacaaagaaagtttcaattaagataaggagattgtattgaaacagttctttgaagtaatgtagttaatagcctgtttgatttctgcttgtgagagagtaataacgtggattcaaggctccatcaatcacagagcagatgtaagacttgagacaccgacacccaggggaatagaggcaaactcctgcagtgcagggtccctgggctaatgtaaagtaaatactcataaacagattgaatgttgtaagaagacaatccattcaggacagttataatcatgaaagcaactgctttatttatctataaaaaagcttgtagctggaacttgctgtgtataaaaggtgggagggagagtagtatatgtttatatgacccactacttctgggctctttcttgtactgaaacacagaatccggtacccacacacctatattcttgctgctttactagccaaaaatccaactctctaagttaatctcgtgtatttacacggtaaaaaattaaaaatcattcttgcccctcaaggggatgggagagcagtagacattattcagtgtctgtgaatcgcttcataaaggatcaggaggattaagttagttgcaaaaaccagcagtgacataattaggcagcttggactataataaacaggatcataaaaaaagaaaaaaaaggaaaagtacagtttgaagaaagaaggcgaccatttcgaaaatgcaaacctctctgcgtacccctgggcctcccctcccccaaattgcaaaagacaactgaagcatttttgaccttggctacaataatacttcatgttttagcactttagtcagcattttatctactaattgctacacactaccgcatgtggctcgaatctgccactgcagctttctctcattggtgagcgaattgcttgataaagactgggaattcaacctggctgtttcctttcttgctccccctcagccatccacccccccaccccttttctttcctcttccagctagaagccactaattttcccagaaaataccacatggatgagaatagggacagtgaattgttccctgatctctctccactggttaaagctcgggtcacttttgcgatccggaggcaaaacggaggcggtgaaggggggtaatggggacgaggaattagggggacgaagcgaggggcgagtggattctggcctgttggcggacctgatgctaggtgattctgaacgtgggtcccttgcccagtccatcgctggttggaagtctgtggggctccacgctgcccacctggggacctcgagttaggcacgctctcctgctcttgcttggtcagtaagtggggttcgaaggggtagccctggagtctgcagactgattcgtaaagaaccagcactgtctgagggtcagccaccgcctggtcccatccccctctatgcctggcgccatcgtgagcggcgggggcgggtggcgttattaataaggaggccttgagcagagcaggctcgccaagccttagtgcaacaagtctattggtttgaaggaggatcaaccgggttatacgggtcattgctttccaggagacctctagtggtcaaaggttgagctacatctcaaatttgggtctattcgtcgcctgtctcaagagctgtggtgggggtgggactccagcccaggtccaggtggtaaaggctggaagcttcagaaggatgggtatggggacagatttctcatgaacttggagccggagccaagagagacacagggaactcggagcaagtgatcccctgggaagggtcatgtgatgccctttgtgggcactggaagccccaagttcccctgccctcgatacagatggagacttcctatctcatcttgattttcctcccgagtctgagattaatcaaatattatgcaggaagttggattaaatttgctcaagcctttccagttacaatagcaatgctgagtctgtttattttttctaatttgtttgtaaattaaagccaagtcccattccctcaccccaatcacaaatacaccctaacaccccttaattttaacaatttcattgccttcaagtgcccttgacatttatgggttacttagtatagaaataactaagctttttttttttttaattgcctgcactgcggggtacatatatgacgtttggctaaattgtaatcttgcccctctattcagaatgccacggcattccatctcaaatggcagggtgctggaggaaagggtagtggtgactcaggctttcagactcatttgtgatccacatattaataaataatttgatcaaatttccccccagcatggtattaaagaaattcctgggaacacctatcataggtcatactcaaaacagaggtcccaaccatctgaggttatgaaaacatcttgccatacctgatttttttttaaaggagacaagaaa

SEQ ID NO: 5021 - DNA, 6000 bp, Homo sapiens
gaaaagacccaagaaggaagcgcacattttagtcattgtccaggcttggagagcaacccctgctagcaatgcaccagttaagcatgaacttgctagtcctggactcttcccccttctttttgcaacctgaatttgaaggggattctagggggatagagagaaggatcctttccccctttttggagttccatagcttggctgcatgggaccctttctggggaagcagagggaaagtttaactgtgaatgaagcttgaaagtgttgatcaatggcatttacattaaaattaaagctgtatattgtgatttaaactgaccaaatgatttttattacctgtgagcaatcagaaaaatttcgggatcacccaagttttcatccaggggtggggacagatgtcctcatacggaatgcctgtggaagggatggtggcagatcgaggtttgccatctgcttcccttcacgcctctgtcctgcttgttctgcaagctggtctcatctgagcccagagcagcaggctagttcactgacactcatagatttggcaggagcatttgctctttgaatacattgatgtcaggaggtacacttcagatagggaaacaggaaattactagaagacctgaacaagaatggcaacttgaaactggaacacacaagggtactgggtgtctggaagccaactgaagtagaaagatttccagagaatgtgggaaattaccatccaagccttcggccttggcctctaggtctccagtttactataaacagcaggtgaagactttcagtaactagaaaggaagcctcattgactggcgattgaaaatgtcaggggtgcaatgaatgcgtgtctggtaatctgcccagtgtgtcttctctgggaaacctctgctcataaacagggatgggccctggcagccatactggtcccctgcagcccccatcatctatgattagggttagggttaggcaggtgatttagtccttgtgggtgcagctctggaacatcatttctctgacactgggacataggagccaggggctggttatcagaataggagaatagagcacaggtgtagagagagcacctgctatggaaaaaaattccattgagttcctcctggcttttcaggtctgcgatctgggtcttcctgaggactaacttatttttgcctttgggttctattatacatctatctaatctatcaatcaacgatctattatctatctatcaactatctattatctatcatctatctatcaactatctattatctatcatctctctctctctctctatctatctatcatctattttagagacagggtcttactctgttgcccaggctggaacgcagtggcaaaatctctgttcactgcagcctagaactcctggcctcaagcaatcctcccacctcagcctcccgagtagctaggactacagctgcacaccaccaaacctggctaatttttaaattttttgtaaagatgtcttgctatgttgctcaggctggtgttgatttcctggcctcaagtaatctttccaccttggcctccaaagttgttgagattatgggcatgggctactgtatgcagcctcttctgtctatctaatgaatttctgtcctctattagggtgaagagatagcttttcagtggctttgaagcattgtgccaaatatttcaaagatcacattttaaaatctactttttgatttatttagttgctgcaaattttgacttatctgtcactaatcagctggatgtactgagatactttgacatttcctaatgtctggtgctttctctttctggccctccatagtgagggctggatctcttcccttataggtatctgctaatgctggaggctcaactgataaagtaaagatagccatcccaagaagcaggcggaaaggctggggctaatagaacagatctctactccaggggcttcaattctgccctagttctggtcaaataggattaatactgctcaccgttactatcctaaaagggctgtcatggttgaaagtgggcatttactattttcagtgtcttttgttgctggaataaaggagatgataatatgaaacaaaaatcaggttgcttctcctcatattttgctcagctcccaagcattcagaatgtcgttactaattagacatttgtttcaacattctggggccatccaggctaggcaatcttgtgatgtggggaaagttgactggttatgcaatggctttgcattagatcccctgctcccttgcaggcgctgaatgctcttctgttgttctctggatctagaaccctgtcccttttctctgggatggctcctactgatgtttcagcttattcctcatttgctgcaggacagtctccttggccccatagtactcttgatttccccatcacctgtgcagtaatagtttctctatagatccaccagtcttgtcttattcattgttatatccacagatctaacctatttctagtaaacagtaggttcttcctagatccattcctgatgattggcttaatgaatgaatgctcattttactggtgactctgaaaaaggaaaaaaaaaaataatgattttactccactatcagcaactcgatgttgcccgtcaggaatccttgtaacaaaatacaaagttaccattgcctacgaggtcctcacctccttctccaacctgtctagtagcactctccttatgcaccatgatacccatgctggctttctctctgttcctgctatacatcacttttcttcctacttcaagtcctttgttcttgctattttatctgccctggagttttgctaagttggtgttttcttatttaggtggtgcctcaaatcttagagcatttctcttagatcatttctccttaaagcatttttctcctttcccaaaattaagtgtgtctcccatccctctggtcactgttttcttctttgccctgatcccggtctggaagtttatctttttattggatcattgtccatcttctgataaaaacagctgcaagtctgtcttgttcaaggctatactctgagtgcttagtagaaagcctcgttcattgcagtatctagtatttgatgattaatattgattacgtttgatgagtaaatgaataaaagaataatcttagacatacattatttaatcccagtgaaagaatgttagtgatggaatttcaggtgttattgtagaagaaacttttgaagggtattccctacagtttgttcatactaggctaagttcctcttcttttccttacacaatgtaaaaatattagatctcaaaactatttgctcaaagtacttactttaggacacgtatttttagactacagtttagaattacagttattattagaaaggtttggtaaaaactctttttgttaggcaataaggttattctgtcctccaaagacctttactttattctcaggaagtaagagagaaaaaagaatttcttgtcttctttctatcaggtgttttgcccttacttctctttaagtttatgtttaccttaacattcctttccttcctcaggtttgctttttgtctatctccatttttcactattacgtaattcacggagttgctggggggaagtgcttaatttcaaatagcctgttttagaactttgcgagaatgacaagaacaaacagaatgttaaggcagctagagagagttaagtgagagtggtccctaggtgagaaatgcttcttgccttctaggctgacaccagttctgggggatgtgttctgagagctcatattaactgcaggtcattgatccttatctcaatccccttcctctcccttcagctttccattcaaagtctctatcacatcttgaagtgttgtcacattattttttttctgatgattccctccatcagctgagctttccaatttatattacctgatttttttttgtcttctgctttttactacccctttttctaaagctttattgattgtgtactttggattctaattcttcctataagagtcttcctgtaattctgtttgcagtgtagtgctgtccacattatgtgttggttacatgataggaaggagtatgggggcacctcggtcacatatgtaaagttctttaagagagctgaagggcgctgataccagttcatgttttttcggggtagccctcagatattaagcatgtttactgtattttcttctattgtgaaagaatcagttctctggatttccttaaagtttgtctttaccattctccgcaccctactcatttttctatttaagaatttttttttctaatcatgtagtacatgttcaatatggaacacaaaaaggtaataagaaaaagtcacctacagtgtcgccaaaggtgaaaacaccttatgtcttttttcgtgcataacaatatccctctcaatcttatgcagcatttttaaacctaggagacttgtctgaatccaaaggaagttaaagattacgttattcaccaagttcatactgaaatcagagaatcgcagcggcttaagaaaactcgcatctggcgaatgaacctgcgtatccggggttctcctcagggaggttgctcgtccatgaaacacactccagtctgcagccacctgggagtgggaaccaagggcgagcgaaccgggcgggcaggggtggaacttgcggggactgcgggtatgaggaggagctacagagctgtcaccaatcagagcccagctttgttttctcttgccgaccaatgagggagttctgctggagaggcgtcttcaagtctgagacgcctatcgccttcgcagcctatcagcaggcccctcttacccgcgggcggtgcagccccgccccgcccctccaaccgcggtcccgcccctccgagggtgggggccgtgttggttactagccgggctggaggcgggggccgggctcccactgggctcgtgcgttctgcgcccgccgcggcggtgccgagcccgctggctcccgattgtcctctgcggcggtggcggtcgctgcctccttgcctccgggcccggggctgcaggggccagagcgagtgcgcctcctgcccgcggaccgcggcagcccagagcaggtaatggggcgcctctggggagcgcctgtcggagcccagggctaggctcgggcggtggggtcggcccccgaagctgctccctgcgccggcgaccgggccgagcggtgccgcggtcctccggagcctcctgccggcctctaggcgcctcagcctgggagcccgcggcgggcaccttgtgaggaggtgggggcggggccggggcaggggcggggccgcctcgggcgggaccctgaggacccctggagacccctgttgacgcgcgggactccgggcgggggcggcggcggggcagacccagagcggggagaaccgacaggtggaggaaaaactgcggagttgagtcagagtccggctccccggggaaaagaaccgactgaaagggagcgataagctggctggcttcttttttttctttccctaagccagaaaggcgtcttcacttgggtcgtgttaattacatgttttctgagaacaggcgtttggccgtgtaatctacacgatagcattatttatttacttatttgctatttaaaaaattaaaagcagcatttagcgtgaatctatttgggggctttttcttaagtgacaggtagacccagccgagtaactcagctttgtctgggctgaagtggggagcggtgaggtaggaatgagggggaggagtgttcgtgaggaatgcctgtgcaggtttgaaaggattgtgggggtgggaccttgtttctgtcactgtgccatgggtgggagtagaattgtgatttttttctttttctaatttttaaaagcaatattcacatttaaaaaagggggggctctctaaaaacagtctctgtactcgaggctttggggatgcacctgctagtcaggcagtaatagtttgcaggtaaatcctgggctatt

SEQ ID NO: 5022 - DNA, 6000 bp, Homo sapiens
caagattttccttcttacagttgtcactttcttgtacatccagttattacagcatttgtattagcatataaatatttaaacagaaaacctcaatcctgcatctcttacctactatgatcctatttccctgctctcctttacagcaagaaagcaatgattgtatttacttgtcgtcaccatctgttatctcaagaatcaggcttttaatcctaccactttatcttaattgctctgttcccaaggtctcagtgatctctacactgacagttcagaggtcaatcctcaactgactcagcctctcagtgcaaatgacacctttaggcacttgtctcctgaaacatttcttcacttgatcaggactcctctgttccagttctcctcttaactctgattgcttcttctaaatttccttcttatctctacagtaccagatgtctagcctttcagtctcttcttttgctgcaattatgcaattcggacttatgaacgtcctagatcggtgactttcaatgattttcaaactgtaggccacaactgttactgggttaaaaaaatcaattgagttcggagtgaaaaatttaaacagaagaaatcgtgcatcacacgtaggaatggtaaatttgtttctggaaacttttaaattatatacatgtatttggttaatatgtaaaatgtattttgtattttgggttgaggtcaaagatatgaaaataattctctgtgtgatctcatccaatcatgtggctttttgaataccactgcctaatcttcaatttatatctctatatctctcctctgaattccagtctggtgaactcgagtctggtgaaactatatctttattaaggttattaataaaaaggaaaaagtattatatcaaggcaacaacaacaacaacaacaaaaaaaaaggaaaaggcatttagatttgggaccaggaaacgtgaattcaatgttggctctaccacatagctttgcaacactttactaggttattgctagtttcttcctttgtttgcaagctccccattagtccttacattcatctattctagtgggaacactagcatatctgttgtattagattgggtggcattatagagccatgcactgtacatttgccatatattttgtcatacataacacattttattttattttatttcgagatggagtttcagtctgtcgcccaggctggagtgcagtggcgcgatctcggctcactgcaagctctgcctcccaggttcacgccattctcctgcctcagcctcccgagtagctgggactacaggtgcccgctaccacgcctggctaattttgtgtatttttagtagagatggggtttcaccttgttagccaggatggtctcgatctcctgaccttgtgttctgcccacctcggcctcccaaagtgctgggattacaggcgtgagcaactgcgcctggccaacacattttattttttgcaatgaaactctttaaagaactagaacatggttgggcgtcgtggctcacacctgtaatcccagtgagaggtgaagccagctggacttcctgggtcaagtggagacttggagaacttttctgtgtctagctaaaggattgtaaatgcaccaataagcactctgtaaaatggaccaatcagtgctctgtaagatggaccaatcatcaggatgtgggcagggacaaataagggaataaaagttggccaccccagccagcagaagcaacctgctcgactccctttccacactgtggaagctttgttcttttgctctttacaataaattttgctgctgctcgctctttgggtccgtgccacctttaagagctgtaacactcactgcagaggtccgtggcttcattcttgaagtcagtgagaccaagaacccaccagaaggaaccaaccccgggcacaccagcactttgagaggccgaggcgggcgggtcacctgaggtcaggagttcgagaccagcctggccaacatggtgaaaccctgtctctactaaacataccaaaaattagctgggtgtggtggcaggcgcctgtaatcccagctactcaggaggctgagatgggagaattgcttgaaccagataggtggaggttgcagtgagctgagatcgcatcattgctctccagccttggcaacacaagcaaaactcgtctcaaacaacaacaacaacaacaacaacaaaactagaacatggttgatgggttgatgtatttaaccatttggtagggagtcagtgtgactggttctggagataacactgatcacttggctcaagcctgaattctttcttatgtcttcatgtcccacaaactgtaggagagggtaggtaatttccctatgtgggctaaggcaaaggaaaggcagtgtattaggagtccccattaacacaagcagggaggatttggaattaagctgttgccacaaggccagtatgcctcttggagtgagcacctggtgccctatgagcaattcccttactggctgccttacattctgagtgcaacagtttcttcccaattgtgctttgtttccttgctggcaatccgccccccccttttttttttttggagatggagtctcactctgtcacctaggctggagtgcagtggcatgatcttggctcactgcagcatctgcctcctaggttcaagtgattatcctgtctcagcctcccgagtagctgggattacagatacccgccaccatgcctggctaatttttgtatttttagtagagaggaggtttcatgttggctaggccacgttggccaggccggtcttgaactcctgagctcaggtgatctgcctgcctcggcctcccaaagtgctagtattacagacgtgagccaccacgcctggctggcaatcccttcttgaactacactccaggtggcaagaatctggacccaggacctggacacgttcaagttgtcagctccctttccctcaggactctgacctcctatactaataccccgtcgccaaagaccatattggttaacatttacccaacactgtatgtattgggcacttaaaagtgttatacaggcattacctcattttgtctcataaccactctattcagtagatatctttcagaaagctgaagagaggctcggaaaggttaaggaaattgcctagacagtaatggttgcgccaggactcaccctagctttgtctccatgagtgctgcttatcagccctgcatagctcacagatccctgttgaactacgaaggttctgccgcttcctgtagaaggatgacaggattccatatccattcatcagtcagccaaccctttggctcaacaagcctggtctaggcataagctataccaatggaagatattggtactaccttcatggaacacctgctgccagaagcagtagagccaaccaggttgtggcaactggccttgataacctattttccacagtaaaagacaaatggagaaaattcatcatttttctgctctttgtaatactgtattgtaagtgtgttatagaaatggagatgttttgaccttgctgatccagaggatatcttgagcacactgttttgaacctgacaatctgctttttacttagccaaaaattcaaagtggtcagaattgtagggaggaattgattagctatatgatagatcactccgggacaacagaacaactatggaatatttgagaggatttgcttataattcactcatgaatttactaagaaatacaaattattcatcttttatgcatgattatgggagaaataaaactggcagtggttgaaactatttctgggaagtttgatgtaggaaaattggatttggtagacagtgatgaaagtgacagaggaataatgagagttttatgtggacaaaagatgaatgcagagtctggcccggtgcagtggctcatgcctgtattcccagcactttggcaggcagaggcaggcggatcacgaggtcaggagattgagaccatcctggctaacacggtgaaacctcgtctctactaaaaacacaaaaaaatagccgggcgtggtggcgggcgcctgtagtcccagctactggggaggctgaggcaggagaatggcgtgaacccaggaggtggagcttgcagtgagccgagatcgtaccactgcactccagcctgggctacagagtgagactccgtctcaaaaaaaaaaaaaagagatgaatgcagaatcaaatatttagacgtctgtatgtacacagagatgattcccccataaaaattaaaatacaacttaaaagtaagaagtcgtataaacctccttcacgtgctttctctggctgagaggctatgctgtgggaatctttcagtccagattagggagcgaaagcaaacaaaaatctgtcaaggcaaaaaccgttattacttattccttcgcttttcctcccgtttgatagcctcaggtaagaaagtattttccatcttcttctccaagtaaaacatccttttgccagacaaaatttccttttccttccaaaacactaatattaataacatgtagtcagggccaggagacactaaacgacacacacagagctggggaagtcttttcggttccaagcccagtgggttgtcgcctgggcactgcgaaggggtggaagcacagaaaggccgcgcggcggcacccgctgcagcccgcccccagcgcgctgcagtcgccggggcaacgcctccacccaactcggccggacacgtgacgcccgcgtcacgtgacctgccactcggtgtcctcccgcggaggggcgtagggtgtaaacaggcgacgcgctgggggaggtgcggccttgctgcgtccacgtctcgggcatgctcgaggcgggccagggcggtagcgccgccagctcagagcccacctgaggtaactcctgcggcctctaggatcggagtcccccacgccgcgcgcagccgccgccgctggccgccaataagggcggccgagcccccggcccgggcagggggtgtggctgccggcagcgcgtcggctacaggtgggctgggctgggctgggctgggctgggctgggtgggggcggccgccaaggacccatccctgcgctgcgggcccggcgtggagcccgcggagaggcagcgcgactccaggcagtgggtctctctgccccggtgctcgcgtctgcccctggggccgggccgagcggaaccaggaatcgcagaaacggtcagcgcccagggctctaggccggccgccccgggtgccaggtgaattcctttccctgaccggctgtgagacgttggcccgtcagccgtcgtctttggcctgagtgtgcacatctgtaaaatggaagctcggactagtgatccgtgaggaccttccacgtctgacgtgtgatctcgagagacctgcgtacattcggggtgccagaaggaaagcataggtaactattttgtcctttaattgctaacttttctttggtctttaaatctgttttcatcttaaacgattcgtattcctgtccacctgggtgaagtttttaatagaaaacttattgggtgggggttataatggtttatgttaccgttttcatgtttctttaatgcaacaaaacctttttttcttaaaacctatttggaagcccaaattgtaaaaataaataaataaaaatggaacccttttctgcctcactatcactattctcaccacccatccccacgctaactacccttgaggacccctgcaagtcataggttgaggagctctgtatggagttgaggaaatgttttgtgtattttttaatttgatgggatctggaaaatgaattctttgcatgtgtggagttttctgttatttttctctttattttgttcgattgcatgctatgtaattagacagctagcataaccctcacataccatacttcggggcctttttggccccaaaatttctgataaagacgtttctctttccatgtttccttgcatcccagtccctggggaagtaagtgt

SEQ ID NO: 5023 - DNA, 6000 bp, Homo sapiens
atttcaaatatgtcctgtaaccagcccagtccttggtttgtaaatataaatgaacaacaaaagatcatcagagtatttgagaaccgtcatgttataaaaccctagatgtaaaggatggaactgagcaaccaaccaagtaaaaacagaaataattcaggaagacaaaaaggtattgcatccagcagacaagaataaacttctgtaaaagaaaatctccattaataagtaaggcttattacaaaataagttgaccaacaacaacaaaaaaatcacttatagagttcaacaataaaatgaaataatccgaagactaacttagacatatggaagataaaggtaagaacatagatgaaaaagacaaagatgaaacgtataaggtattccagaaggagaaaacagaaacaatgaaggagaaaaaaagatcaaagacataataaaaggagatttgactctctaccgaaagacgcaagactgctgtgttgagtagggtatatgaaagaaatgtccactatctagatgcagtcaaatgataaacattccaaggtaaaaaaattctaaaaatttctggagatttaaaaaaatacttatctacacaaagaagacaatgagacataaaacatacttcttatcagtaacattgcattctagaaaataatggaatctgaaaatatctgaaaatacattgagtaataattatatattttaaatattgtttgttgattttcaatttttagaataaaccatttgagaagacacagtatgcaggcttaattatagctggagaatagaatgttacagacaacaattttaacaaatttgggtggtataggtggaatgaggaaggaagaaggtgttgcaggataatggattccccaaatttcaaactgaaaaatcaagttctgtaaatcggtaaatcaggaaatagaggaatataaagtgtaattttaaaggtataattttaatcatcagaaaaaaatgaaaatgttaattgtgaatgattcctctggggaatagatatacaatcctgtagtatattatgttttttcatgcattgtattacacacacacacacacacacacacacacatttatgtatacaagtaatgcctgaataggattaaatggagccaagggaggaatgaagatttccaggagactgcagcttctgtgaccagtctgcagctttggtggcctctggatgcagatgtgactttgtattgcatccctgttgggagaccatagctgggtgcataattgcatgcatgcacaatgtttcaatagtattagggaggggcatctttggcctttggcatcataggtgtaggatgtgtgcgtgtcatcccacagctgcatggtactccacctatcaatgtacctgccatgccccattcctcccctgcttaaactctgctgcccagaatcttatgttgaaggatgaacaaaacaacactaaactggtatttgcagagggatagccggtgactggatttcagtcagtagcctgctctgtggtctgtagtgtgaccctgatgcttagagttgaaggaagtcagttgaattccttatctcagcaatttgaattcagagtggagaaatctggctggaagacaagaatgttagagagttgctgtgcaaaggtctctaaactgcaaccttgagatccttgctgccacccaagtccacagctgtccccagctcccagttcccaaggccctgtcttcatctacctcgtattcttcagtccaagagattccatcttcatttttagaccacacattcccttccaataacaactccttttacgtgagcgaattgagaaagtctcttccttgtagccaaaatcacccaaattgaaagaaaatcctgacaactatgttcagtttgcattcagaagggaagggagacctgttgatagctgcctcctgggatagtggaacaagctggctgcattttagtgcaaccccagcccataccacaagacctgggtgcatcaactgagattgcttttttttcaagaagagtaaatttttaaaattgcttatttttttcttcttgtttaaatattgggctatttgcctgacagttttaagatatttctgaaagcttccagtctttaaaatggacttaggaaaaaattaagaagaaatcaaccttaattctctttaatgacaattttgtttttcagatccagagacgacagaaactaatttgtttctgaaccttcaaaatagggaataagaaatgattggaagatgtcagactgactgccttcccttttttaaagctctcctagagatcccttcctagtaggcttgagaaagagagaagttgctggatgcggtggctcacgcttgtaatcctagcactttgggaggcagaggtggacagatcacttgcggtcaggagtttgagaccagactggccaatacggtaaaaccccgtctctactaaaaatacaaaaattagtcgggcataatggcatcctcctgtaatctcgggagccagaggcacaaaatcgcttgaacttgggaggtggaggctgcagtgaccgagatcgcgccactgcactccattctgggtaacagagcgggactccgtctcgaaaaaaagaaaagagagagaaagagaaaaacaacccctgactgcaagcaagtggtctggcaccatcagccaagcattggtatcctcctcttgaacatacaagttttacaaaacatcaggtaaggccactctgagatcatggtggatcaaataggaccgctccaaaattatgtctgaacatgaatattgtacaaaccacaaatatccctttctatattagatttatcaacatacccaacataaaattaacccagcttcctaatagcattccatctagagtaaagccccacttctgtaagccccaaaatcacctcagtcaagcccaaatcatatctaataagttatctccaatgctttttaacctttctaagactttcatactgagacgccccacagtggcccatggagtgtgccccctccctaaaaaagtaataaactcaacttgttcagttccagatgtgttcatctggggttttttgacaggaatgttatgttgctccactccaatcctgttattacttgtctcagatcatcgaagagcagttcccctggcgtaactttcttggccctcccaataatcactgatgtctaccaagcatttaccacttgccaggcccttcatatggattaactcatttgatccccacaatgaccccgtgagtagataggtttagtaccaaatttacagaaggacaaaaggcacaatactactaagtgacttagtgagccgtctaagtcagctggttggtgggtacagggctctaacccccacagcacactgcttccttccacagcattcatctgccacactatgctcttccgcttcactgaatggcgtgtggtcactgtgtcatcagccaacattgaaggacactataaactagaataaactgcaccaggaaatcattgctgggtttcctgtaagatgtgggagaatgctgacccacaggagaaaacaaaaattctctcagctctcagtattggaaataacttctaagcttcttgtgagcagttagatatttctcaactaatggagacattaatcacataatttgcaatttttcaacttgattttaagaaaagtatgacatgattttaacttgactaaacctaaccaggaaagatattccctttgtacttttctttcaatgttactaatgtggtcaagggagcattcctgcttggtattatagtaatatgactaattaattctatatctccctttataacaaagaaagagggagtttgaggcagagagctttggaaggcactaattaatatctagagagatttcaataacatagttcatcatattttagctatttttgtaattactttccaactatagccaattatacaggctttccatttacaaatgatacaaagtttctttttaaaataaatttatttgagtaaaaatttgaggacatttaaagaaaaatattaagtcaatagtagtacaggtggtaggacaccaaacaagcaaacaaaaatcatgaaggtgttttgggaaaccccgacttcatttcttgtgttggacgctggaaagaggagagtttaattcatggtcattgatctcaagagcacaggtccttgaatttgagagtgcatgcattttaccttctaatggcattcctggttttatcattcctctcctcctccactttcccttcttccgtcttatcttgctacccctatatttttttcaagaaaaaaaaataaccaacaggggtggggtgcggtgggggatggcacaataaggaatcttcgagtagtaaaagtgagcagggctacccactggcccagggaggtgcgctaaactcgcagaaagcccagagggtctgactgcctctgatcctaggaagttttaattcaagctgggcagtaacggggtttctaaaattgcttggattctttggccctcctgcgtcccggcttcgggtcagcatgacagcgtgaaacgtgttagtgaattaaagtacttcggtggaaaagtaaggcggagctgccagagatgctctcctcctccgcctttctggctgtgctgcaccttgaccttcagtcctcctccctcctctttccgccccctcgtgatggggaagttcttgggaacctcacagaggcccgggggcggggataccggacagggatggagactggccccgagattgggagggggatgggcagcgctggagaataacgccctggagacagggcagcgcagccccagactccctggaaaacccagcagtctggaaaagctgggtttggactcacccctctttgaagagttctcaggaagtttgggggaggggcgagccgcgcaccagttctaccggcatcgggcgctgagggtgagaagggaccacaagcagcagcaggtctcagtgcttgtcatattcctgctcaccggtgggctccgggcacgcccggcagggtcctgggggcgcaggcaaggggacgtaggcagagtgctccggccagcatggagggactggtcttccttaacgccctggccactcggttgctgttcctgctgcactcgctggtcggggtctggcgagtgaccgaggtgaagaaggagccgcggtactggctgcttgcgctgctcaacctcttgctcttcctggagactgcgctcaccctcaagttcaagcgcggcagaggctacaaatggtgagagtgccccgggaaagcgagggcgcacggggccctagggtattgtcccccaccgcactcgcaggccatcttcccgcaacccgcagattctactcgaatttggaccccgtttttcctcgctgatcgcttggaaggcgcgagatgcttgcgcatctcttgggcaccccagggccaccctagggtcccagtgcaacactgggaaggctcgatctgtgagcctaggcaagagtcacccagtctcaggtttggaaacttggaagatgagtaaagagaggaagcgctggtctattttgctgaatgtgcccgcaaataggggagtcttgggacaaggaggttgccatgtagtgtgccttctgaaactggggtgtgtgagtgtgcgcgggttactctgcgtgcgtgcacatgtgggaatgtccttcgctgggcatcagcgaccttcgcaagagctgagcacactggccaccctcctaagacgagaagaccctcgctgcacgtctgtggtttcatccgcttcccttccctccagccgcgcgcgtcgcgcgttctctagcacagcgccagcttcaggtgtctgggtttgctggctttggggcttggctaacggcctgcctatcttgcaaggaacgggttgtaacgctggtgaagggaccagcaggtagtggttcagtcttaacgtctgtgtgcaataactacacgccacgtgtggtgcttatttcctcc

SEQ ID NO: 5024 - DNA, 6000 bp, Homo sapiens
aaaaattgactcgaaatagaccataaccttaaatataagacctaaaagcataaaatttctagaacaaaacataggaaaataaatatttgtgctcttgggttaggcaaaaatttcttaaatataacatttagaccatattccataaaatgaaaaaattggtaagttagacttcaccaaatttcaaaaattttgctcttcaatgatgctgttaaggaaatgaaaaaacaacccatatactggaacaaaatggttgcgagacatataactaataaatatatgatatatataaaacatatatctaataaatattgtatcttgagaataaaatataaataattcttacaactcaacaaaaagaagacaaatcaataagaaaatggacaaaagatgtaaacagaggcttcaccaaagaaagcatatgaatggcaaagaaacacatacaaagatgtccaacatcattagtgttagcaaaatgcaaataaaaaccacagcgagatatcagtaaacactcattataatgccaaattttgaaggactaataatagcaagtgctggtgaggatatggagcaactgaaactataatacatctcttgtgggaatgcacagtagaacagccacttgagaaatcagtctatcagtttcttataatgctaaatatacacttaccatgttccagtaatatctctcttatttatttatgcaagaaaaaggaatcagatatccacacatatacttgtactcgaatgcatgacagctttatccttaacaaatataatatattgatgtaacttgagtctaccaaaatgtccatcagctgctgagtggataaacaaatgtgtgtatctatatctagatgaatctaaaaaataaagtcagatacagaagactacttactataatataccatttttatgaaattctagaaaagccaaaactatagtgacagaaaagcaaaccatagaattgtaacttaaagcaatattacatataaaataacaaacattttccagtgctatagaaaaaagggctttctcatacatttatggtgggattatgaattgcaagccagttgggggccaatttatatttaatataataagtctaaaaatgtctatctgagtcagcaattctcctgagatttattttaaggatatagttaatgatctgtatttaagcaaatttgtataagcaaaaaatttcataatatccaaaatggccaaaataaaacattgttaaataaatgatggtaaatccattaaacaaaatagcctacagtgacaaaaaatgttataaacatttataaacattgattataaattgtctacaaataaaatctcaataaaaccctaagagtagatgtattttaagatcacattatttgattaaaattatagacaactagaaacaaataaccgaaatagaaataatgctaccatacaattatcttacaaactttgtcctcaacaaacaggaaataaaaaatgcaatttcaagatgttaaatgccaatttacatatgtaaaaacctatggaacctagccaaagacatatatatatatgaagagaaaaatattcatggttttaaatattttattaatgcaaaaacaaaataattaagaaaataaaatattcatttcagaaaattagaagaggaaaaacaaaataaaagacagcaacagaatagcaggaaagataaaatttaatattagaaaaaaacccaggaaatgaaacagatatgcagtaaggagcagagaaggcaatagaaattctagttctagtaatttcctgagttctcattgtcacctcaccttggggaatgcaaaataatcctgtatctttaaaaaaaaaatcacttttctgtttcacacaaacttgagttggtttttatatgtaaatagccttaataactttggagttgggataccaaatccagaaagtataaagtataagactgaaatattcggttacatagacatttttaacctgagccagcaaaatatctacacatatgtttaaaatgtataaatgtataaatatgattgaaatgcaaataacaaaatgaataaatatattcaatgaatatatttcagtatacatatatatatatccacaagatacacagaactgacaaaggtttactatctttactgtacaaaaaatcataaataaaaaacctctctatataataaaggagccaacatcataaacagaaaactgtgtcagtaaaaatacacatgggtaataatcttattagaatatagtaactctaactgacatgtaaaaatcaaataatgccaacaagctacttcttgtctcccagcttgtgaaagattaaaaatagtagcaatactatgctgtggggaagctgtggaaattggggactctaatgcaaaatgctgttggcaggaatttaaattgggacacactttcagctggtgaacacatatttttggttgactcaacaattctccttctcagaatttatctcaaggaaatacctagaaaggttagcaaggtcgaacataaaaggagtatcaccacatcacgggtacagcagtgaaaagctagaaacaacctcaatgtccaccaaaaagggtttgtagaaataatttgtggttgctttatacaatggtaaatgtgatctattgacatgaaaggattgccatggcaagttgttgaaatttttatgaagcagattataaaatagaacatagagtaggactcaattgtattataaatgtgtgcatggtgctacaccagatgtttgtctcctctgaaactcatattggtgagtttcagtgtggcagtatggaaagttgtcacttttacgaggcaatggaattatgagggccctgccctcatgaatgtattaattatttcatggactaatggattaatggatcgatgggttttctccggggtgggactggtggctttataagaataggaagagagacctgagctagcactgtcagcccacttgctatctggccaccatgatgcgcgccctgtgccacctcaggactcagaatcctcactagcatgaaggccctcaccagatgcagccccttgaccttggactcctcagcctttagagccataagaaataaatttctgttctttataaatcacccagcctcaggtgttcagttatagcagcaggaagctaagacataaagctgtaggtatgaaagtctttgcccaactgtgaacacaattacttcttgttggataaattatttattatatttactttcttctttattcttgccagttccatttgaatacatttttgtaataggcctatgtaatacaaaatacaataataaatacaaaattattttccacactaggaatagggccagaaggaactaactactgaaattctgtcccaccctttaaaagtgtggtcaaaataaatagacttaaatggaaaaaatagtaaattttcccaataatatacatgttttgaggatgtaggaaagtgtgcaccttcattgtgttaagggcatggtgggtgactggtatctttttctaatgagcagctgggcaatgtgtagcaacagcttcagtaacattcacagactttgactcacttctagaagtctaaccaaagaaataatcagagatatggacaaaggtttatgcataaggatgttcatgcattgttcttccttaatcataattttaagatagaaacaacataagtgtccacagtagtagagtatgtgtgtacgtatctccaataatttattgaacaaatgtttgctgagtgtcttctctgggccaggctctttgagagttccctggaatccagtggtacacaaaacaaacatgtccacctcccggagcatgtcatctagttacaataacggaaaagacagatgatcagctagttccacaaataagttaggtgttaatgaagaaaagtagaggatgaagtaattgcgtttttttgccattaaaagtaaatgtaacttttaatggcaaaaactgcaattacatttgcaccaacttaatattatattactaaataatcaaagaatacagtaaaaagcggtatggaaaacatgctatgaatgtctatttatcatctcaagaaatgatcttttcgccaaatgggagagtttttcgaaagtccagaaatgaccatttataaactatttaccattcaacagagtggatacagctataacgaccaaaaacaagaatgttcagaaccatctctatcagagtactaaaaagtaataaagatgaaacttctcaagatataatttaaataatacgcaaatatgatccaatttgaaagaggaaatttgaaagccaaacctctctgataaagtctaaaaatagagaggtataaaacataaggaggtgtaagcttttctctttccactccacagtacatttgacaaaggtttaccctccttaggattcctcttggaacaattataagagtcaaatcactaatgagtaaagaaactgagcaatgcatagcaaaaacttcagaaaaatccacagacttcgtcaaacttctagaagtttaagcaaggaagcaagtggagatatgaacaaaggtttatgcctaaagatatttgggtgttgttctttctcaatcataattgtgaaattgaagcaacataaatatccacaatagtgaagtatatgtttacatatttccaataattcttggaggagttggggtttcatgttgttgtctgctagactcagcaacgctttgggaatacagatcctccacgccctattatttaggaattctactcctgtcatgatatggtaggctaaacttgcttccatgacacttggccaaggattataaattaattgcatgattgaggaagtccctgggaagaccatgcccaccccttgttcatgctggttggctgtaaccatagcagcctcttactccagaccaaagttcagctactgttaattttatggccatgttcagagttcaatgtccattagcataacccttcctcaggaagagtgagattttatatttgacaataaagtgttagactccatttctaaataccagacttcaaaagataaggttcaaaagtgttataagaagatattcctttttttgtcctagagaacttattttcctgtgaaaatgcctaccacaaagaagacattgatgttcttatcaagctttttcaccagccttgggtccttcattgtaatttgctctattcttgggacacaagcatggatcaccagtacaattgctgttagagactctgcttcaaatgggagcattttcatcacttacggactttttcgtggggagagtagtgaagaattgagtcacggacttgcagaaccaaagaaaaagtttgcaggtaaatgataaactaatttgaatgaatatagtgagattgaattaaggtttatgtcattctatatttgggccaaataaccattcaaaaataatttctttgtaagttttgggttaggctgaaggtacaagcttaactcataattttggaaatttgccatgtcattatttgagcttcctcggttctccttgtgtctattaatacaatagtctatatcattctagcagtggctgtatttaaataatacctaccaagttgactgacaagtaaataagtaaaaatatgtggcagcaatacggcattgaatagccagtaggaacacatgttttaactgtattgactgggtttttagctggagccacaacctctgtctagaacttcacaagtggcatctatgcaggaaagagtaaaatggaaaatttattatctctatttctcaagttcatttctttaactgattttaatttacctccaaaaaatctaatcgttggaaattatattaaatttccattaatttattaattgtatatttgataggaattcctaaacatttttttttctgatttcttatataataatgccctcctctccatggaagtaaaattaaaagttcattgagaataataagttgatt

SEQ ID NO: 5025 - DNA, 6000 bp, Homo sapiens
gtagattgtatgcctctgaagggtagctataggccaggcacagtggctcatgcctgcaatctcagcactttgggaggccaaggcaagtggatcacttgaggtcaggagttcaagaccagcctgggcaacatggagaaacctcatctctactaaaaatacaaaaattagctgggcgtggtgatgcatgcctgtgatcccacctactcaggtggctgaggcatgagaatctcttgaacctgggagtgggaggttgcagtgagctgagatggcaccactgcactccagcctgggcagcagagcaagactctatctaaaaaaaaaaaaaaaaaacataggtatagttataatttgctactagcatacctatgcatatattttctggaaacacctgctgaaggaattaatgaaaaaaaaactttctgtagcttggaatgaggactcagcctgcagtttatcaccaaatttggcaattgacagttctccttagaaggcacctaaaaatattataccatttctgtaacgaatactccaggcccctttatggtagacagttcaaaacaagtatgatggaagaacattagagtggtatattattttaaattttctgacatatttagagcagctcatactcagttatctctaaatccattacagaattattaaaatagtggtgtgcgcctataatcccaactctttagaactctacatcatcaagctttgttcttgtcctctgaacttgggagaatctttaaatattttctgtaggttaatttctatttcaaaatatatctctgaggaaaaagttgtttttgtctatagtcatgctggttactctcttggctgaatatcatttatcatagacttttttttttttttgagacggagtctcactctgttgccaggctggagtgcagtggtgcgatctcagctcattgcaacctccgcctcccaggttcaagcgattctcctatctcagcctcctgagtagctgggactacaggtatgcgccactatcatagattttcaaccctacatataaatgcaggagtgcatttcaatgtggttttggtcagattaaggtcttaataatctagacttttttccttcaaaatcagagaatatattgtaattccaattattctgagtcttattggaaaatgtaagaccacaaaaaacaaagctgacaaacaatattgaaattcacacaatatgtgtcacccatttcaaatgttaggattaatttattttctgagttttatcaatcactatttttgcccatactaataagaaacaaagttgataataaagaattatcagttatctgtttatatgcttcttttcagatacccttatgaacattttctgtggagctaattactcttttaaaagctttattgagatgtaatttatgtaacattaaaattcaccccttttaagtgtacaatgggtttttgagtatatttacagttttgccactattaccataatctaattttatcttatttgtgatataattcacaaaattatataaccagaaccattatctaattctagaatactttcatccctctaataaggaacctcatactcattagcagtcactccccatttctccccaactccttcagccctatgcaatcactagtctactttccgtctctatggagttgcctattcttgacttttcatgcaaacagaatcatacaatatgtggtctttgtgactggctcctctcacttggtataatgttttcaaggttctttcatgttatagcatgtatcataactttattccttgttttctcctaataatattctattgtatgatacaccacatgtggtttatccattcatcaactggtggatatttgggtttccactttttggctatcaagaataatgctgtaggccaggtgctgtggctcatgcctgtaatcctagcattttgggaggccgaggtgggaggatcatttgtgctcatgagttcgaaaccagcctgggcaacatggcaaaacaccatctctacaaaaaaaatttttttaagccagacatggtggtgcgcccctgtagtcctagctacttggggggctgaggcagggggagtgcttgagcccctgaggctgaggatgcagtgagctggcgccactgcactccagcctggatgacaaagcgagactctgtctcaaaaaaaaaaaaaaaaaacccagaataatgctgctatgaacattcacaaacaagattttgtgtagacatgttttcatttctcttgaaaatacctagaagtggaattactgggtcacatgctaatcactctttagaccagtaacaggatttttttctactttaaaaggtttttgacacagccagaaagctgatttttcataaaaatgcaaacataaaatccatttgttggtataataaggtcaaggtgcacaagtctttgctatcaacaaaaggtatcatattttccaatttcagttgaaacagacattctaacattggttaagatcttagaatcttggagtttgtactagtgtacttaatccatatgctgggataaaattctgtttttaagcaggaagtatatatccaactcccatggctgacaactgcttaagaaataagtacacaataaggttagactgacacagcacaaggagcaaaaaataataatttaaaatgttaagacaccgggctgtgcacggtggctcacatctatgatcccagccctatgggaggccgaggcaggcagatcacctgagatcagttcaagatcagcctggtcaacatggtgagaccctgcctctgccaaaaatacaaaagttagccaggcatggtggtgcgagcctgtaatcccagctactccggaggctgaggcacgataatcacctgaacccggaggaggagactgcagtgagccaagatagtgccactgcactccatcctgagcaacacagcgagactccgtctcaaaaaaataaaatagaccaggcgcggtggctcgcccctgtaatcccagcactttgggaggccgagacgggctgatcgcctgaggtcagaagttcgagaccagcctggtcaacatatagtgaaaccccatctctactaaaaaacacaaaaattagctgggtgtggtggcacacacctgtagtcccagctacttgggaagctgaggctagaaggatcacttgaagtcaggaagtggagcttgcagtgagtcaagacagcgccactgcactccagcctgggcaacagagcaagactccatctctcaaaatcaatgaattaattaaataaatgaattaattaaataaaatattagacactggtcacatgcggtgactcacatctgtaatcccaacactttgggagaccaatgcgggtggctcgcttgagcccaggagttgcaagaccagcctgggcaacatggcgagaccgcgtctctaccaaaaaaaaaaaaaaatatatatatatatatatatatatatgtattatatattataaatgtatatatgtattatatattataaatgtattatatattatataatacatatatattatatataatacaaatatatataaaatattagacaccccgattaaactaaatactcattttctttccctaggaggagtgtgtgtgtatgtgtgtggtgggggggggtgggtgctgtttctcaaaaacatatttcaaaaattggaggccaagtaagcttctggtcacattttttgggtttgttgttttttcccagcaatgaacactctagttcaaatatacttcgcaaattttgaacagataatgaaaagttgattgtaaaattctacatataaaaagagctttaaaaacacattttcattttttaaaaaatcaaacaccttgtagcagatattagacataatcaagggaaaactaccagcgtcctaccaatcacagccctagagaaaacgccacaggtcgtccaaaaaacgcattcgtttgagccgacagctctttcctcccgccaaagctatccctcgaacgtcagaagctgacccaaggagtgactgatgatttctcctttttgattccccacccccgccactcccaatccacctgcttgaaggtgtcaacgcgactagaaacggttaacagtgaccagcagcagagagagaaacaaacatccctgacaacccacagctgagtaagcaagagctgtttattcaccaacgtgttccatttggagactgtcggcgagccctggaaagcccaggcacatttgagaaggttcctggagagggagagaatcatctttccttcccccaactccccagccccaaacacacagagagactcgggtggaagctgtctggtccaggcagtccctatttgcccgccccctcaagaagaacctcacgcaccaaaccaaccgacccctcgcggaggtggtgtaattcccccaaaatgggctctgccgcaggagaggctggctccagcgccgggggcttcggaaggagtttctgccacccccactgccgccactgaccgccccgacgccacggccggggccggggaccctgataagaaatggcccttcagccccctcccctcacctggctcggtcccacctgagggcaagagcggaggcaaaaacaaacaggcagggagggctgaccttgttgctaccgacagtggagcggcgcatcctgctgcttcctggaaagcggcccgaaagacattttttccccctggaggaaggaaacgggagggcgccggccagacggcggcaggcgcggaggcgttggtccgggcgggctgtgcagcctctagtggagacggtccgaagactacatctcccaggctgctctgggccgccctgcgtcgtaaccctggcgcgcacggaggcggcgactcttacctcacaaaggtagctcctccgccggcagcaactcggcgcccgcggtccatggaccggaacctcgggccgacggacgggaacccgggccgcgatcgccgcctccccgcctcaggctcctcctcctcgctctccgccgcctccgccggactcccgcaggccctgcaccgccgccgccaggctagcggagctgccccgggaagctgggtgacgggttcgcggctgccgccggactgcggcctactccgccgcctctcagtgctattgtccctgggcctggccttgagcgggtccactggggaaggccgtgtgcgccggctccgcggaagatgccggaccaagccctacagcagatgctggacaggtacgggcagctgtgggggggaccgggagccgccgaccctcgctctggccctgcccgcgcccgccctcgaggctcttggtgagcagaacccggcgtgccgggaggagttccacggccagggggccgtgagaggggcaaaaagtttggagtctagacctgggggaggacagagcgagcggcctgggtcgtagactttgggtgaaacttagctaaggagtggcgtctggtttccttggaaccccgttttgacctgagagggactcctgttaatccacaaaattagttttccttaccctcttcccctcccccttccccctccccaacttgtgaagtgtttgtcagcgatgtcactggcaagaaccgggttatctttcaggggaatgacccccttataattttaagtctctgtctgagaaccaatgataagcattcttttggaaagcctgataggctgatttcattctcccactttccctgaacccgcaccccccgtcccccccgccccatcccgtccccacctccgaactgtaaggtcagagtatccgcaagggagatttaacggtcagaccagagtagaggttatggaaaacagccaaatgagtccaacgctgaacatttagtgtacttgacgatcgttgagttcattgaagacgtttcagctcgtacaggagtccagttgcccattcttggggggccccagtcggtaaaactctttgtgaagtcgggtgcaccgccctctgct

SEQ ID NO: 5026 - DNA, 6000 bp, Homo sapiens
tcaattttctcatctataaaatgaggatgataaaatgcatactgtttaaaaaagagtacttactgtcgggtactctacaagtattatctcattttatcctcgcaacagctagatactattattattctattttataggtgtgaaaacagaggctcagagcaatgggctgtcatgtgtcggaagtcacaaggctggttaagtggtacatccaggaatggaccctgggcattctgattccagagccctgcttttaactattaagcaaaactgctggataaagctctcctgagtatcaaataagctgatgagctcaatagtgcctggcacattttgattctttcataaatggtaattatcaaaatgagagttgagtgcaatccagatcccaagttatgacaaatctggggttaacgtgaattctgtagcaacacccagggccaactctaaagctcaggcatcctcactctcagataatctataaacagaaagttctcatagaaaaatacaagttccctggggtgtcagaaatcgtttatacagaaggtgccttttgcagcatgggaacagatcagagagtaggaaagcaaggaagaactggagaatgtcctggccccatcgtcagagctcccttgaaagggagcatcctgacttccagcccaatctgtccaacaggagagaacagaaagctgggaactaaacgagtgccacacccctggctcatggattttgcaggatgctaggtaatgctagcatcatttcttcatttctccatcatctccctccccatcccgatcacgtcctcggccttgtctcttttgttcccaactccaccactgccaagaactgtacgtggtccaaagtgggcactcaaacaacactagctgaatgcattacatgaaaaatggtatgaagataaagataaacatattagggatcagaatggaaaattgtcatgcctttttaaagatgaaacacaggacttcaaagaaacttcaaaaatctggtaagggctttaaactgtctacagagattaaagttcaaactctcagaaatgttttccctggcatttttaaccccttaaaaattttaataaaatacacataaaatttaccattttaaccactttaaatatacaactcagtggcattaagtgcattcacatggctgaacaaccatcaccaccatccatccaccgaactctttcaccatcctaaactgaaatgccatacccattaaacactaactcccattccctccacatcccagacccggggaaccatcattctactttctgtctcatgaatttgactatgctaggccctgctaataaatagaatcatacaatatttgtccttttatgttcagtttatttacttagcataatgtcttcaaggttcatccatgttgtagcatgtcagaatttcatttcttaagactgaataacattccactgtatgctttataccacactttgcttatctgttcattcattgacagacatttgagttgtttccagcttttggcagttgtgaataatactaatatgaaaatgaatgtacaaatatctgttcaatttcctgctttcacttcatctgggaatatatatccagaagtagaattggaggatcatatagtaactatgtctaattttttgaggagccattcctggcatttttttctgttatattatcagagtcagctcctacttatttgaacagtttattttgcctctccagtgttctatcctacatttatcctaaatgacctctcttttgctggtcccttctttcatttacaaagattatttagaaatatgatcttatgttccacagtactgatttttcccaaaacaaaacattagggctgtttggaacaaactgccatttcccaagtcataagttgcattagtttaaaaggtaagaatccatgaattttttggaaaaaaaaaagcagtccttcaaatcagtaccaaggtaccagtttgttatgaaagacagtttctgacatacaaacgtctcacttaggaacatccctgacatgcaaagaccagtggaaaccaggaatctgactcctcctggaagtctccacctgctgccacatggatggtgaggatcttggactttcagtggttagcagggacaggttaaaacccacctcttctccattttcatcttccttcttgacaccagaactatgggagtgccatccttgctgtggctacctggcatcacagtgagagctcctgttctcactggaagattgaatcacttcagaagcagaagagtgtgtgctggaacacagcacaattttgcatacagaaacaatgctctttcacatctagtcaacgagttctgcacattccatctcctagccacctcaaaatccatctttcctccttgccttctctacctggggtcagaatctcatctgggtcacttcaataggctctgaactagtctcctctacagtcgggatttctggcccatcctgcacattatggagatctatctgtcaccagctcaatatcactatcatcaccaaagacctgaaataacaatgttcaggagagaccttaacagccccacacctctactgggtggagcttcaggacagccatgtcttctgacttctagtctggtccgcactttttttttttttttttttttttttttgagacagtctcgctcatgttgcccaggatatagtgcagcagcgtgatctcggctcaccgcaacctccgcctcctgggttcaagtgattctcctgcctcagcctcctgagcagctgggattataggcacccgccattacacctggctaatttttgtatttttagtagagacggggtctcaccatgttggccaggctggtctcgaactcctgacctcaagtgatctgccctcctcggcctcccaaagtgctgggattacaggccagcttggtccgcacttttctcattggttgccttttatgtcagcatggctgtcagctaaatgggagaatgaatataactgataccatttatatatgaaggtcagcagtggaggggaaggaagttaaagggaataaacagcaggtatgaaatcatctcaccacctttaataactggtgtagtacccattttcttctcttcttcttctcccttttcgaggatggtgttgaaagtgttgaaagtggagcagtcagggtacttccttctcaaatcatcacacttctttcttctttaccacacttcctagccataatcttcaccatttaagaggaggggactcttcaaaccctttccatatcgaaatcttagaatgcaattgtgaaactgcacttgacttcccagatatttgaggaagcttcctggttcttgctttataatcatgatctaccacccttaccatccttccctgaaatttccctatctaaaacaacgacaacaaaacctgttacagatatttttgtaagtagccttaaattcttttaaaagtattattattttttttatagagacaaggtctatgttgcccaggctggtctcaaactcctaagctcaagcaatcctcccacctcagcctcccgaagtgctaggatggtaggctgagccaccgtgcccagccttaaattctcttttaagacaaggcaaaagtatgtgttaatcaagttagaattcaggtgaccatttgtctcagtttgcctaggacagtcccagtttatgcctattcccttgtgtaacttttaaaagagctcctccttttactcttaaaaaaaaaaaggtccagtttggaggataaattatatgctgaccctagtttaaaacacactttgattttctaacatagtgttttccaggtgatattatgcttttgcccacatcattgcattttatttacataactactctgcgaagcaggaagggaaatacttgatcgctattaaataaaggaggtaatcaaggcttcgaggggtacagtggtgactgaggtcacacactcagggccagaacctaggattcctgacttcaagtctaaaactgtttcagctgtggatcactatgtgcaaatgtctgagtaaaggcaaacttcactctcctttggtgatctgcttggcactggacttagaagtttagatacgttcatccttgcacagagactgttcttccacatataaagcaagcaaagagatggaagaagaattattagctaaacaaaaagaggctgttagtgaatcctgggccaaagaatatattttaccaggtctaattacatcagattacttgaatcttacatctggccaaattaggatatttccatttaagaaaagaaaaccaaagatcaataatgcatgcctactcttgcaaagaatgcaaagaacatataaatgggttctggtcagtcttatagatatattttcctataattacacactaattctttcttaaaaatatttcccaaaacagcaaaattctaccctccttggtaagcagcaaagggacaacacgggaaacaaaacaaaacaaaacaaaacaaaacaaaacataaaaaccctagaccatttaaagacaagcatggtgctttgtaaaatcttcggggtatcacagaggtgctgaatgcgtggttacatcaatgaaaaaacgcccactctttgagcctcctgaaaaggaggccacaggacccccgggcgccagggcttgggaacccagcgcccctccttgtctgtgccatgacagacaggttcagtgtgacttgccaaggatggctccaagcagctgggccatgtagcctgaacgcagcagagggttggacgccttagagccagctgtgggcaccacagcccgaccagggaggcagcgggtctccccaggttaagaggccagcggaggacgcgcgcggtctccttgggggagggtgcgggtgggccgggcgcgcatgcgcatgggcgccatcgcccgccggaagagcggcagcccaggcgctgctgctggcgccagacggcaccggccgctggtagagcgcgtgccgcgagatgcggcctcaggacagcaccggggtcgcggagctccaggagcccgggctgccgctaacggacgatgcacccccgggcgccactgaggagccggcggccgccgaggcagctggggcgccagaccgcggtaggtgctggctctgcctttcctcgccgtgttgctcccgcaccgagccgggtgagtgcgcggtgtggatcgggctctggtctcgctcgggggtcccgagcgggcgccggcgggttggggtccccgcaacccgggcacagtgcccgccgcgcctccgtccccaccctgcccggggctcgggaaacccctcgagctgtcagctggggggctgcaaagcggaattcccggcgccccagccggcgctaagacggaagaaactttccgattgttagcagtccttttgggattccgaggctgctcctgtaattagtgtcggggcagggctgtggagtcagactgcagtttggcgtaccctcccctaggtcgtaggtggggggtcagcgagagaggccatcctgcagtggggcgacgttgcgaggaagctgaccctgaaaagtgatcccggtggttaagggttctctccgaaaaggaagctgaaaagcatcgagtctagaaaaaatgttcgtcctagagttttagaatcttggaaaggcagagataagtgggaccgctagtttttaacctttagggatacaaggactttttagcaaacgatgcagaacaaggcatatcttgttaagaagctcacagccccgtccccaaagtcagggacccctcgtgaagaacactttatgttcagtccccctccttcgacacatgagcaaagtgaggcccaggaaggtgagggcttttgggttttcgtttgctttgtctcctccaagatgtggaacgtgggggtgagatggggcgcatgtccagggagcaccagggttaggatcccagcttgccatataccggcctagggccctttccactggccac

SEQ ID NO: 5027 - DNA, 6000 bp, Homo sapiens
taatacttttagtttttatttcatgtaaaaatgatattctataaacaaaaactgctagttcagcttgttgatcaaacggttggcataaattcttttccttcaggcaacctccatacttcagtatgccgcacagctccttcatgtgaactttcctatttcagcacaaagaatattaaaaaggtcaaaagggcacatactcaggggttgagatttcatgcaattgctaatgttcactgtttcatcaaggatatttttatatgaaaccgtcctttttttttcccactgtgagttcgcagtggtcatgaggacctatactggtggtgccactgtcttgatttgtgctaaggggccagcaattttatacacccttgctttgatcatcagtgcttcctgtcagcctatgaaagttgtgaatgacctgtttgcattattataatgataattttgatgtcatggacgtcctgaaaggtgcctgaggacccccagggtgtcttggagcactttgagaacagctggtgccagttcagttgaaagtgggctcctcacagtgatctgtctcctctgaggttgctcaactgcatccagcttcttctttgcttattactcctaaagctgtcattttagaagcagggaccagttacttcttggctcagctgtgctgtagttttccaagtgaaaggaagtttagtaacgctaggaaagaaatttttatttttttattttttattattatttttttttgaggtggagtctcgctctgttgcccaggctggagtacagtggcgtgatctcggctcactgcaagctctgcctcccgggttcacgccattctcctgcctcagcctcctgagtagctgggaccacaggcgaccaccaccatgcctggctaattttttctgtatttttagtagagacgaggtttcactgtgttaggcaaaatggtctcgaactcctgaccttgtgatccgcccacctcggcctcccaaagtactgggattacaggcatgagccaccatcccgggcgaaagaaaatatttttgagataggcaactcctgacctgtacaaagttgtacattttgttgtcttacacaataaataagcacatccataaacatgcttgtacttgatagactttcctcatcttttaagatgaagataatcacaaagagaacatgaagaaagttatgttcatttatcaaaaagtacttgtttggttatcataattaaataaaaaaaaaaacaggctaccacctgttgtaatgctttttgtttaatgaatggtttaacatgttcttttgttcttttaatgcctgtaaatagtaatcagatcttgatttgattcagtttctattttttttggcaaaactacttcgtaggtggtggcctgtacttctcaccccagtcaggtaatattggttgtctcactttttgtagtgttcatgaccattgataaccattgcctagatccattattttatcaagggtttgcaaaatggtgatatttttattgttttcctgttttagttattagaatatttttatgaagagaaacttcccctcatcaactctttgagatctagttagtacagaaaaggtaggttggctgggcacagtggctcacacctgtaatcctagcactttgggaggccgaggtggacggatcatcttaggccgggagttggagaccagcctgaccaacacagagaaaccccgtctctactaaaaatacaaaattagctgggtgtggtggcgtgttgcctgtaatcccagttactggggaggctgaggcaggagaatcattttaacccaggaggtggaggttgcagtgagccaagattgcgccattgcactccagcctgggcaacaagagcgaaacttcatctcaaaaaaagaaaaggtaggttaaatgcctgattcttttttgtttttgtttttaacatcagttttcaatattatgagctggtctcttagattagtcccttagaacaggactgttcaggttgtgtaaattaaattggtctctacagcatttttgttggaaacaccaagctaaattgtctggtttttagaagcaaatctaaaggaaactattaatagaaaagtcattttgttctattctgaaagtagcttaattcacttgaaataaaaaaataatggctgagacatcttggggctgttaaatgggaataaaaaaattaaaacacttgttcttgtctttagaatgatgtattcattgcatgtcattatccttttatgtatcttatattgtattctgagatcagattcaaaaatgtataaagcatccttgccttcaaggttcataatagagtaagtgaaaagttgacctctgttcttgttacattgatttgttacaatcattccatgggtggaatgcaaacaaaagttctatttactccaatattccccccactttaaaattcataattttgagaaatgtctgatagacaataagataaagttttcttcggaaaaaatggaagcagtcagtgaaacctattatgtagagggggcagtcagatgagactgaagaggtcctattggaattagggtgagaggagaaaggaagggaaggcaactttcttcagtcttcagctgcagacttcactggcttcttcctgctaatgctgcctgtgacttgaaacaggtcctcctgcttcaggccagacctgtttttaagctgctgctccctccctgaattccttctcatgatttgagtgattactgaatacacaagacttggtgcctagacaacagaagattatataaatgtctgtgtacatttgtgtacccctcctgggaaccagttaacagctgtccttgatcagcagggatcttggtgacactggtttttcctgtgtgcttcctttcatgtgcatttcagagtggtatcctcagtaaagtactttacttaatcattggtgttcataccaactattaatctcaccaccaagatctgttcagttgttttcagttcagtgtcttacacttaataaatgatttcagttgttttcagttcagtgtcttacacttaataaatgataactaaagtgattttgacttggcttctgttatcctgggtgcttctaatttccagatgggtctgaaactgggtatttaaatttagtcttatttttgcatatggagctaaaagtatcctttgggacaggctgtgtatgatatggcaagtctgcttatcaaaatagacattttcctgtctaataacaattttggatggaaaaaaagctttgggggctgggcgtgacggctcacccctgtaatcccagcattttgggaggccgaggtgggtgaatcacttgaggtcaggagtttgagaccagcctggccaacatggagaaacctcgtctctactaaaaatacaaaaattagctgggcgtggtggcgggcgcctgtaatcccagctacttgggaggctgaggcaggagaatagcttgaacccaggaggcagaggctgcagtgagctgagattgcgccactgcactccagcctgagtggaagagtgagactctgtctcacaaaaaacaaaagctttggaatgttttaatagagtggtatgaacttggtgtttacagattaagagcggtcatttcttggttctttacagtatgccaggtgctgtgttatgcaaaccctccctagatgtccatgcttaattcagctctttgagtattccatttacatttacaagtagaaaaatggagtcagggagaagttaggtaatttgcctttggggtcatataactaggaactggtagagccaggattcaaacccaggttacccattctcctatacatcagagaccagtgtgtaagaactgtaggatttgaattcatattggaaatttcctcccctttatggatctttaatctttctttctttggctccttcacataatttggataagcacaagtttcacctattttggccagtgccttaagttactccaccaacgtgcacctcttcccaggagaagactgggtcacattgaaaagtagcccactgcaggcatgacattgttatgaaattttatgtttcatgtaaaagattaaaagttactttccactgtgcgcaactgacacaccagaaaaaggtatctttttttaatgcctacccctatccacacaccgtacctcaggttgagacacaggctatagaactttccagtcatgtcataatcatatatggagttcagttaattcactatgttgttgttgtgggggtcaggttgggaggaggtcaccgacacagaacaagcaggcaatagcgaggggttgaactgaggagtaacacagatccgaacagtgtaagggagaagatttgatgactggagatggggagcttagttcctccatttctggtttcttcttggtttctgccactgtttttctttacgctcctgtcctttaattgtgggagtgtcttcagtccttttcccacttactcacccccaccgccccaattgtgcgtttgcccattgtcttggtttcagctctcatttctgtctgagtggcttctaaactgcctgtggctttaatgagctccagttcagtgaatccacctgagccctaatttgctgtagcaaatttgcagttgctcagtggctatatcctggatatttgaatgtctcagagtgagtacgtttgattttaaccgctcttcctccaaagccagctgtaagcatttttaagtggtacacaaattgataggaagagaacattcccagatccactgtagatgaggctcaggttcctattttatcagccaaggttgctgaactgccctggaagcgggcagccacatttgctggaaaagagacaatatactgaggtgtagttttctctggccccttggtgccctgtgaggcacacagctgtctgtgataatgtcagagattacatcacagtgccaatggaactaacaggaaccacctgtgcacttccttttacaggaatgttcataaacagcaggttctcctaggctttgaacaaaatttagcttctccaaggccaaaagcctcattgtgaagagaaagaaaggtgggtgttcttcttaacgatgactctgcttgtagccttccagtgtcctgcaacgctggtttccacagctgtcttccttgcttaattggtgtacactgccctcggcatgcaactgaaaacgttagggccatacgtcctaatggttaagaatgtggaccgtaaaactagacatgttggcttctaaattccagccctgcttattgctggttttatgaatttagacaagttatttattctctccaaacctccattttcttaactgaaacaggctaattagagtacctaccacaaaagttggtagtgagaattaaatccgataacacattagaagtatttagtgcagtgcctggcacataccaaaggtcagtaaatgctaattgctattattaattaacagtattgttggtaaataccctaaaaaagctgtttttattttttctgtctctgctatctggtcaataacctgatattgtcatctcttcctactcatagaatctcatgttgtcatttgtctctctgagttactgctgctaccttctttgagcagatactcattaccacttcattgtgtgtacagaatgttggtacagaagtcatcttcctttttagaaatgaccattaggcctggtgcagtggctcacgcctgtaatcccagcactttgggaggccgaggtgggtggatcacttgagatcaggagtttgagaccagcctggccaatgtggcaaaactccatctctactaaaaatacaaaaaatacaaaaatttgccaggtgtagtggcgtgcgctggtaatcccagctacttgggggtctgaggcaggagaattgcttgaacctgggaggcagaggttgcagtgagcagagattgcaccactgcattccagccccggtgacagagtgagaccctgtctcaaaaaaaagaa

SEQ ID NO: 5028 - DNA, 6000 bp, Homo sapiens
accagtaccatgctgttttggttactgtggctaagccttatggtatactttgaagtcaggtagtgtgatgcctccagctttgttcttttggcttaggattgacttggcaatgcaggctcttttttggttccatatgaactttaaagtagctttttccaattctgtgaagaaagtcattggtagcttgatggggggatggcattgaatctataaattaccttgggcagtatggccattttcatgatattgattcttcctacccatgagcatggaatgttcttccatttgtttgtatcctcttttatttcattgagcagtggtttgtagttctccttgaagaggtccttcacatcccttgtaagttggattcctaggtattttattctccttgaaacaattgtgaatgggagttcactcatgatttggctctctgtctgttattggagtgtaagaatgcttgtgatttttgcacattgattttgtatcctgagactttgctgaagttgcttatcagcttaaggagattttgggctgagacgatggggttttctagatatacaatcatatcatctgcaaacaggaacaatttgacttcctcttttcctaattgactttatccatttcttctagattttctagtttatttgcatagaggtgtttatagtattctttgatggtagttggtatttctgtgggatcagtggtgatatcccctttgtcattctttattgcttctatttgattcttctgtcttttcttctttattagtcttgctagcggtctatcaattttgttgatcttttcaaaaaaccagctcctgggttcattgattattttgaagggtcttttgtgtctctatttccttcacttctgctttgctcttagttatttcttgccttctgctagcttttgaatgtgtttgctcttgcttctctaattcgtttaattgtgatgttaaggtgtcaattttagatctttcctgctttctcttgtgggcatttagtgctataaatttccctctacacactgctttgagtgtgtcccagagattctggtatgttgtgtgtttgttctcattggtttcaaagaacatctttatttctgccttcatttctttatgtacccagtagtcattcaggggcaggttgttcagtttccatgtagttgagtggttttgagtgagtttcttaatcctgagttctagtttgattgcactgtggtctgagagacagtttgttataatttctgttctttcacatttgctgaggagagctttacttccaactatgtggtcaattttggaataggtgaggtgtggtgctgaaaagaatgtatattctgttgatttgggttggagagttctgtagatgtctattaggtccgcttggtgcagagctgagttcaattcctggatatccttgttaactttctgtctcgttgatctgtctaatgttgacagtggggtgttaaaactttcccattattactgtgtgggtgtctaagtctctttgtaggtcactaaggacttgttttatgaatctgggtgctcctgtattgggtgcatatatatttaggatagttagctcttcttgttgaattgatccctttaccattatgtaatggccttctttgtctcctttgatctttgttggtttaaaatctgttttatcagagactaggattgcaacctctgcctttttttgttttccgtttgcttggtagatcttcctccatccctttattttgagcctatgtgtgtctctacacgtgagatgggtttcctgaatacagcacagtaatgggtcttgactctttatccaatttgccagtctgtgtcttttaattggagcatttagtccatttacttttaaggttaatattgttatgtgtgaatttgatcctgtcattatgatgttagctggttattttgcacgttagttgatgtagtttcttcctagccttgatggtctttacaatttggcatgtttttgagtggctggtgccagttgttcctttccatgtttagtgcttccttcaggagctcttttagggcaggcctggtggtgacaaaatctctcagcatttgcttgtctgtaaaggattttatttctccttcacttacaaagcttagtttggctggatatgaaattctgggttgaaaattcttttctttaagaatgttgaatattggcccccactcttttctggcttgtagagtttctgccgagagatcagctgttagtctgatgggcttccctttgtgggtaacccaacctttgtactctttctatcgccttcttaaaactggaagggtgagtgagatagggcaacagtagccatctccatgtcatctagattagttagattagggataacacaaaggaaaaattaaaattttctctatctatcttagtccttttactatttctatggctttaatatactcgaaagttctgcaaccagcaccatagtcaattttagaatattttcattatcctaaaaataaatcattgaatccactgcttcctcccgtttacccattcctaccccagctcttggcatgcactgctctactttctgtctctatagatttatctcctctgggcattccatacaactgtcatcatgtaatatatggttctttgtgactggcttcttagtataatttttttcttttctttttttttttttttgagacaaggtctcactgtatcacctaggctggagtgcagtggcgccataccggctcactgtagcctcaaccttctgggctcaagcgatcctcccaactcagcctcctgagtagctgggaccacaggcatgagccaccacacccggctaagttttgagttttttgtagggatgtggttttgccatgttgcccaggctggtctggaactcctgggctcaagcgattcacccaccttggccccccaaagtgctggtgttataggcgcgaaccaccacacctggcctacttagcataactttttaaaggttcgtccatattgtggcatgtgtcagtactttatttctttttattgctgaatatgattccgttgaatggatatagcttatttgatttatccgtttatcatttgatggacgtttaggttatttccaccttttggctatcatgagtaatgtgatagaaacattcatggacaagttttcatatgaggagatgtttgcatttctctttggtgtatataccctaggattgaagttgttgggtcatatgataacatgtttaaccttttgagaaagagccagactatttttcaaaacgactgcatagatcctcactagcagtatatgagggtttcagtgtcacaacatccttgctaacacttgtttgtcttttattatgaacataattaaagtaatatctaatagttttgatttgtatttccatgatggctaatgatgttgattaacccatttttcattgggttatttgtctttattattattattattattattattattattattattattattattttggtagagatggggcctcgctatgtttcacacactggttttgaactcctggcctgaagcagtcctcccacctcagcctccgaaaatgctgagatgataggcgtgagctacttgcacctggccttgcccttatgttactgagttgtaagagagttgtttatatattctagatacaagtcccttattacatatatgatttgcaaactttttcttctgtcagttgtctttagacttttttttttttaacatttataaatagaggtagagtattgctatattgcccaggcctttcttgagttctggcctcaagagattctcttgccttggcctcccaaagttctgggattataggtgtgaaccattatgactggctgtgttttccctttctcagtggtgtcttttgaagcacaaaagtttttattctgatgatgtgtagtttgtctgtttttccttttgtgtgaggaagagatccaaatttcttttgcatgtggctatctagttgtcccagcaccatttgttgaaaacagtactctttccccaagaagtgatcttggcacccttcttgaaaatcagctgactatagatacgtgggtttatttctgggccctaaattctattccattgatatatctattcatattccagtatgacacagtcttgattactgttcctttgttgtaagttttgcaatctggaaatgtgagctctccaactttgttctttttcaaggttgttttggcagatctgagtcccttgaattttatataaattttcagatcagcttgtcaaatttctgtaaagaagtcagctcagtttttgatagagattgctttgactctctatgtcaacttgggaagaattgccattttaacaatattaaatcttctgatccatgaacatggacatccatttccaatttcttcaacaaccagctttggcagtatctcttctagatgtgaatgttcatgttaggtgggctgtattttgcaagttagcattagtcaaattgaagccctcatgcctggattgtgaggcatagtgctgaggtttaactgttattctgtgtaaagattaatttagttgatataaaagatgtttggaaattatgcaaagaaaataatgtaatatatgatttgtatttttcatgtaaatcttcacataaaaaatggcatggcctgttttatcgtttgtttgtaaactcatttttatcctaaatatgtgtggcataggagggagattgtttcaggcaaacttataggtctgttgctttgttgtggtggtacatatcaaaagactaacttcaatgacagtgaggagggatgtccttcaaaactgtaaaaaatttgagaccctcttgcatctgtgtttctgtgccataaatagcccttctcaggcttgtcatgggcatgtaccaatgatgtaataatgatgattatatcagaagcaccacaggtagcttttggcatggtaggtatagggctgtggatatcgtcagtttgaccaagtattccaagaggccccatggagtttgtcatctgtaatagaggacgttagtgcattagtgatgaaaaaactgcttaccactgactattgtgatctcccagggagtataaggcagctccgcagtaagtgcctcttgttttgtgtgacgtgcttgaatacaaacattcagactgtttcttgggcacagtagtgctccatcttatgccagcctcatcaaaggcttgaaatagagtaggtggtgtgtgatacctagacactaacatcccctattctattttcctttttttgttgttattatcaatggtcactcacttactgtaaaactagactttataaacagattattattttagctaattttcttctatgtgttgatccctcccagtttttgttcctttttgttgttcattgattctagagttgtgtgaaggaagccatttcgtgattcctggtgctcctctgcttgcttagtgacactactaagaattggcaccagccttacaaacacctgcctttgatccagagtagagtttggggagaggtagagtaagtgactgcttatcaaatgtgaccttggggttgtcaggccctgttgtttaccctaccttttcctactgcctcacctgtccccaccccctaccccagcacatggttaataaatgaaaatctccaaattcgagattcattcttttggttgaaggcttccattttctgttaaaatttgaacaacatgaaacattttactacattaaaccttctggataatttacgtttaattggttttgtatacagagtgggatagatctcagtgggtaagtggggagaaagaacaacacacaattcaattattagacattttgggggatgcgtaagagaaaaccagaaacagggcaggagtacctggaatcactgaagacagtttatgcatacactgttattttacctaaaggcagcctttctcatggttcttaggcatgtcatggtgac

SEQ ID NO: 5029 - DNA, 6000 bp, Homo sapiens
agatatttcacataaatacaatcacactgtgtttgtcttttcgtgtctggcttatttcactcagcatgttgtcaaggttcattcatgttgtagcatgtatcagtacttcattcttgtttctgccagaataatattccatggcatggtcataccacattttgcttatccatttatttgttgaacacttgagttgcttctgcctgttggataaagtaagtaatgttgttctgaacattggcatacagtgtttgtcaatatacaaacattggcatataatgtttgagtccctgctttcaattcttttgggatatatacccaggagtagctttctgggtcatatggtaattttttgtttaacttattgaggagctgccaagctgttttccacagcagctgcaccattttacattcctaccagccagcaatcacctttaaacatgaaaaacatgaaaggttttaaatgatatttcccaattttctaagtaaacatatgaattatagaatcattgggaagcataagagaaaaaagaagaaatacctactcataatcccaactgtgtaaaggtaataactattaacattctatttttatttatttatttatttgtattaaaaaaattaagacagggtctcactatgttgcccaagctggtctcaaactcctgggatcaagctgttgtctcacctcagccccaagtagctgggattacaggcatgtgccaccatgcctgggcttctatcatcatttattttcttttttttttttttgagatggaatcttgctctgtcgcccaggatggagtgcagtggtgtgatctctgctcactgcaagctccgcctcctgggttcacgccattctcctgtctcagcctcctgagtagctgggactacaggcgcctgcaaccacgcccggctaattttttgtatttttagtggagacggggtttcaccggtttagccaggatggtctcgatctcctgacctcgtgatccgcccgcctcggcctcccaaggtgctgggattacaggcgtgagacacagcgcccggccctatcatcatttctttatgtctcttttctatatgttttttcttttacatagtggatatcaaattttatatcacagttttgtgggctgatttttccacttaatattctagcactgggctgggcatggtgtctcacgcctgtaatcccagcactttgggaggacaaggtgggtggatcatttgaggtcaggagttcgagacctgcctggccaacatggtgagacctcccccgcgccgacccgccatctctactaaaaatataaaaattagctgggtgtagtggtgtgctcctgtaatcccagctactcaagaggctgaggcaggagaatcgcttaaacctgggagacggaggctgaagtgagctgagatcgtgccactgcactccatcctgggtgacagagtgaaattcatctcaaaaaattaaagtaataatagtaataatacataaatattctagcattagtatcatctcatctcatcagaactcttcaaaatatttgtatgtactgcagctcaattagaggtggtctctgactttcatcagcttctccctgggctccatgacactggcctggagtgactcattgctctggttggttgagagagctcctttgccaacaggcctccaagtcagggctgggatttgtttcctttccacattctagcaacaatatgctggccacttcctgaacagggagggtgggaggagccagcatggaacaagctgccactttctagagtagccagacttgcccctgggcctgtcagcacctactgatgaccttctgtgcctgcaggatggaatgtaggggtgagctgtgtgactctatggtacagactggtccaggttcctggaggtcacactctggggctgccagccaaagggtgcccttaagttggagtgtgggtgacttcctgaacagagctggcactggggagggggtgctcggggtcctttctcttctaacaggccccagttttgtctcaatgacagtgtttctacacctgtgggttatgacaaagacaactgccaaagaatcttcaagaaggaggactgcaagtatatcgtggtggagaagaaggacccaaaaaagacctgttctgtcagtgaatggataatctaatgtgcttctagtaggcacagggctcccaggccaggcctcattctcctctggcctctaatagtcaatgattgtgtagccatgcctatcagtaaaaagatttttgagcaaacacttgaatatgtgtgtccttttaatttataatttatgtatgcattgatttaatacacattataaagaatacaaaacatttaaaaagggagacaaaactacatatgaatggccgggcacagtggctcatgcctataatcccagcactttgggaggccaaggcaggcggatcatttgaggtcaggggatcgagaacagcctggccaacatagtgaaaccccgtctccactgaaatacaaaattagcgtggtggcaggcacctgtagtcccagctactcgggaggctgaggcaggagaatcacttgaacccgggaggcggaggttgcagtgagccaagatcacatcagtgcactccagcctgggtgacagagtgagactccgtctcaaaaaacaagcaaacaaacaaacaaacccaaacccaaacaaaacaaaacaaaacaaaatacatatgaataaaagttctatttttcctaaactctataataggtcattgtgcatcccttactcaggggaccactgccactcttactgtttctgatgtctgcactctgctgcccgtgtcctgctgtctggtgaacgatgaaaaaaatgtgtgtcttcaagctggaattagatcccttcttttctttacggtgttcctgtttatccctccttcctcttcatcaggaagtgtcttctatgatgtgtcccccacattcctctgtgtttgcttgaggtcaaagcagcttagaacaagaaacagcttagaacaagcctgtaaaacagcttagaacaagcctgaagaaagtgcccccaagaccacatgcagcccgaggggaattaaaggccaggggctctgccttgcagatggagagtggcctgggtgcaaggccccagcatcagctacctcttgctacacacagaccaccgaaaacttagtggcttaagacaacgacaacattgattctcttttaactgtttctgtgttaaagaacatctgttcactcaacaggtctgtactgagcacctgggccaggcagtgctctagacctggggatacagcagtgaaccagagagatttcaggagagaaccctgttctcctggggcttggactcagctgtgtgtacgtgacagatcagaaatgagcaaacagtcatctgttgaacaatcagtgggcaactgataaagagctttattttcccctgtcccctatctgtttaaacatgctatgtgggccagttgagcaatctagacaggtcccttagctttcttgttcaccttcagataatttaaaaaagtggtctgagttacattttgagttacacaaagtctcattccaggggctgcatctgaattgagagggaatgggggacaggagagttaagggctccttctgcctgaggtcatgttctaggctgacttcctcatgggacttttgtgggcttctctctccacagctccccttccactcacagcctatgactgttatcttagcttctgcatcgtaatctatgtctcctattgttttctaatgaggttgccttgccccttgtagcagagtcactcttggatgagatccataaaaccctgctatgatcacctcctttgctgcggaatgtggggaagcagttggcaactgagtatggaggacctctgtcaaaactgagacagaaagaagtgctatttaacatctagtcacaagtaaataatgtgggttataatctgggctgtaggctggacgtggtggctcatgcttgtaatcctagatcaggtgggaggatcgcttgtgcccaggactttgagaccagtctgggtaacacagcaagaccctgtctctacaaaaaaatttaaaaaccgggcatcatggcgcatgtctgtaatcccagctactcagcaggttgaggcaggagaatcgcttgaacacaggaggcagaggttacagcaagccgagattgcgccactgcgcctgagcgacagagtcagaccctgtctcaaagaaaaaagaaaagaaaaaaagaatctgggttctgccatttatttatttactcaattttttttttttttttttttgagacggagtcttgctctgtcgcccgggctggagtgcagtggagcgatctcggctcactgcaacctctgcctcccaggttcaggcagttctgcctcagcctcccgaatagctgaggctatacgcgcgagccaccacgcctggctaatttttttgtatttttagtagagaaggagtttcaccgtgttagccaggatgctctccatcttccgacctcgtgattcgcccgcctcggcccccaacgtgctgggattacaggcgtgagccactgctcccggcctattaactcaatccttagaaaaacaaatgtggcaaaggtggaatcatacaacatatggccttttgtgtcttacgatattcatttttgcatctgaatgttcaaactaaataatatctaccttgtgaggccatctgaatcacttaggatggtccttggcaccaaatttgccttcaaaaaagcatttgcttcatttaatttcgatttattcacgaaggactaaaggacactgcaagggcggggagggagtgtgcgcctgcgctctgcgcctcctagagggcagtcaagggcttctggctgacccgagcggagatctcgcgagactgtcagacgtatggcgagaggtgtgggaggaagattgtgttgtcgcgagaactctgcctttgggccgtaggttagtgtggggccgtgtctcagtccacccaaggtctcctcggatcgcctggagaggcactcggacctggtaagaacgctgtgggccgggtggaggctcgatgaccgctggcccgctgggcccgggcttgtccgccccttcccgacccgaccgacaccgggaccggtctgccttctccttcccttccctcccctccacacgccaggcccgggcacctcttcctgcctgcccgccgggcccgggcctgtcttctccccttccggccacacgccgggcccgggcctacgttctcgccttcccgccacacgccgggcccgggcttgtcttttcctccccgaccctcctcgtgcccggccgtgggcctgtcctttcctccccgaccctcctcacacccggctcggacacctcctgctccccgccggccttcccctctctttaggtgtgacagctccaagtttcctgtttctctcgcctcttgcttggatgtggggcgaggcgaggtctgttttgccggacgggcacagaacataatccatttctagcttgtcaggtggaaatgcaaagaagatattgggtttttttggccctctgtgtgccaaacacatactgtcacatttaattctcccaataatcccgaaaagtagcttgattatctctgttttacagctgagaagagtaaggcttgctcattcattggttcattccaccagcaatcatttatttggtgcctgtatgttcaggatgttgaggatagcaatgaaaaaaatggacacctaattctcatggaactaaattcttgttgtggggaaaacaataatcataatcttacgtggcacgggatttaacatggaatgatgccatcaagaatggcagaagtagaatgacagaagtcagagtgctgaatttatctgaccccaaaggcagagcttttttacttttaactgtgcctttttgtgtcactttctaatcagggtcgggttcaccacagtaattgccttttgg

SEQ ID NO: 5030 - DNA, 6000 bp, Homo sapiens
gtgcacctgtaatcccagctactcaggaggctgaggcaggagaattgcttaaacccgggaggcagaggttgcagtgagccaacatggcactactgcactccagcctgggtgaaagagcgagacgctgtctcagaaaaaaaaaaaaaaaaaccaccaacaaacctctcactagggactctccactagaccatacccaaatagggcaaatgcttagctatagccaatcaagtaattacttccacattcaaggaataaaagttcactgcctctgctgctgtgggcagctctctgaaattttgagtgctgcctgattcacgagtcattctttgctccagtaaactcttctacatttaattcgtctaaagtttccctattaacagatgttggctgggcacagtggctcacacctgtaatcccagcactttgggaagctgaagagggtggatcacctgaggtcagaagtttgaaaccagtctggccaacatggtgaaaccctgtctctactaaaaatacaaaaattagctgggcaaggtggctcgggaagctgaggcaggagaatcccttgaacctgggaagtggcgattgcagtgagctgagatcgcaccactgcactgcaacctgggcgacagagcaagactccatctcaaaaacaaacaaacaaacaaaaacagatgtgaaatctttcatttgtatgtgccagatattttgtattactctttccagatccggtctctacttcttactaccctgctccctgcccttggaggctgatttttatgaattacatcaatgggctcccttgccttctggcttttgattgggtttggacaatggaagtcaggggaagaggaaataaggtgatttccctggatcctccctgcaaggtcacctcaggatagtgtccttgattgaaggtcagtgcttcttcaaactatattctacatttttctcctcatttcagatttccctcttattcatttctctttcttttttttttttttttttttttttttgagacagagtcttgctctatctcccaggatggagtgcagtggtgcggcctcagctcactgcaacctctgcctcccaggttcaagttattgtcgtgcctcaacctccagagtagctgggactataggcatgtgccaccatgcctggctaatttttgtattttggatagagatgaggtttcgccatgttggccaggctgggcttgaactcctggcctcaagtgatccgcccacctctgcctccacctcccaaaagtgctgagattacaggtgtgagacactgtacccagccccttctatttctttctttatagcctaggagttattgcttttctcatgtaaatacctaaactctggccacacctttgtaaaacagtccgtttattaaacccttctgggattattttgagtatgtcattgatttgctttagatacaatgcctctggtagtctcaataatggtccgaaagatacccaggtcctaatctgtggaagctgagaatgttacctcatatggcaaagggactttgtaggtatgattaagttaaccttgagataggaagactatctttaactattttgtggaccaaatgtattcacagggtccttactagagggaggcagaaggattttaagaggaaatgacatgacaaaagcagcaagagctttgaagatgcagtgctgctggctttgaagatggaagaaggggctgtgagtcaaaggaatgcaaagaatgtagctccagaggctggaaaagaagggggcaaggccttgctgtatacctttgttttggcgctatgaaattattttggtcttggccgggcatggtggctcacgcctgtaatcacagcactttgggaggccgaggagggtgattcacgaggtcaggagatcgagaccatcctggctaacacggtgaaaccccgtctctactaaaaatacaaaaaattagccaggcgaggtggcaggcgcctgtagtcccagctatgtgggaggctgaggcaggagaatggcgtgaaccccgggggtggagcctgcagtgagccaagatcgagccactgcactccagcctgggtgaaagagcgagactccgtctcaaaaaaaaaaaaaaattattttggtcttctagcctccagaactgctagcctccaaatttctgttgttttaatccactaaatgggtagtaacttcttacagcagtcataggaaattaatacagtgcccaagatagaacttttcattttccatacaaattagctccttcctattgttaccagggggtctttgttcttagagctcccaagatggtggcaggccacttccaagatggcggcaagccttttgttctctgacctggggttcttggcctcacggattccaaggaatggaaccttgggccatgcagtgagtgttatagctctattagaagccgtgggtcacagaagagaaccgtggaacccagcaactagtgttcagctcgattaggacaaaccctgggcacttagccttgcaggaacaatggcgagcctctagcccgattgggagcagcaatgggcgcctcgctggatcaggagcacagtggacaccctgatggatccagaggggtggaagtcagcggcgggtctgtgatggcagcaaacagcggtggtggacggtgagtgaaagctcagctcaagctgtaacaaacatggaccagaagagtgtgcagttgcaagatttaatagagtgaaaacagagctcccatacaatgggaggggacccaaagggggttgccactccctgctcgaatgcctgggtttatatcctgatcattgtccctccccctgtgctctcaggcgatatatgatttgactatttctttaccttctgcttctagcctaatttgtattttagtgagccctctttactacctgattagtcgggtgtgaactgagttacaagccctgtgtttaaatgtgggtgtggtcaccttccccagctaggtttaggaattcttagttggcctaggaaatccagctagtcctgtctctcactatcttgtccacttggttgtttacttttttatttttttatttttagagacagagtctctctgtgtcacccaggctggaatgcagtggtgtgattggtctcagctcactgcaacctctgccttccaggttcaagcaattctcctgcctcagtctccccagtagctgggattacaggcacgcgccaccacacttggctacgttttagtgcttttagtagagatgaagtttcaccacgttggccagaccagtctcaaactcctggcctcaagtgatctgctctccttgacctcccaaagagctgggattacaggggtgagccagtgtgctaggccacttggttgtttaaatacgagatttgattcttccattttctgtatgctttactgccattccatcactaactcctctcaacctgatgcccaaaaatatatcttgaatatatctacttctcttccaaggtttccggcacatggtagaaacatgataactatgtaatgagtggatgcatgacccaatcttccctacttccattccagtctgagcgcccataattagtcaatcaactagcttgtcttggttctttttccttaggccttccacaatctattcttcacattacagggaaattaatcttttcaaaactgtaaattaaagcagattattctctagcttaatatcctttacttatttcccaatgcactttgagtaaaattcaaatgtttcattgtgcactgcaaggacacctatgttttggaagtttcctatctctctggtatcttcttttgcatctctctgaaatgctgcagctcccgccacccgacctccccgcctttagagttgaggcataagacatttcctttgtcgagaagggtctttgtttaactggcattttaaggtttaatcttaaagattacgcccttagccaggtgcggtagctcatgcctataatcccatcagtttgtgaggtccaggagggcggatcattgagctcacttgagctcagcagttcaagatcagcataggcaacatggcgaaaccccatctctacaaaaaatacaaaaattaacctggcctgagcacttgtagttcctagctacttaagagactgaggtgtgaggatcgcctggggcagggggcgggcagagggaggttgcagtgagtggagattgcgtcagcaagacactttctcaaaaaaaatcacgccccccatgaaaggctttcctttaccacccaactccaccttggttactctatcacagctccctatgtgttccctttccagcataaatcacaactatttgtcagtgaattccatgacagaacgaacctagcttttgtttggcacataattgttaaatgaatgcagtattatatttggctagaccaaaattgtttccctatcagtttgtgagcaacttgagggcagagccctaaatcattcgagtgtgctgacctctaggggggttagtccagtgcatggtctagaattgctcaaatcggccttttgaaaaaatgaatcatgtacaatgataaaggtgtggacaggaccacaagtaacggtgtaacgattagcagatttaaggaaaagtcagtctaaaaggaaacgtgagaagctaattgcagaagacagccatttcaagtcttcaacagcaaggctgtacctcctcacgtgacttcagtgtagactttaagaacctaaactaacgcttctcgcgagaggaaagattgaccgctcgcaagcgtacatcagctggtgccccgccttccctgggccccacccactgcctgtcctcattcccaccttgaaccagccttttgcgcgtgtgacgtcatggcgccgtgcgtggcctcggcggtggcgcagggggcgggcccgcggcgcggcgccggaggaggaagtggtgaggttgttgctccttcagcgcctatcgctggctcttggggcgcagagaggggccgcagtctccgcggctgcgtcgagctcccttgcagtcccctccatgttccccggcgccactactccccttcctaaggccgccgcttaccccggggtctatggaagtaatggaaggacccctcaacctggtgagtgtcccacagaatatagcgttcgtcttgggtgcctttgcctcaggagcccggccccgtccccggcgcgtcggctaaccctttaggctgggaggttggtttggcaggagtggtcgcagaggctgtgaggggctgctaggcaggccctggcccaactgcggctccaggctagccacttcagactttgccctcctgggggatccccgggaagtcctggcgccccctgtcgcggggccccgggcgaggggatgccaccacctggggctgccacctcctctctggctgggggaagtcctcttagcgccacgtagccacctccctacagcctggagaggcactgaagccggccaaggcagaaatggtgtgatactggttttaagttctagcagcagggtctgagtctgagtcgccccgctttggagaggtggaggagtgaatagcctcctcaccctccacttccccctcctcacccttcacttccccctcctcaccctccacttccccctcctcaccctccacttccccctcatttctcacatacattcacatgcataaactgagtctaccgtcttccaaatatattagagacagctgggaaaaagacagccgttcctgtatttagctcagattcatcaatttaggcatcatgaaagtgtaataggtgtttgctgttctcaggaaaatggctgatagcctgtttacttgtgttttaaggcgtttcaggtgttgcaattaaaaaacaacacaacagaaccccactaacaacgggaagcatgagttcttttcagactggccattgcatcttttagttttccagagaggttacccattttggatgtaaaagtcagattacttaaggttgcacacagg

SEQ ID NO: 5031 - DNA, 6000 bp, Homo sapiens
taccttctagtatgttttctgaagggagatcagaaaataaatggttgctacgtgccagactgtggttagtactatggagagtaataaagcatattaagggggattggaggcaagacttttaaaaataaaagatggtgaggaatggcctcaatgagaagatgacctctgagcagacacctgaaggaagtgaaggcctgggctcgaggatacctggaggaaagcgcaagggccctgaggcagaagcatccttgttaagctaaaggagcagcaggaggagaagagtaagggtagaggggaagagtaggtagcagtcatgaggtttctgcaagagtcctggagagagatgatggtaatgaaattgatgaactttatgtctttctttgttatatcctgttctttgactaaaagtaataaaaataggtaatacttctatagctcttaatgtgcatcaggcactattttaagtgctttacatatattagtcatcagatctttccaagaaagtatacctagcctcagaaaatgaagatttgtcactctttaggatatacagtggaatgtgctgctggttcagagagcactttctcaagcagtactgaaatcagcagtgaattcactgcctctgttcacatactggttaggttgcaaaggcaagcctaaagtgtcgataacagaccacccaaccagtatgtatgcattgggttaagttcagtttcatggaagaactgtagaaggccatggcattttttattactcttcttgctactttttagtccttttaaaattttcatccaaggttttcatcttgactttgttttcatacagttatgtctggacacattgcttcaacatagaacgcacatgaacaatgtggaggtctaggctggaatgggggcccagttgaccacttttgctctagctggtaggcattaatactatctccatgcatgtcagttagaggagctgccatattgtccttagcttatcttctttgattgttaaatcataacattgcaatgcttaacttctgatatgaatgactacagtcttaagtcttaatcattcttttttttttttttttttttgagacggagtcttgctctgtcaggaggctggagtgcagtgggcgatctccgctcattgcaagctccgccttccgggttcacgccattcttctgcctcagcctcccgagtagctgggactacaggcacccgccacaacgcccagctaattttttgtgttttttagtagagatggggtttcaccgtgttagccaggatggtcttgatctcctgacctgacctcgtgatccgcccgcctcggccttccaaagttttgggattacaggcgtgagccaccgcgcccggaccactcttagtcattcttatcccaagttgtcatccctaattttgcttggcttgattaatcaagatgttcctctttggggttagcagtgtgtttgggggcacctttggggcttaatattcctcttatgcagcattacctaagtgctctacaaatatggcagtttggttcagtgaagtagtgagtagctcacaaaataggttaaaaggttttgttgtcagtttggtcatgggtgagaagttaagtcttttaatactgagacaatttcagctttcaaaagaagataatctcaggtgtgttttgagctttattttggcattattgttagtcctctaggctttaaaggagggaaaatattaatattttatcacttgttggcttctatggggagaaccacaaagtgtttgccatataaaatcaggataaaatggcattattactgtgatagtaggtaagttaacatattttcctatccttgactctattatggcaagaagtttcaagttgaatatagtccccccaatattcaacttgaaattcagttagaatttctgtggtactgccaactctgaagaaaaaatccagagttggctgtaaaatacagtaaatgtgtcccctttaacccacaatcttgctgctatttgtgtgaatccatgaagctgagctttgtggttctggcagcaggaaagacactatctcagcacttattctgggatcatactttcagtggcaacacccttgccagctttgtcttgtttgaaaaaagccaaaagtaatagttgtgctagaaacattttctttctctgaaaaaaccttcctgcattaatacaggccttagtgggacatcaagttgattatctatgtttaaagcagaactataccatacttactgtggctagtctgaacctaaacattaatttatcatatattcatccgtttgtccaaaatgtcttaggcctctgttgaatttagggtgaagcattgtacaattgccagggacattttctctttatgtcgattcagtggcacacatagaatgtgaacggttggtaatgacaaggtactgataccaggttgtctgcttagtattaggatgtacaaagctattaattcataaataagacatggtttcttctctcatggagccctcaggctaaggaggcaggcatgtaacaatagggtaacatatgttacaggcgtcctgccggaaacccatacagattacagtggtaatgcaggagggagcagccaactctattggccaaaagtattgaggagtgaggtgctcagtcaggaaaggctttgtagttagtgatggtgacttgaaaagcagataggtagggagaagaggagagactggcattgctgacagaactggcatagccaagctgcacaagataaaccaaactatcctatgcatagaaaagctgtccagtagattagggtgtgggagctgttctgggagacagcaggagagtcagagtgaggccaggaaatagacagctgtgatggttaattttaggtgtcaacttgactggattaaggacatctagaaacctggtaaaatgttattttggggtgtgtctgtttccagaggatattggggtgtgaatccaagtggattaggtggggaaaatccaccctcagtgtgtgtgggcaccatccaatctgctggggcccagagagaacaaaaacattgaaaaggcagatctatttgctggagctgggatacattcttcctctcctgtctttggacaacagaactccaggctccccaggctttgggcttcaggacttgtatcattggccccctgggttctcaggcctttggcttcagactgagagttacaccatctgctttcctggttctgaggcctttgcacttggactgagccatggtactggcatcccagggtctccagcttgcagacagcctgtcatgggatgtctcagcctgctaatcacatgagccagttcccctaataaatcccctctcatatctatatctgtatatatctttatgtctatatctatgtctgtctatataatgttccatctctctggagaaccctaactcaggagccttattgcctttaaaagaaatttggactttatcctgtaggcaaatggggagccataggagagctacgctgctttagatgagatgatctacttgggatggttggttgttgttttgagacagcatagaaattcttgaagcagaagagaggtaaaataccttatgcatttttcccctttagaacctaaacattttataaagacacaagggcaaatactgaagcataagggagtaaaaagctacatgtaaagtggtctgagtgcagaattttagatttttgtgattttctttctccttagtctttttatgtttatgtaatatttaataaatcacatcattatagtaacagctacagctggcttgaggagagaaacacaaatgaatataactgtgaaactcagtgaacatatacataggggagtagctgaagactttactgtgctggggcgttggtcaggatcttttagagagagaacagagaccgttggttaagtaggtgacggccaacaaagtttctttgtatttacattgtgatcagccatttttcagaggcacataaaatagatgaaagttcctgacatgagttatattttaatagaattccttctttgttgccattgatgtaaattagtacaaaggaccataaaattgtaactttagtcattcagaagtatgtctgttttttttgtgtctttacgaaatgtattatccaaggagggcttttggaattagggagaaattttcttatttttgataatgaatgcctggattggggtcccagaaattgtatgcatcacagacaaagcaggcacttccactctgttcatctgaaatctaagggatacttaatttagggtaatggctccttagtgttcccctttggtgtttctcatgtgattttgctttactcttaatattaacaaaaacagctttatatgcatagacaacagcaagtattttacattcaaaaaatcgactgaaaggtaatagaattacaacattgtctagatttcatcttttggcctgattgcatatgcaggctatgaggattatcttggagaaaagggaaagctagaagtaccataagcatgatagtcacaggtaggtagggctatattgccaggcactgtcctaaacattttaattcatgtaattcattatagttcatatataattctcattgagttgggcccattatcgggtggagcaagtggggagaggagaggctggagaggagccccaggtgccatccgaggtccttctagctggccttaccctgggggccgggcgggggcagcaggcgtctagcagggaggcccagcggggagggagctgcaggggggccgcgagcgccagcggggactggctgggagcagggcaacaatgggcggagttttccgctcctccccgcccttggcttgagcgctccagctcgctagtggcccgggcgaactggagttgccgtgtgacgcgtgggcgggacgaggcccgggctcggggacctttcgcactcgggtcaggggtaaagcagcctgtcgcttgccgggcagctggtgagtcggtgacctggcctgtgaggtacgtctggcagcccaggggccgtagcgggagcccttgaggccggtagccttgcagggctggcgccgggcaggagccgggtcgcagcggctgactgcacaactgcgtgcgaatcggcgaccggggcgagggcaagggctcctgaggccgcttggaaagggcttttgggaagtctagaaagccgcatgagtcactgttgctttcgtattagaaatgccttgttttcgaattagaaatgccttgcggtcggttttcagttactactttagaaaattgatgtgctgggatttattgccctcagttgcttgtataaaggtggacaaatctgagcctagtaaactctgaagtgttaaatcttaaaatgttcaatagtgaatttattattatcttattttaaatctgttgcgatattaacgtttgtttgtgtggttttaaaaagattacagagaaccagattctggatttcagaaactgcttgtcttgataaggaatttaaaatgggctggggctaaggtaagatgtatataatccttgagttaatgagttgtataaaaaacaacctttaggccgggcgcggtggctcacgcttgtaatcccagcactttgggaggccgaggcgggcggatcacgaggtcaggagatcgagaccatcctggctaacacggtgaaaccccgtctctactaaaaatacaaaaaaattagccgggcgtggcggcgggcgcctgtagtcagtcccagctacctgggaggctgagacaggagaatggtatgaagccgggaggtggagcttgcagtgagatcgcgccactgcactccagcctgggcggcagagctagactccgtctcaaaacaaaaaaaaaacccaaaaccaacctttaaaaaaaagacggaagaaagaacgtgtgaagtgaaaaaagtctcaaggtaaaattgcaaaatattttttaacataatttttttaaactaaaagctttac

SEQ ID NO: 5032 - DNA, 6000 bp, Homo sapiens
catcattctttgggattaacactaggaagctaacatgtatgtgtttcctaggtcaaagctcagattcacagttgcataagccgtcacctggaatgtcttagaagccgtgaggtatggctgtatgaacaggtggaccttatttatcagcttaaagaggagacacttcaacagcaggctcagcagctctactcggtaaggtgactgcatggctagaattggtttgagcatggcttctggttgccagagagtatcttccttgtaatgcagtgttaatatagatcagatagaagtttaatctcaagtgctgtttggtaacttgagtatatctggtgcttttggtgtcattgtggctagttggtttcatttttcttttagttattgggccagttcaattgtcttactcatcaactggagtgtacccaaaacaaagatctagccaatcaagtctctgtgtgcctggagaggtaatgaccctttttgcgtattttaacttttgactcttgaactttggtatactaaaagaaagtcgattttgtaactcattgcttgtgttatatttaacttctgtgttgctaggataagatcattctgcttcatgtatttaatattatacttgctgatacatgaataagccatctatctttggttgagtttcttagagaagtgtaatcatttaaaattactcacaatttggcttttgttttagatgaagttgatgaaacagatattccttaaaaatagccaattttgtttttttttccccagactgggcagtttgacccttaagcctgaagattcaactgtcctgctctttgaagctgacacaattactctgcgccagaccatcaccacatttgggtctctcaaaaccattgtgagtaatctcatatgcttcactgggcacttctcatatctgtggcctcacagctggtcttaaaaaaaattgctatgaatagtgactttcttgagaatttgattagcttcaaaaatttcatgttctcagctgggcgtggtggctcacgcctgtaatcctagcactttgggaggccgaggagggcggatcacttgaggtcagaagttcaagaccagcctggccaacatggtgaaaacccatctctattaaaaatacaaaaaaattagctgggcgcctataatcccagctacttggaaggctgaggcaggaggatcgcttcaagctgggaggcggaggttgcagtgacctgagatcgtgccactgcattccaacctgggcgacaaacagtgagactccgcctaaaaaaaaaaaaattcatattctgattaagttgcctaggttggtagttcttggaatgtagtacagactcagtgatactctttggaatgcctcatgtatctctctaaatacttttgaaatattttttgtaaaatttatggcttgaatagtttttaataaagaacgaaacgtttgggtcttgttaaaagtggtaatacaaccaattctggtaaagattttttatataatagttatgtggtagagtattctcaaatttgataactactttgtaagtcatggaatttagtgtgaacagtatttctaatgaaatggtaatgctttaacatttttgaaatttggaattataatttcacttttttggcagcatagcataaataacatgattaaattatctctattttgtagcaaattcctgagcacttgatggctcatgctagttcagcaaatattgggcccttcctggagaagagaggctgtatctccatgccagagcaggtaaaatatcattttgtttttggtaattgagtcattacttggcttatacttcctttgggttttatatagcattaaaaaaatgctactatttgtaaaaaggcaccagtggcaatgagttagtttatgaaattgaatgcttcccttgagacctaatgccaaatagaaatttagatgtcttgtcggggctgattaacagaaaaagtaattatcaatcagttcacaggaaattatcattagctgtcttactgatactggttctctgtgagcgatcctctttataatttgtagagatgatttatttctaaaggaatggcaatgtgaataaaggtttctatatgttttagttgagaagagccctagagatcagctgtgtgtctcttgttttataattgtgaaaattgaggctcttggaaggcacatgatttgcccagggtcagtggcaagccaagattagagagtggctcttctctttttctggtgaactttctactgcatttgacattccttgttttgtgattaacagaagtcagcatccggtattgtagctgtccctttcagcgaatggctccttggaagcaaacctgccagtggttatcaagctccttacatacccagcaccgacccccaggactggcttacccaaaagcagaccttggagaacagtcaggtctgttgctgcttttattgtttctacagtagacacagcagtaggtggagttagttactaatcagtagtactatgtgtcattgttaactttttggttgcagtctggaaacatatttattaatagtctcttcatcatagaaagtttagaaaataaggaactctttatcatagaaaattttaaaaataaagaattttatattaaaaaagcccacaaacccataatctcaacacaaagagaaaaacactgtaacaataaaagtgaagtatttatatacttcagttttctatacatacatattttaaaagaaccattctgtaagtcctgtttcggtaggtagattttttttttcaccaggataacattaacatatttctctgtcatttaatttcttctgtaaagtatttagtagtatataattgattggctgtaatttaaattcaagtttttctggatataaaaaaggattccctaaacatccaggagccaattatttgtgtgcattcttgattagttccttaggagtacatttatagaaattgcattcctagattataattctgcttacgctttaagactttggatacatattgccaatttggcttcccaggaagttgccaacagtttatagtctcaccagcagaatattcagggtacctgcttccctgaaacctaagagtaatagtcatttaggttttttgctctgaatttgacacaaaatagcaattttgcttttgttttttcttccattagtaaggaggttgagtattttcttttttcgtttttttttttttttttttttttttttttttttctttctttttgagaccgagtcttgctctgtctcccaggctggagtgtagtagtgggatctcggctcactgcaagctccgtcctgcgggttcatgccattctcctgcctcagcctcctgagtagctgggattacaggcgcttgccaccacaccctgctaattttttgcatattttttattttttagtagatacggggtttcacccgtgttagccaggatggtctctatctgaccttgtgatctgcctgcctcggcctcccaaagtgctgggattacaggcgtgaaccaccgtacccggccaagtattttcatgtttattaggcttctttgatgacttgcctgatcatatcctttgcttattttttgtgctttatttgtaaaggcatattacacccttttctatcagataagagtatctaaatagagaaatcccttgccttttggctttgtgtacttaaatttcaaaacactgggcaagacagtaaatatgcagacagggccgggcgtggtggctcacgcctgtaatcccagtactttgggaggctgaggtgggcggatcacgaggtcaggagatcgagaccatcctggctaacacggtgaaaccccgtctctactaaaaatacaaaaaaaaaaaaaattagctgggcgtggtggtgggcgcctatagtcccagctactcggaaggctgaggcaggagaatggcgtgaagctgggaggcagagcttgcagtgagctgagattgtgccaccgcactccagcctgggcgacagagtgagactgtctcaaaaaaagaaaaagtgcagacagaatctccaaagcagtcataattgttctggcaaactaatactgtgtactttttgtgtagacttcttccagagcctgcaatttcttcaataatgtcgggggaaacctaaagggcttagaaaactggctcctcaagagtgaaaaatcaagttatcaaaagtgtaacagccattccactactagttctttctccattgaaatggaaaaggttggagatcaagagcttcctgatcaagatgagatggacctatcagattggctagtgactccccaggaatcccataagctgcggaagcctgagaatggcagtcgtgaaaccagtgagaagtttaagctcttattccagtcctataatgtgaatgattggcttgtcaagactgactcctgtaccaactgtcagggaaaccagcccaaaggtgtggagattgaaaacctgggcaatctgaagtgcctgaatgaccacttggaggccaagaaaccattgtccacccccagcatggttacagaggattggcttgtccagaaccatcaggacccatgtaaggtagaggaggtgtgcagagccaatgagccctgcacaagctttgcagagtgtgtgtgtgatgagaattgtgagaaggaggctctgtataagtggcttctgaagaaagaaggaaaggataaaaatgggatgcctgtggaacccaaacctgagcctgagaagcataaagattccctgaatatgtggctctgtcctagaaaagaagtaatagaacaaactaaagcaccaaaggcaatgactccttctagaattgctgattccttccaagtcataaagaacagccccttgtcggagtggcttatcaggcccccatacaaagaaggaagtcccaaggaagtgcctggtactgaagacagagctggcaaacagaagtttaaaagccccatgaatacttcctggtgttcctttaacacagctgactgggtcctgccaggaaagaagatgggcaacctcagccagttatcttctggagaagacaagtggctgcttcgaaagaaggcccaggtgagcataaacatcaaaatagcactggtttgagttttatttatttattcatttattttgagatggggtctctgtcactcaggctggagtgcagtggtgcgatctcagctcattgcaacctccccttccgaggctccagccatccccctgcccgcactacagcctcctgagtagctgggaccataggtgtgcaccaccatgcctggctaattttttgtatttttggtagagatggggttttggcctgggctggtctctgaactcctgagcttaagcgatctgcccgtcttggtctcctaaactgctgggattacaggcgtgatccaccacacccagcctagagtttcatatttcataatcccaaaccttgcaaaccggccagccagatccttaaatatgttaaatactaaatttggaatggaggatttatgatttttttgtgcattttccaggcctaagccccatccttcaggaaagaaaagaatctagcctgttttattgctatttatggaaaatatttggggtagaaataacaattgtcacctttgtttttggttgttacagagaatggccaacatttaaattattctctgtagaccctatttggaagataagttggtctcatgcctccttgttttcatgaagcaacctactcttttcttttattgcaggaagtattacttaattcacctctacaggaggaacataacttccccccagaccattatggcctccctgcagtttgtgatctctttgcctgtatgcagcttaaagttgataaagagaagtggttatatcgaactcctctacaggtgggtacatgccaccagcatgaaaattagattatagctatttataaaataaatgttttgtcttacatatgaagtcatacttggctcactgaa

SEQ ID NO: 5033 - DNA, 6000 bp, Homo sapiens
cccccttccccaccaccactgaagacaagtgggtgccagggaaagaggcattgtcagagctagggaaagccaacttggccatccaagggtccccagaaggagcttagtttgctgctgaatcctccccaccaccccagaaaaaaaaacgtgtggttagtggataggacctgttctcccatccagcagggcatcccaagggagcagatatttctattttttttcctaaggtaattttgttgtagcaggagggaatatttctaaaacttgggtagtgggccagaccttactcgtggacaaataggaaaaggaaaatacatagtacacacacacacacacaaacacacacacacacacgggaagggggagcacgaaccttctatttccttctttgcaatttgagtgtctgtttctctacttcctgtctcctacccccaactatattcacacataactccaaggacaggatttcttatgacatactcactagttaactgtgcagtaatattgcacctggctctgtgaacatcttccacataaataacacatctcactttcacataaatcactacctgatacacatttcaacctgtgatatatcttttttccaagacggagtctcgctctgttgcttaggctggagtgcagtggcgcgatctcggctcactgcaacctccagctcctgggttcaagcgattctcctgcctcagcctcctgagtagctgagattacaggtgcatgccaccacacccagctaatttttgtatttttagtagagacaggtttcactatgttggccaggctggtctcgaacgcctgacctcaggtgatccacccaccttggcctcccaaagtgctagtattacagatgtgagccaccgcgtctggccatcaacctgtgatatatctcaaatcctaaatatacccaaatcctggatatatacacacacacacagtctaagtcatacacactgggacctatgacacgcatcctgacctcaatacacacaccaaaactgtgttataacccctaaacctgtgacagcctatcacatacacaccccgatcatttattatgcaaggacttaacctataaatcaccctctctgaagcctgcgtaccattcctcatcacagcctggccatagaataaaccccagctttcacaaacatactgaaatctataacattcagccagaccctgcaacatacagcctatcaccaggacttaagacactcccactgactcccaaatttacagcttaactctggggtagtcccacttctcccccactgcctttaaactttccaaagtgcattcacaggcagtacctcaagagatcctcatagcacatagggccaaatatcctaacagtgagatcctaacagaacccactgagacaggatgaccagggtgggctggggggtgggggggttgaaccctgcacttctaaacccaccagatacaagccaagccctgcagccattcctactcccttccccctccaggcctcaaatcactgtcctcatggggagggggaaatgtgctctggcttttgcctccagcccagagctcagaaccccacacccaccctgtctcctcagacaggagggactacaagggccctccagtctcgctgtggggtggaggggcccctaaatgccaagatgtatcgactggcaaaccattcaaaacaggccttctagttattctctagcaagtctgctcctttctctgctctgaccagatttacccagttgcacaggggcagaacaggtccagctaaaaagagcaagtctgagttagaaggccttagaattggtggtgaggtggagggagcagcaaataatgacaaagatgatgagggaaagtactcctcctggaggtggggactcaaaggacagcagccagccccagcccacaggatgaggtaccagcactgccccctgcccgggcccctggggctccctgacccaggcctccagtgtgcctgccccccttcctttgtctgtgcccggcctcccgttggcctggcgctctgccatcctcctctcctggctcccagccgccaccactgctgcctcctcccctccccctactcctccctgccttaacccttctgagccacatgctgccccagacaggccctggccccctcagcctcttgctcagggtgatgccccttagtcagaggctctccctgctcccagccattccagccccagaagctggtcctcaccccaggagcaatatgggtgttgggcatgtgtatgtgtgtatcttgtggtgcttctgcgtgtgcatgtgtgtgggtctgtgtgcgctctggcttccctcagtcacatgtgtggggcatgtgctgtctctgccgggctgggggaggaggaggagcccggagacagcagaacacaaaggagagactcagacaggcaggcaggcaggcggcaggcggcctgccagggcgcctcagccctcaccccagggctgctcaaggtgggggaaatctttgggcctggactgctacatgctgccatgccttccttgtgttcaagcatgtgctcccccatccaagcaagctgcaagccaggtcccctctctaacctcaactgctactattccccacctccagtctactctgaagccctccccatgtggttctccttgaagtctaacctccatccaccctctttggcatcaatctataagacttcttcatgatctggaaaaagactccccactcttccctatcttttgccctctctccctcagtcagaccaccagacacaaaaggaacatgccttctggggcattgactgaagttgtcttcccacccacccacaaacccctgggcttgggccctcttcctgttcccatgctgctcccagagactaagaagaagagattttctctctcctcccactggacccaggcaccctgccccaacttcagggccaacctcccatccacctccagcctgacaacccctccatacatacatacccgcttacccactatttgtaggaactaagaatcacaatttaagactcatccctctagcttgttcagatccttagtttaactgctctgctcatgtgtgttgatggagggtcagggccctggggtgggctaagaacatgatggatctgaaaggggtacccagcatgggtcaattataaaggagaaaatccacaacataaacatgtacaccaagctggtagaaagagggacgacggggccagacaggattccagcttggcaagctcttccctctcctctccccaaccctctgcagcaggagccagtggttcccatactcggatattctaggattgttaggttctcttattcctccttctgggacccatgccccttagacatcagcctcagcaggcacctgaagtgtgtgcccagcccagcttggcctgggtcacatgattttcaaggaagcttccgcactggcagcttcccttggggatttgtgggggagtggtgggtgtccagctgtgaagtatgtagccaaagcgggctacattcagggacactgacttccaggagaaagctgactccagtctggggcaggagggccaattccaggacccagagtcccggggatggagacagacagtgtgccgtgaggccctctgtagactacctctccagtcgcatggcttctctctttcctcctggcagtgaggtagacgccctccgccccccccacctgccccccaggaaaaaaactcagacctaggctatccctggcaagagctgatatgttttggggaggcagggatctgagcctgggtcctctctcaagttctcagttttgggtcaagtattgctcccccagcttacctctccacaaatcactctatttcctagcctgccctcccactagggcggagatgccagacccaagggtccaattatctggcacctcttaggagtacctccggtgcctcaggagggccaaccttccctggcaacaggcaggaaaagttgaaggtggggggcaagatgggccgcaatcaatacctccctgcaaacagggtcctcagaaacagcatgggggggatgtcacaggataggtaagaggcaatgggcagcagggaagggggggcagcccaaaccagccaatcacaactctatggtgacctgagggggggggtcaaaagtccagagtcacttctgattggctaacaacctggaattctgagaatttcagccccccccaaacctctccccaattagcctacccccaaaaaaacatacacataagccacccccagcgtctcctccccgtgtttctgggctgctgcgcatttacacagttggggaaaacgctacccgccagcctgaggccccgcgtagcccttccagcccccggcttcccccatgccatcgacgccccccacacaagttctcgccaaacacggggtgaggggtccgcagggacggctgggcaggaaggggccgagtggccgcacgccccactcaccaggacaggcacagcccactgacatcttcacatcgcccgcctctgggggcccagccgagtcacggtgcccgcccctcgcggggacaggccgggcatgagccgccgccgccgcccgcggcccccgctgcgctcgccgccggcccggcccggcctcggcccggtgcgggcggcccctggctgcggcgaggggcctgtcaggcgcggagcagacaggaaggaagccaggcaggaaggcgagcggcctctgcgtgtgtgcgcgcgggtgtgagtccgcggagtgtgtgtccgtgtgtgcgtgtgtgcgcgtgtgcgtgtgcgtgtctgtgcgctcccgccgccgtcgccgagcgcccccctctccgccctcgcgctcgcgctccctcgcgccggcgccggctccccagcccaagccgggcagggccgggctttattaatatgctaattgtcctgctagtgggaggggagagccgtgtcaaagtgacccgggagagcgcgcagcaagcgacgacgtgcgtgcgccgcgcggcgggcgggcggcgaggggctgggagcgctcggggaacggcatgcatgtgacgcagcttttaaaaaaggagacggaggcagagaccccagagagggagggcgaaggggagggcttggaggcgcagccgcgcgctcggtgtccgtcctccgggtgccgccggatggggagtctggctgagccggagcgggagccgcggctgggggaggcggagccggggtgggcagtgtggtgtatctctctccaccccgggccgcgctccgggagggaaaagggactgcagaccccctgtccgtgctccctgctgagacgccagccttcttctggaggccccttgtttcgcgtccctaccctaggctggatgggtaaagaagcattctcttaattcttgtagcaacccctcaactcaccccttccctaaattaaccactcctcctttgcctgcgaaaccagttgggactagaactaaaagggttaattaagtggggtccccgccctcctccgcctaagggcttgggatctgtgttttgctggggggagggggctgcggaatgaccaccagattggattacggaggggcgataggaggccatccttccttcttgcagactgacgcatcagtcaagacactctcttcccttcccccctttctccagccttggtgccttcacctccgtaccaaccgcccaaccccaccgcctccgacccccctgcctggaagctgctgtcctttgagggcttcggagatgagaacaggaaacaggcccctccagtgccccctaacccagagaggcagaggctgtgggccgtggggggttggatgggagatgatgtggatggtcaatgtaaggaacactccttcccctgggaggagcctcccaaccttcagtcacacttcaaggactccccaacccagccctaggaggggaggggctccatctccatcccttcccaaaagctcagctttagctgcctcataaacagg

SEQ ID NO: 5034 - DNA, 6000 bp, Homo sapiens
catccctgagcaatctcatggtgagaggtgatgacggcaacaacatgtctggcgggagagcaaagagaaagaggatggcgctaggagtgaaccgccaatccctgtgtcagggcaagggcgcggatgccctttttatgtaggcaagtaagctgcaggcaggtcatagcctgtaaaacaagcaggggtgatgttgaccccagcagagagagagccagagcctcagctcacacagagcatgcattagggggaatcacaaaaaggcatccacctgtagcttatgaattacacaaaggtggcccttcctttcctgtgcagcccattattggggcacaaaaccatgcctacaactcagcctccacttactcatttgtctggtacctttattcatggcacaaattacataaacagattggtagccctggatgggccgaggaatggtcttgtaagtagctgggcagaggcaacatcactgggcatgggtttgtactcagagatcttctgcaggggaattcctgagaaaacacaagattgtctcacagaagaaatggccagctcaaaatatctgctgagcccagggggcccattgctgaaggactccagctgtagaggtgtcagacacccactgagtctggagggcctgggtgtgaagctgggtgagaaaggagaaattgatggtacccatttctcaggctgaaggtgaagagagcctaacaattagataagtcagagggaatcttaaactgaaatgggaatattctgggtgttcaaagttataaaccagcccaagatttcatctgcacgggcccaggggaaaaaagcatctgggcattgagttcaaatggcattggaaagaaatttgcactctgttaggtccagctaatgagatgcagttcaatgaagacatctgtattcttgctgtaaagcacagggcttggcgcagaccaaggaatgactcataaggattaaaaggcatgaaaccaggttctttcttagaatttggcagtctttgcacttcactttctgccacatcattattttacagttagtacgtagagctggaagtggagggcaggacatttatgttcaagggtttgtggcaggctctcctgccagctgagcagctctctcctgtcgaagtctatggattctctctccttgtggtgtgtgcacgcagagccatgggctggctgaagctgcaaatggatgagcagccaacaaattgatcaatctattaatatttattgggcatctgccgtgtgtcaggctcagggaccaggcagccggggattcacaacaagataaatgtatgtccttgtgctctttaaatagttttctacctccactgggatttttactggcattgaaatctccacagtttatttttatagagtcttttatgtgaagtgtctcaaagcagggcagagagaaacacacagagaggcccccacggcttcttccaagctcatggtcctcatcaactcacacttaacagggctgggtgtgaagcataccattcccaaatgaaccaggctgcaaagcacaggcctgaagcaggcggtcctgtgaagggtaatgtcaatgaagtgattatttttttctgtcagtattgttcttaattatcttctgttcctgggctccaagcctgaattagaaaactctgaactcgagcataggccttgggatctctcctgaggtcctgagttccagctatccactggggtcctcctgactgtatctggggacccatggcttggaggagggtatgtttggcagtaagttcttatacttgtaaggagtagatgagccctacctcagcagagagcagacattggcacggccctcaaggtccatctcagagggcgtctgggtatccggatcaaggccaaggactgcaaagacaaaaattccaaacccagcattacctccctgtgctggccaattctgctcctccagctgagccttcccagtgtgatgatttgaatgtttgtcccctcccacactcatgtattaatattcaaagaaatttggttgctgctgtggcagtgttaggaggtgggaccttcgggaggtgaaaggaccatgaggactctgtccttctgggtgagattaatgctattagaagagggtgagtttgccttcctttttcctatttgctctctgccttctgccacatgaggacacaatgttcctctcctctggaggatgcagcaagaagactcacaccagatgctggcacctgatcttggacttcccattctccagaactgtgagaaaaaaatgttttgttctttacaaattatccaggctcaggaattctgttatagcagcacaaaacagactaagacacccagggattagcattgagcctcggaccatgcaggaaataaggaggcggtgtctgggggctgtggtgcagcaggcaggggacaaccaagcgacttcccagccctgttggaaagtggatctggagggatggactaaaagaggcagaactgaggcctgggctggaggacctgagagtgaaactgggcctgcactggggagtgaggaggacctgaagctgcaatgggaagccctgtgtggctgaatcctagaaccatgaggagaggcaacattagcaactagatctctggcctctgcttttggaatcacttttggattcacttttggatgagtggtgcatgaactcatccagactgatgtgtgaagggcatccaggcttacccctaaagtatggagactgcagtgggtctgttgctcacagaggaactcccagaaactctgggagagtcacagacctagagaagcgtatggctcaaacctcttgagcaagaaaagcagtgttcactgccaggcgtggtgatgaatgcttctgttttttgtgtcattaaacacttgcaactgtgtctccttttttaaaaaaaggaaaactgagacacaagttgggaagtaacctgccaaaggtcaccaactattcagtagcaaagcagggacttaaggccaggcttgcaaagctcctagtgctactggtaattggtaagactcaagggtttaaagaggcctccaaagaagggtagtaaactgtgatgggccctaaactttatagttcttcgaatttttcacaggtaaaaggacagaaagccaagaagagccttctgggtcactggcttctgggaatattgtgtggtcaagcaggaagtctgggggagatggaatgacacctcagggtccactcttaccaactgttcatttagcctccatgcaaggatttcctggtgatgtgaatgggggttattccctctgtgtgtcttggagcagccatgctgctcatgtttgtgaaatgatgaccagtgcagaatcttgatgttaggcactatgaagaaacattagacatggggtccatctttaaaggggaatcttaccctggtgatatagtttggatatttgtcccatctaaatctaatgttgggctgggtgcgttggctcatgcctgtaatcccagcactttgggaggctgaggcgggcggatcacctgaggtcaggtgttcaagaccagcctggccaacacagtgaaacctcgtctctactaaaaatacaaaaattagccaggcatggtggcatgctcctgtagtcccagctactggggaggctgaggcaggagaatcacttgaactggggaggtggagattacagtgagctgagatcacgccactgcactccagcctgggcgacagagcgagactccatctcaaaataaataaataaataaataaaatctagtgttgaaatttgatccccaatgttggaggtggggcctggtgggaagtgtctgggtcatgtgggtagatcctttatgaatgacttggtgctagtctcatggaactgagtgagttcttagtctttgttttcatgagaactggtcatggaaaagagcctggcacctcccacctctctctcttcctctgtcttgcacacattggctctcctttgtcttctgccatgagtggaagcttcctgaggccctcatcaaaagcgggtggtggtgccatgtttcttttacagcctgtgaaactgtgaaactaacaaacctcttttctttataaattacccagcctcaggtattgctttatagcaacacaaacaaactaagacatatggcaatggcgtgggttgcttgcagggtaccttggctgctacagaaagaaaaagtctctgtagagactcactgtcagtgactcacggagcagaaagctggcctcagagcctggacagagggtagctgtcactgcttaactgcagttcagctcaagcatatggctctctgtgggaccagcactgaaggctgggggataagtgaggcaggtcttgtcacaccttcagggtatctggattcaccaaagtggctcaggtcaggaccaatgaatagaggtttgttcgtcaagataaaaagattctggcttcctgttttcaggcaatgccaacgattgaattccctctacattgaccacccttgctgaagttgtcttaattgacctagcagccaactgacctcatattctggcacaggctctgactccttttgcctatctgccctgctctgatactacaaagagacccccccaccccagccctctggggcctcattaggggcttagagggcaggcgtgggtcaggcgagcattcctggagaacacagtcctcagtggttcaggatatgagcatagctcagagagctgttaacattatcagcctggcctgggagagggggacgcgcacagggtggtgcacagggcccgcagggaatttacagcggcgtccgcggcgatgggctctcagtgccttggaagaccggtagaggcaggttctgtctctcccggcctggcaagcagagggccgcggcgcagggcagagtgccgcggcgcagggcaaagctccagtgcgcaggctcgcgggcgcaggtgggattggatagcgacgaaggccggcaggctaggcgtggacccaactggcgaggctgctggggttgcagcgggacagttggggcggccccgcaggcccaggtgaggaaaggtggctgggggccaggtgggcagggggcgtgcgggaggccgctgcgccgggctgtgggagggcgggcgtgaagaaggaagatgccgttgacgtgcaggggtcacaaggcgtgggttgtggccctggcccgggagactgcccgggtgggcctgagctgtgaagtagtgtcgctgcagccagagggcaggacgtgattctggccgtgtgatgccagctgcactgtgacgcgtgttggggcgcctatgcgagacgggaccgggacaggaaccctgtggctctgtggtaggggaatgccaccaactccctgaggagcagccgtgtggtatgattggtaagaagccatcatcaggcgctgagacagcccagaacttcccaatgactcaagggcgggtggaggtcgagggacctagaaagaaagaacatgaattcatcaatccattcagcagctattttgaacgcctcctgtgtgccagatgctgttctagaagctcagaatatctatgaacgcgataggcaatgcccccatatgccaaggccctcatatgctagccttgactcaaggaaaactgtaggatggggtaggtttcatttttggaagttgtggaatcagtacttatgttttgaatgtgttaggtttgagatgcccagtaggtttttcccaatagaagacataagcatagctgggaagaattttgcagaggactctgaccacctaccacctacaggtgccatgaatatttagcacatttgatttttcacattacctattcaccttctctccatttatcagtcacctggtagttttttttagtatggtgaaatatacacacataaattatctagtagatatttgggttgagatatcaaatgtgctttttagaaatttaaatctgaagttctggaggatgtcgggctagagttaacctttgg

SEQ ID NO: 5035 - DNA, 6000 bp, Homo sapiens
catccctgagcaatctcatggtgagaggtgatgacggcaacaacatgtctggcgggagagcaaagagaaagaggatggcgctaggagtgaaccgccaatccccgtgtcagggcaagggcgcggatgccctttttatgtaggcaagtaagctgcaggcaggtcatagcctgtaaaacaagcaggggtgatgttgaccccagcagagagagagccagagcctcagctcacacagagcatgcattagggggaatcacaaaaaggcatccacctgtagcttatgaattacacaaaggtggcccttcctttcctgtgcagcccattattggggcacaaaaccatgcctacaactcagcctccacttactcatttgtctggtacctttattcatggcacaaattacataaacagattggtagccctggatgggccgaggaatggtcttgtaagtagctgggcagaggcaacatcactgggcatgggtttgtactcagagatcttctgcaggggaattcctgagaaaacacaagattgtctcacagaagaaatggccagctcaaaatatctgctgagcccagggggcccattgctgaaggactccagctgtagaggtgtcagacacccactgagtctggagggcctgggtgtgaagctgggtgagaaaggagaaattgatggtacccatttctcaggctgaaggtgaagagagcctaacaattagataagtcagagggaatcttaaactgaaatgggaatattctgggtgttcaaagttataaaccagcccaagatttcatctgcacgggcccaggggaaaaaagcatctgggcattgagttcaaatggcattggaaagaaatttgcactctgttaggtccagctaatgagatgcagttcaatgaagacatctgtattcttgctgtaaagcacagggcttggcgcagaccaaggaatgactcataaggattaaaaggcatgaaaccaggttctttcttagaatttggcagtctttgcacttcactttctgccacatcattattttacagttagtacgtagagctggaagtggagggcaggacatttatgttcaagggtttgtggcaggctctcctgccagctgagcagctctctcctgtcgaagtctatggattctctctccttgtggtgtgtgcacgcagagccatgggctggctgaagctgcaaatggatgagcagccaacaaattgatcaatctattaatatttattgggcatctgccgtgtgtcaggctcagggaccaggcagccggggattcacaacaagataaatgtatgtccttgtgctctttaaatagttttctacctccactgggatttttactggcattgaaatctccacagtttatttttatagagtcttttatgtgaagtgtctcaaagcagggcagagagaaacacacagagaggcccccacggcttcttccaagctcatggtcctcatcaactcacacttaacagggctgggtgtgaagcataccattcccaaatgaaccaggctgcaaagcacaggcctgaagcaggcggtcctgtgaagggtaatgtcaatgaagtgattatttttttctgtcagtattgttcttagttatcttctgttcctgggctccaagcctgaattagaaaactctgaactcgagcataggccttgggatctctcctgaggtcctgagttccagctatccactggggtcctcctgactgtatctggggacccatggcttggaggagggtatgtttggcagtaagttcttatacttgtaaggagtagatgagccctacctcagcagagagcagacattggcacggccctcaaggtccatctcagagggcgtctgggtatccggatcaaggccaaggactgcaaagacaaaaattccaaacccagcattacctccctgtgctggccaattctgctcctccagctgagccttcccagtgtgatgatttgaatgtttgtcccctcccacactcatgtattaatattcaaagaaatttggttgctgctgtggcagtgttaggaggtgggaccttcgggaggtgaaaggaccatgaggactctgtccttctgggtgagattaatgctattagaagagggtgagtttgccttcctttttcctatttgctctctgccttctgccacatgaggacacaatgttcctctcctctggaggatgcagcaagaagactcacaccagatgctggcacctgatcttggacttcccattctccagaactgtgagaaaaaaatgttttgttctttacaaattatccaggctcaggaattctgttatagcagcacaaaacagactaagacacccagggattagcattgagcctcggaccatgcaggaaataaggaggcggtgtctgggggctgtggtgcagcaggcaggggacaaccaagcgacttcccagccctgttggaaagtggatctggagggatggactaaaagaggcagaactgaggcctgggctggaggacctgagagtgaaactgggcctgcactggggagtgaggaggacctgaagctgcaatgggaagccctgtgtggctgaatcctagaaccatgaggagaggcaacattagcaactagatctctggcctctgcttttggaatcacttttggattcacttttggatgagtggtgcatgaactcatccagactgatgtgtgaagggcatccaggcttacccctgaagtatggagactgcagtgggtctgttgctcacagaggaactcccagaaactctgggagagtcacagacctagagaagcgtatggctcaaacctcttgagcaagaaaagcagtgttcactgccaggcgtggtgatgaatgcttctgttttttgtctcattaaacacttgcaactgtgtctccttttttaaaaaaaggaaaactgagacacaagttgggaagtaacctgccaaaggtcaccaactattcagtagcaaagcagggacttaaggccaggcttgcaaagctcctagtgctactggtaattggtaagactcaagggtttaaagaggcctccaaagaagggtagtaaactgtgatgggccctaaactttatagttcttcgaatttttcacaggtaaaaggacagaaagccaagaagagccttctgggtcactggcttctgggaatattgtgtggtcaagcaggaagtctgggggagatggaatgacacctcagggtccactcttaccaactgttcatttagcctccatgcaaggatttcctggtgatgtgaatgggggttattccctctgtgtgtcttggagcagccatgctgctcatgtttgtgaaatgatgaccagtgcagaatcttgatgttaggcactatgaagaaacattagacatggggtccatctttaaaggggaatcttaccctggtgatatagtttggatatttgtcccatctaaatctaatgttgggctgggtgcgttggctcatgcctgtaatcccagcactttgggaggctgaggcgggcggatcacctgaggtcaggtgttcaagaccagcctggccaacacagtgaaacctcgtctctactaaaaatacaaaaattagccaggcatggtggcatgctcctgtagtcccagctactggggaggctgaggcaggagaatcacttgaactggggaggtggagattacagtgagctgagatcacgccactgcactccagcctgggcgacagagcgagactccatctcaaaataaataaataaataaataaaatctagtgttgaaatttgatccccaatgttggaggtggggcctggtgggaagtgtctgggtcatgtgggtagatcctttatgaatgacttggtgctagtctcatggaactgagtgagttcttagtctttgttttcatgagaactggtcatggaaaagagcctggcacctcccacctctctctcttcctctgtcttgcacacattggctctcctttgtcttctgccatgagtggaagcttcctgaggccctcatcaaaagcgggtggtggtgccatgtttcttttacagcctgtgaaactgtgaaactaacaaacctcttttctttataaattacccagcctcaggtattgctttatagcaacacaaacaaactaagacatatggcaatggcgtgggttgcttgcagggtaccttggctgctacagaaagaaaaagtctctgtagagactcactgtcagtgactcacggagcagaaggctggcctcagagcctggacagagggtagctgtcactgcttaactgcagttcagctcaagcatatggctctctgtgggaccagcactgaaggctgggggataagtgaggcaggtcttgtcacaccttcagggtatctggattcaccaaagtggctcaggtcaggaccaatgaatagaggtttgttcgtcaagataaaaagattctggcttcctgttttcaggcaatgccaacgattgaattccctctacattgaccacccttgctgaagttgtcttaattgacctagcagccaactgacctcatattctggcacaggctctgactccttttgcctatctgccctgctctgatactacaaagagacccccccaccccagccctctggggcctcattaggggcttagagggcaggcgtgggtcaggcgagcattcctggagaacacagtcctcagtggttcaggatatgagcatagctcagagagctgttgacattatcagcctggcctgggagagggggacccgcacagggtggtgcacagggcccgcagggaatttacagcggcgtccgcggcgatgggctctcagtgccttggaagaccggtagaggcaggttctgtctctcccggcctggcaagcagagggccgcggcgcagggcagagtgccgcggcgcagggcaaagctccagtgcgcaggctcgcgggcgcaggtgggattggatagcgacgaaggccggcaggctaggcgtggacccaactggcgaggctgctggggttgcagcgggacagttggggcggccccgcaggcccaggtgaggaaaggtggctgggggccaggtgggcagggggcgtgcgggaggccgctgcgccgggctgtgggagggcgggcgtgaagaaggaagatgccgttgacgtgcaggggtcacaaggcgtgggttgtggccctggcccgggagactgcccgggtgggcctgagctgtgaagtagtgtcgctgcagccagagggcaggacgtgattctggccgtgtgatgccagctgcactgtgacgcgtgttggggcgcctatgcgagacgggaccgggacaggaaccctgtggctctgtggtaggggaatgccaccaactccctgaggagcagccgtgtggtatgattggtaagaagccatcatcaggcgctgagacagcccagaacttcccaatgactcaagggcgggtggaggtcgagggacctagaaagaaagaacatgaattcatcaatccattcagcagctattttgaacgcctcctgtgtgccagatgctgttctagaagctcagaatatctatgaacgcgataggcaatgcccccatatgccaaggccctcatatgctagccttgactcaaggaaaactgtaggatggggtaggtttcatttttggaagttgtggaatcagtacttatgttttgaatgtgttaggtttgagatgcccagtaggtttttcccaatagaagacataagcatagctgggaagaattttgcagaggactctgaccacctaccacctacaggtgccatgaatatttagcacatttgatttttcacattacctattcaccttctctccatttatcagtcacctggtagttttttttagtatggtgaaatatacacacataaattatctagtagatatttgggttgagatatcaaatgtgctttttagaaatttaaatctgaagttctggaggatgtcgggctagagttaacctttgg

SEQ ID NO: 5036 - DNA, 6000 bp, Homo sapiens
aaatgttatagcatgtatcaatagttcattccttttcatggctgaataaaattttgttgtattggccaggcacggtagagattgccgccttgcactccagcctgggcagcaagaacgaaactccatctcaaaaaaacaaaaaacaaacaaacaaaaaccaaaaaacttgaacatcaggctggcacggtggctcacacctgtaatcccagcactttgggaggccaaggtgggcagatcacctgaggttggtttcatgtgcgtccgtgtgaagagaccaccaaacaggctttgtgtgagcaacatggctgtttatttcacctgggtgcaggcgggctgagtccgaaaagagagtcagcgtagggagataagggtggggctgttttataggatttgggaaggtaatggaaaattacagccaaagggggtcgttctctggtgggcaggggtggatctcacaaagtacattctcaagggtggggagaattacaaagaaccttcttaagggtgggggagattacaaagtacattgatccattgatcagttagggtggggcaggaacaaatcacaatggtggaatgtcatcagttaaggctgtttttacttcttttgtggatcttcagttactttaggccatctggatgtatacgtgcaagtcacaggggatgcgatggcctggcctgggctcagaggcctgacagtcgggagttcgagaccagcctgagcaatgtggagaaatcccgtctctactaaaaatacaaaattagccaggcatggtggcgcttgcctgtaatcccagctactcaagaggctgaggcaggagaatcgcttgaacctgggaggcagagtttgcagtgagctgagatcacgccattgcactccaacctgggcaacaagagcaaaactccatctcaaaaaacaaaactcgaacatccctaagagtatttctgctccctagaacctatgccaacaccaccctcagggtccacatgatgagtcttcccatacatattattctcatgtaatataaccatttcataaagaagggaccgtcccccattttacagatgaggaatcagaggcacggaaggataaagtgaccccatccaggtggtattcccaagcctagtgttcatcccactgtactgtagctaatgtctctgagggcaggtaacttgaaacaaggtctgtgtggaaagcaaactccttgcagagaatttcaacgcaatctaagtgaatgcagaaaacccttgaattctgttcttccctgggcgattgtgaatgctgtccgagagtgtgtctttccaggcagggagccagtgtgctgggctcacaagttctcatcgcttccctttttgataccgtctcattacttttaattgcatctgagtctttctagcatcttgtattttgcttcctaatccagggcatttctctgcctcccactggtccagcacagcacttctctctctcagagctctccagagaggtgcccccagaaaatggagctggtcttctgtaatgaattcatctctgtaatgaatagtataatatccaagtcccagcatatttacatagcaatcttcacacaaaagcaacattacaaagggaagattttttttttttaaagaatgccatctcaaagctccatttcctatagtacgaagaacactattggaattaccctgacaggaaaacaaaaacaacttccagggatgctgggtgagagacaatagttaaaccagacccattaatgtttaaaatcaatggagcataaaactgcttttctctacttacagccaggcatcatcatacagaaaggaggaaaacattaccattttaactctactgaaatccgtaagccctcccctaattttcattcctctcgaaattctccagtaagtaccatcggaatgaaaatgagaatcagtctctccggggggaatggcttccagtcctcatcagtaaagtgtgtgaacagccctcgggagatggaggtgggaggctgcccactgggaaagtctccatcactcaaacctgcagaactagttgcggagactcactgtggggcatgggagcctccgggctgacttcagtaaagccctacacaatcccaggtcagggtagacctgaggcagaatttaagaaacctggcaagtgcacagaagtaataccctcagggtacgtttcacctagtgggctgcatgggggggatcttcaacattattatgttaaatgctccccaggggggactcgctggaattgagccagacctctgttagtaaaccgctggacctaatcctacatttgtgtaatgcctgacaacacccgttcccattatcttatttgatcctgaaaacaatcctcagagggaggccaggcagggattatttctcctatttacaagtgaaaacacttgtaaactgatttgcctggagtcccacacccaggatgtggcaggaatgagacttggatctaggtctttgtacaacctgttctgggttcttttgacttcacacaacagactgatcaaaacattcccagccccacccactcctcacaaccaccagcttaaccagcaactggaaactcaccagacagcttgtgtttatgctaccctcacacctctgtcctagtgaagaaacacacctttggctggcaagctctccaggaaaaaattaatttcatgtcatctccttgaaacaaagaccaacattaatcccagatggatttgaaaaaaaaatcaaggcatttgaaaaatctaaagaaaatagaatggaatatttaataactttctggcagcaaggagactccaaatttagcatcgtgttagaaatttcaaagagattttaaaatttgcctacatgaaaatttggttttagtgggggaaaaaatgactgtacagagccaacaaaagcctggagacgtatttgcggcaaaatatgaaaagggttaacatttggtatgtaaaggagtcatgcaaatacgtaagaaacactccctaggaaaatcttattaggaaatagacaattcataagaaaggaagtacagtttgttaacaaacatttagaaaactgctctacctaactgaaatcaaagatatgcaaactgaagggagaaaatttccctatataatccgcaaaaaaaaaaaaattcaataatactcaaatactagtgaaggtgtaatgatgtatgctcaagcattaatgatggtagagtacatttacctaactcttggaaagacacttcctgaacatttatcagtaaaccttaaaatacccaactactgtgacttaaaattccactcctgggaatatgccctaaggaaagaatcatcaatatcttaaagtgtcgcgcacaaaaatgttagttacacacttaacgatggtgaaattaggcaaatgttaaaaacataggcacttgatggaaacttatgtaatcattaaaatgttttcaaagtgcatgcaataacacgaaaaacgtttatgatgtaaggcaaagtggaaaagtgtgtaacactgtatgcatgtgtttgtatactacactttcatagaacaaaggctaaaaaggaaaaaaatttaaatgtgaaccatgagagattttttccatcccttatatttttctttttttttttgagacggagtctcgctttgttgcccaggctggagtgcagtggcgtgatctcggctcactgcaacctccgcctccagggttcaaaccattctcctgcctcagtctcccgagtagctgggattacaggcgcccgccaccacgcccggctaatttttgtatttttagcagagatggggtttcaccatgttggccagactggtctggaactcctgacctcaggtgatccgcccgcctcggcctcccaaagtgttgggatcacaggcatgagccacccaccgctcctggccaatcccctatatttctatttgaaccttaaaaaaaaaaaaagacccttctttagccgagcggcggtgagtcctattctcatgatatgtccgggggcttgaagactgcgggagggaaagcctctgggacctcacctcagagcgattctgctctgcttcaaagcgtcccctcttaggccgggcgcggcggctgacgccagtaaccccaacactttcggaggccgaggagcgaggactccttgagcccaagagttcgagaccagcctgggcaatatagtgagaccccccccccccaccaccgtctctacaaaaaaaatttttttaattagccaggcgtggtggccgcgcctgtggtcccagctgctccggaggcttaaagtgggatgattacttaagccagagttcgaggctgcagtcagccgtgttcgcgccactatacttcagcctgggcgacagagaccttttctaaataataaataagtaaataagtaacgtgccgcctcttcactcccaattccctccgcctttccccgccccgcctcgtcgaagccggacccgcggcggcccgcccctcccccacgaccagggccgggaactgcgggtgcgcggggcgggagtcgggcgggcttaggcgcggccgacacgtggggagggaggccgcggcccaggaggcgggcccggagtgggtgtgggtgtgtccgtgcgtgggagaaaccaacctcagcctcctccgaggcgccacgtttcagcacggctcgttgggcccgggaggtcggaaatcagtccccacgccccggaccccctcctggagggacaacgaacacaggcgcgggacggcttcggtcaccgcccgcgccgccctttgcccccgtgcctgctcgcgcgtcacccccgccccggtgcggtggtagggcccggcgcgacgtcacccattgtttacaaatcaacccgagccggcaggattccggctccagcggctgcaggcgcgtggctcgagtgcctggcgggctccggcttccgcgtccgcccctgctccggcttcgcccgcagctccgcgcccgcgggcaaccaagcccccagcgaagcccgcacagctccgggtgccaggacggggggccatgccgtgccggagggaggaggaagaggaagccggcgaggaggcggagggggaggaagaggaggacgacagcttcctcctgctgcagcagtcggtgacgctgggcagctcgggcgaggtggaccggctggtggcccagatcggcgagacgctgcagctggacgcggcgcaggacagcccggcctcgccgtgcgcgcccccgggggtgccgctgcgggccccggggcccctggctgcggcggtgccggcggacaaggcccggcccccggcggtgccgctgctgctgccgcccgcttcggctgagacggtgggcccggcgccctctggggccctgcgctgcgccctaggggaccgcggccgcgtgcgcggacgcgctgcgccctactgcgtggcggaggtcgccgcaggccccagcgcgctgccggggccgtgccggcgaggatggctcagggacgcggtcacctcccgccgcttgcagcagcgccgatggacccaagccggggcacgcgccggcgacgacgacccgcatcggctcctccagcagctcgtgctctcgggaaacctcatcaaggaagccgtgcggagactccaacgagccgtcgccgcggttgcagccacgggccccgcaagcgcccctgggcccgggggaggccgcagcggacctgaccgcattgccctgcagccctcaggctccttgctctgacgcaggcctcctggaggaggaagtggaggccgctgcgtagacccaacagcgtccagttcctactaactctgagctgaagccgacgtcgccagcctgggagcgaccactttggctgcggggaggcgcgtggggagagatctcaaccagagaagttaccagccgcggcgaggccgtcggagaaaacttaagcgtggagaaatgtatgcgccagggtgcttccgtggggcatgagaatttcccgggccatccaagcccaaggacctgg

SEQ ID NO: 5037 - DNA, 6000 bp, Homo sapiens
gtagcccagcagttctcaaacattttggtctcagaacctccttgcactcttaaaaattgagaccccaggctgggcacggtggctcacacctgtaatcccagcagtttgggaggctgaggtgggtggatcacctgaggtcaggagtttgagaccagcctggccaaccaacatggtgaaatcctgtctctactaaaaatacaaaaattagccggacatggtggcatgcacctgtaatcccagctactcgggaggctgaagtgggagaatcacttgaacccaggaggcagaggttgcagtgagctgagactgcgccactacactccagcctgggtgacagagcgagactccttctcaaaaaagaaaaaaattgagaatcccaaagagattttgtttacgtgggtttatacctatcattattcaccatatttggaattaataatgaggaaaaagttaaatgcattaatgctttaaaataataaatgtttatatgttaatataaatttttatgaaaaataattgtatttttcaaaacaaaaaataattttagtgagaagagtgacattgttttacatttttgcaaatctctttaatgtctggcttaacagaagccagcagattctcatatatgcttccgcattcagtctgttgccatatgttgttttggttgaagtatatgaagaaaatttggcctcacacataaatgtagttggaaaagggaggagtattttgatggccttttcagttaattgtgagtatgcttctttgatactaccccaaagactgacatgtgtagtttctttctttttttttttcttgagacagggtgtcgctctgtcacccaggctggagtgcagtggcgtgatcttggctcactgcaacctccactgcctcccctcaacaaaccccactccccaacccccactcaagtgtcgatcctcccacctcaggctcctgaatagctgggaccacaggcacacaccaccatgcctggatatttttttgtatttttagtagaaacagagtctcaccatgttgcccaggctggtctcaaaactcctgggctcaagcaacccacccacctcggtctcccaaagtgctgggaatacaggcatgagccaccgcgcctggcctgacatgtgtagtttcttaaatgtaatgcagaatctgaaaccatatcaataagcttctcttacccaattaccttaaaatccattggactatcttgtaccttgaatgggcatttgaattatgtacagttttgaccctgtatacccctccggaaagagtctcggggtccccctggggaacactgaccatactttgagaaccattgaaatagacaataaaagagtgaaaaaatgtagaatttgataacataattagcaagtttgatctaagaggtatttatatagaactttgctcacaacaaactacgaatacacatttttttgaacaaatggtcccctttatcagctgggggaaaggtctggacaggctgtggatgctccaagatggacagatgcccggcacagtgcccaggtgttccacctgctgcttaggccctggttcggcctcagcaagaaggggcactacatcagagagcagccttctcctgcccaggctgcagaaccaggtcaaatggccacagagagagagctcccctgacaacagccccatggtgcagccctcacctcggcttggttcctgtcaagtttccctccttgcattcaccctgtcccgtgtcaggggcccccgggggtccccacgacagagctgccaggtaaagagtgtccatgctcctcttccaggaggctttcagccagtcccctctgcccgttacagccctcggagctgtcaggtgtggactcacagctctctgatcatgcgcagttcttacataaccaccagtagaaacaaagccctgctctgtccaggccaggtactgggacgccaagaacagcacagccgaccagctgcccaaggaggcagcactttgcacaaccacctgggaggctctaacacaccgtcagtgcccaaggccataccttccctggagggcaggagcctgccaagcctggaggggtgggagagtcagggtgcaggggcagaactgctgttcagagccccaaaccagagccagaaccaaggcatccaagggctttcagaacacacaccactttctttctttttttttttttttttttgagacggagtcttgctctgtctcccaggctggagtgcagtggcatgatctcagctcactgcaacctcctcctcctgggttcaagcaattttcctgcctcagcctcctgagtagctgggattacaggcacgcaccaccacgcccggctaagttttgtatttttagtagagacaggatttcaccatgttggccaggctggtctcaaactcctgacctcaggtgatctgcccacctcggcctcccaaagtgctgggattacaggcatgagccaccatgcccagccaccactttctttttttaagagacagggtcttgctctgttgcccaggctggagtgcaatggtgcaatcacagctcactgtaacctcgaactcctgaactcaagcagttctcccacctcagcctccagagtagctgggattgcaggcgcatgccaccatacccagttaacttttctaatttttgtagagatggagtcttgctgtgttgcccaggctggtctcaaactccagggctcaagcgatcctctcacctcagcctcccaaagtgctgggatttacgggcgagaacaactgcacccagcccatacagcacatttttacctcaaagtcacacgtcccttggggatctaacattcctaggtgttcattctgtgtgttggcactgtgcagggggctttctttccattcaccttatttgcttctcacagtaactgctgaagaaattccattttacaaagaaggaaatgaggttaagtacttgcccaaggtcatacagctaatatgtggccaggatctgaacctggctccatcgtctgcagagcccaggctctcgcaccattgctacactgcactgcctggccctgcagagaccagtccttcaccttctgagtggccatctgcataacctcttcatgctgggggctgggagagggagaggggaaaagaaggccaaagtttactctacctggaccccactaggtcatcctggacatcaaacacggcttgtcccacccttggggctcagtgagatgaggcttctcctgcctcctctgcctgccttgtatctttttcttacaactagatcagaaggaacagagccatgtcttttgcacctctgtgtccccatgcataccctaccccatgccttgcagatagtaggtactctatgcattttctgtgaatattaaggagtggcccctcacccctctccactaccactgcaaggacagacccagaggaagacaggagccctggaaacatccattagtgggactaaggggaggagcagagggggaaagtgcccagtactcctgccttccagcagagccagcccccagctccccacgccctcctaggagacacctccccaaggtaccctccccaccaaagactgggaggtcaggtgtcaggctaggctctcaggaaggaattcccctcccttcaagcctccagtccaaattcctctcaagggagagccaatgaaaggcaggactcagacaggagagaaagacaccaagcatggggctcctgaaggtcccctcccctctgatgcttgcctgggtgccctgctcagacacaccatcaattccccctcttcccactgtgttccctaccatgggttggaagttatcttaccacagagtggttaagccctggcctttgtagcccaacatctggattcaaatcctagctccttcacatatgagctgtgtggccaagggccagttactccacttctctgaactccctatccccttggtcattaggcctacagactcagaatccaggcctcctggttgtttctgggctctgactctcgaaaaagactatctgggttcaaatcccagctctaatctgtgcttaacctctctgccgcaggatctttatctgtaaggtggggacaataatagtacctacccaccatctagccttattgtgagaattagctgagggagtttatgcaatgtgctcagatcagacttggcacacaattagcacccactaagtattggctatcattagcaatagctgataagcttggaacgtaccttgcaccgcaccttgcaccgcaccttgcaccttgcaccgtccctggcaggtagtaagagctcactaaatagaagctatgattaccttcacccccactagactatcctggccctggaggtgggttctgggtcatatccatctttgattccccagcagccagcatggggcctggcaccaagctcaatgaagacctgccaggaggaccagaagatccagggtgtggggtggcacgagcctcccaccagggagaagaggaaccgaggtgtcggggaagagaaaacagagcagagggagaaaagccaaggcagagagataagcaagtgaagtgagtgagaaaaggaacaggagaggctgtggcggagagagataaggaggaaggatggagaaggcgagggtcgaggaaaatgcccagggaggcagggagccctggggagaaacgctgggcgaggccagggctgcggcaggggagccgagccgggagaggggcgcaagacctggcgctgggcgggacgctcgggcagggtgcgggaggggctgagggccgcccccactgcctccccgccttggagctggggccaggcggccggagattggctggggcgcacggcgaggcccgggctggagccccgaggtgggaggcgccaggatcagtcggggcgcccgcagcgcaggctgccacccacctgggcgacctccgcggcggcggcggcggcggctgggtagagtcagggccgggggcgcacgccggaacacctgggccgccgggcaccgagcgtcggggggctgcgcggcgcgcacctggagagggcgcagccatgcgggcggcggcggcgggggggggcgtgcggacggccgcgctggcgctgctgctgggggcgctgcactgggcgccggcgcgctgcgaggagtacgactactatggctggcaggccgagccgctgcacggccgctcctactccaagccgccgcagtgccttgacatccctgccgacctgccgctctgccacacggtgggctacaagcgcatgcggctgcccaacctgctggagcacgagagcctggccgaagtgaagcagcaggcgagcagctggctgccgctgctggccaagcgctgccactcggatacgcaggtcttcctgtgctcgctctttgcgcccgtctgtctcgaccggcccatctacccgtgccgctcgctgtgcgaggccgtgcgcgccggctgcgcgccgctcatggaggcctacggcttcccctggcctgagatgctgcactgccacaagttccccctggacaacgacctctgcatcgccgtgcagttcgggcacctgcccgccaccgcgcctccaggtagcgccgccgccgccgtccccgcgcgctccgacggccctgcagctcccctagcacagctctgcgaaccccccaagaggtgcagctccccccctccgcccacacacacacacacacgctgtcctagctcagcccagcgtccccggaattatcccccgcagccttcccgccttcccacctccccagggagtggcagcatagtgcctcccggcggctccagaccttccctctggctctcgttccctggaaacccctggcacccctctcagtacccatccaaccaagctgctgagaatcccccaatgccgtccccccaatcctgggacgtcctgataaatgccttatgacccctctcagcccaagaatgcctggggtcgttaaacaatgcctttcacctggatc

SEQ ID NO: 5038 - DNA, 6000 bp, Homo sapiens
aggtgattctgtcatctgtttataagaatgaccagaatacaaaattctagcctttttacaatcctaaacatatactatgtgctaccaataacagcaacaatcaccatcatgcatgtcacttacatgtacacactaacataaagaactttatatctctgctttaaaatcctctttaaaagtaaactattagcctgggtaacatggtgagaccttgtcaatgaaataaaaaaattagccaggcacctgtaggcccagctgctctggggctgaaatgggaggattgcttgagcccaggaggtcaaggctgcagtgagccaagatcatgctactgcactccagcctaggtgacagagtgagacgctgtctaaaaaaaaaaaaaaggtaaattaatgttagtgtttctaaatacccacaaaattatgaaatttatattatgtcttaagtttttttttttgtttgttcgtttttgagatggaatctcgctctgtcactcaggctgatgtgaagtggtgcaatctcagctcactgcaacctccgcctcctaggtttaaatgattctctggcctcagcctccttagtagctgggactacaggtgtgcggcaccacgcctggctaattttgtacttttagtagagacagggtttcaccatgttggccaggcagacaagcctgacctcaggtgatctgcctgcctcggtctcccaaagtgctgggattacaggcatgagccaccacacccagccaatattgtgtccactgttttcagtttattaatctataaattaattttttaaataaaaaagctttatgaaaacaaaggtagatttcacctccctgccttatttcatgatgattcctgaatctgaacttcaagggagttgatgacttttacttaaagatgttctgggccgggcggggtggttcatgcctgtaatcccagcactttcagaggccaaggcgggtggatggtctgagattggtagttcaagaccagcctggccagcatggtgaaacctcgtctgtactaaaaatacaaaaattagctggtcgtggtggcaggtgcctgtaatcccagctacacaggaagctgaggcaggagaatcacttgaacccaggaggcggaggtttcagtgagccgagatctcgccattgcactacagcctgggcaacagagtgagactctgcctcaaaaaaaaaaagatggtcaagtccaccaaagtctttctaccttcctcttttctgagtattaatatatttattttctttgatagaaaaatgctattcaggtccttcatgaagacatgcatttacttttattacaaactcatcttttcagccacatcttttcagttgcttttttatttttgacactctatcccaaaaaagaattttaaaagtaaattttatgatacaatttttaagtttggttacatcccaaattggatttttctttgttggcagggaaagggagagttgatgaaatattctagctgcttctctgagctaaggctaaaggttttcttctttgttgttttctttatcacatgtttggtaatttagggacacacatcaccaccaaataacagattatatgccaattttccattttggctttgctttttttcctgcatagtgagtatgttgacttttttggaaatcattacattacaaattctaggctaagagtttacctgatctctagtttgaatgtgaaagaggatgatttgatgttttttttttttttttctctcacccaggctggagtgcagtagcgcgatctcggttcactgcaagctccgcctcccgagttcaagcaattctccttcctcagccttcccagtagctggcgcctgtcgccacgcccggctaatttttttgtattttttagtagagacgggttttcacagtgttgtccaggctggttttgaactcctgagctcaggcaatctgcccgcctcggcctcccaaagtgctaggattacaggcgtgagccaccgcgcccggccgctttaatgatgcgcccggccgctttaatgatgaccgctaaatgatgctttaatttctccattaatgagggccgggggcagtggctcactcctgtaatcccagcactttgggaggctgaggcgggcggatcacgaggtcaggagatcgagaccatcctggctaacatggtgaaaccccgtctctactaaaaatacaaaaaattagctgggcgtggtggcgggtgcctgtagtcccagctactcgggaggctgaggcaggagaatggcgtgaacccggaaggcggagcttgcagtgagccgagatcgcgccactgcactccagcctgggcaacagagtgagacttcgtctcaaaaaaaaaaaaaaaagaaaaaggccgggcaaggtggctcatgcctgtaatcccagcactttgggaggccgagacaggcggatcacgaggtcaggagatcgaggccatcctggctaacactgtgaaaccccgtctctactaaaaatacaaaacaattagccgggcatagtggcgggcgcctgtagtcccagctactcgggaggctgaggcaggagaatggcgtgaacccgggtggtggagcttgcagtgagccgagattgcgccactgcactccagcctgggcgacagagccagactctgtctcaaaaaaaaattctccattaatgaaaataaagtaaattacacttgcatgattatggattttaatcctgatttatgttgggttaaagaagttttagtgcctccactaaaaatgagatagaatatagatgaactactcagctttactatgtatcctgaatgagttaagtactcaaacagtaagaaattacaaacatctctaacacaaatctaaacacaaaatgcaggaaccatattcctgctatatcatttgtcttccttcttgattcgctcatagtacacaaatgtagcaaaatcaataaatattgaactcatgacatcacctaaatgtgaagtattcctgccttagtagtcttctaacagtatggtacctgtgaataagtaaatttctttataatgatctctaaaacatggcttaaattctttggccgcattgaaatctataaaatagtgctttcaataaaccactgccttgagtttggaaatcgttttctacacaaagtctttgttgcatttggagagggggagggatggcatttttttgtaacaggatttgacctgtaactattattaagaattttcttagaggagttcaaagcattttacagggatcatctcatttatccctcgaaagtaaggcagaggcattatctccactacagattgagaacactaaaaggccaagataggtggggctttttgttgttgttttgctaagatcaaaaagtaattctagggcaaagccagattccggtctgaccttgttacatgatgcttcttgcagcaccataatacaatgtagttgcttccctaggtttctctttggctatgctaggtgttgaataattttcagggtcaatttttattcttccctgctccctgaaaatgagtgttaagatgtagataagtacaaaagaaaactctccaatccttcctacctggatttggagtacaggataaacagacagaaattggcatcttcctcccctcctccaagttttactgcctagcccaatgctaatagaaaaataacccgagccacaaatgcaagtcccatgtataattttaaattttctagtagttacattaaaatatattgtatttagcccaatacagcgtatccaaaatattaacacttcaacacgtaatcaatataaaattattaatgagatattttgcattcttttttttgtatggcttcaaaatctggtgtgcatttctcacttatagctcatttcaatttgtattagccacatttcaaatgctcagcagccacatgtgacgagggaggacactgttggacagcacaggtctagacctcagtagctctcccttcagattaatgccatgtgaatcgaatgggtggtatgaagaatggatgctgagtccttggagaatccacttgcacttgggtggtgactgataagaagccctagctgtgccatttcctgatacatgactgtttttgaagttatggactcaggatctagaagactgcaaatccccaaatacgtctaacacccaagctcacgccaggaccgtgcttccgggcctgtgtgagaacctaagctatggaacctgtcaacttctagggctgcagattcgttgggccctcacatgtggcccgtggaaaggaggcatcactcgaggaagaggagggcttctagaggggcaaggccacccaactaggggcttcttgagggcaggtgctccaaatggccgcttcctgagggcagcgggtcctcttgtggcctcaggcagggccctgaaaccggcctcacgtgtttgcagcgcgaactcctgtgcttccaccaagcgctctcggggatgcgggggtggtgtcagcgccccggccccagcccgcaccccgaagtggctccaaggctgcaggtgtgaggggcgtgcccagggctcggcccgcgccgccccatgtgacccggtccgacatggtgtcgcctcctcccggggcggcggcggtggcggctcgggctgggctccgcgtcgggccggccccgcggccgctcatgggcagccagggccgctcggggccccccgggaacggcgggcccggcgagggcgagggcggagaggcgaggaagctgcaggaagggagggtggcgagggggaagcgaaggaaggggaaggggaagggaaaagcgagagcggggcaaggcggaagaggaagcggggcggaagggaagcccgggccgcagacggcgaaggaggcagccgggccgggggctgacgcgggagcgagggcatgcccaagggaggaagcagagggaggcagaagcgtggaggaaggggcgagaggcatcgtcaagggagtcgaggggagcgcaggggccgggaaggaggcacaaggaagagagtatgggaagaaggaggaatggagggtcagggctaggcggcgggagggcgccaggccgggaagagcacagggacgagggggtcaggcttgggccgacatcgcggggacaggggtggccatggcggcggcggccggggaggaggaggaggaggaggaggcggctcgggagtcggctgcccgcccggccgcggggcctgcgctctggcgcctgccggaggagctgctgctgctcatctgctcctacctggacatgcgggccctcggccgcctggcccaggtgtgccgctggctgcggcgcttcaccagctgcgatctgctctggcgccggatagcccgggcctcgctcaactccggcttcacgcggctcggcaccgacctgtaagcgtccgctcgcccgcccgctccccgccccgagccggccccgcgtcccgggaaagggcggggcgccgcggcctggtcggcccagggtcgtgtcgcaccccgagtttctaggcctacacctgacctccgcctacaccctttcccgagcactctcggggacccctttgcccctcctccccaaggcctccatctgaggcagcctcccgagagcatccctcagtaggcaccctcccgggtgggccgctcctcacaattagccatcttaggcactccctacagctttcgattgtgtgtttttgcagaggtttagctgccccggttccttcgccccagaggagccagtctggtacggtgctttggacgattccttgagtccaggtctaggactcaggttccttaagtggtctatcataaatttttgtggactttcatctttcatcctccctacccttttctaaaggttgttaagcttcagggctcggaccttaagagaagccctcggtcccagtgttcagccatagtttatgacttcatataggcagagcgacacgaaaaagggggcctgcttgaggcaggaggctggagtctgtc

SEQ ID NO: 5039 - DNA, 6000 bp, Homo sapiens
accatgttagccaggatggtctcgatctcttgacctcatgatccacccacctcggcctaccaaagtgctgggattacaggcctgagccactgcacccagccaatttccccttttctatggcttattgtttctaacactttattgtaaaatttttcaaacagccaacaaaattgaaagaataccctgttacccaacacctagatcctagtattttaaaaattgagatatatttcacataacataaaattcaacattttaaagtgtacacttcaatagtttttagtactgtatattcattatgttgtacaaacatcaccactaatttcaaaacatttttataaccccaaaaagaaaactcttacccattagctgttagtcctaattccccccttctcccatcccctggcaaccactaatctaccttctgtttctatggatttgtctattctggacgtttcatataaatagaattacacaatatgttgcctttcctgtctgatttgttcactcagcataatgttttcaacattcattccttttgtagcatgtatcagtacttcattcctttttatggtgaataatactccatcgtatgagtatacgacatttgattcatccatttatcagctgatgaacatctgagttgtttgcactttttgactatcatgaataatgctgctatcaacatttgtgtacacgtttttatgtgaacatatgttttcaattttctctggtatatagctaaaagtagaatggatgggtcatatggtaacattaacatattactatacatgttttatcacatatctacctgtctaactatccttctaatccatctatattaatccttctcacattttactgtactttggaataaattgcaaacatcagtacacctcactccaaactcatcagcatgtctattactataattcaagctttctttacaatttattctcttcatgtaaaatctacaatttttttctctttgtttttttgttttgttttgttttgtttttgttttttgtttttttgagacagggtctcactctactgcccaggctggagtgcagtggcacaatcttggcttactgcaacctctgcctctcgggctcaagcaattctcctgcctcaatctcctgagtagctgggactacaggcatgagccaccatgccctgctacttgttgtatttttagtagagacggggtttcaccatgttgaccagactggtctcaaactcctgacctcagctgatctgcccacctcagcctctcaaagcgttgggattacaggcgtgagccaccgcgcccagcccactcaatgagttttaacacatgcctaaacctatgaaacccaaatcaagatatcaagatttagaacatgtccaccctcctgcaagttccctctgtctgttcagtgtcacagtgtcagtcctgcccctgctctaccttttccaaaggcaaccagtcttctgatgttttccccaccgtaagttactttccctgttctagaacttcatataaacagaaacatatgacatatatccgtttttatctggcttctttcacttagcatactgtttttaagcttcattcatgttactgcatgcagcaatattcagtcctttctgttgctgaactgttttctgtcatcatcctgtgtgaatgtacaataggttgtttgtccattcacctgttgatgaacacttgggccatttcacttttggcttttatgaataaaactcctttgatgtgagccaacatcgtgccactgcactccagcctgggcaaaagagggagaccctgtctcaattaaaaagaaaaaaaaatatgctatgatcacctccctgtaggccttgatgtgggcccatgtgtttatttctcttagctaagtatccaggattgaaactgtgttccaggacaggtgtatgtttcattttataagaaactgtcaggcctttttccaaggtggttgtaccatttttcatgcccacaacaatatatgaggcttataagttgtgagccaaagataaaaatgcacaaattgtaaactgctactaattattttcatttgaaaattttaagtaggccgggtctggtggctcatgcctgtaaatcccagcactttgggaggtcgaggcaggcggatcacctgaagtcaggagttcaagaccagcctggccaacatggtgaaaccccatctctactaaaaatacaaaaattagccaggcatggtggtgcacgcctgcagtgtcagctacttagcaggctgaggcaggagaactgcttgaacccgggaggcagaggttgcagtgagcgaagattgtgccactgcactccagcctggacaacagagcaagactccatcacaacaacaataacaacaacaacaacaacaacaacaaatgcccaacaaaccaggaatagaagggaacattcttaacctgataaatactatctatgaaaaatccacagctaacatcctacctaatgttgtgaaagactgaatgttttcatctaagatcaggaataagacagggccaggtgctgtggctcatgcctgtaatcttagcactttaggaagctggggtgggcggatcgtttgagctcaggagttcaagacctgcccgagcaacatggtgagaccccctgggtctacaaaaaatacaaaaattagccaggcatggtggcttgcacctgtagtcccagctactcaggaggctgagataggaggatcaactgagcctggggaagtcaaggctgcagtgagcagagatcatgccactgcactccagcctgggccacagaatgagaccctgtctcaaaaaaaaaaaaaaagaaaaaaagaaaagaaaaaagaaaaagaagagaagcaaaactatctctatttgtagatgacacgatcttctatatagaaaatcctaaggaatccacaaaaacaaggtgatgaaccttatgacaccctgtagaaatccagatttcgtagattagaaatccaatggctttgtttaaactgtctcttcctctgtttttacattttttcctccacacttgacaaaaacaaacccaactctttttaaaccaacttccctacctctttcctgcactcatcccttcctaaaggtttgctcctataattattatcgttggaactgcccaacaagaccctcgttttctatttatctggatctccaggctcatttctttctttgtatcctattttctatatcatgctcagaattttaaagttgcttccaggctgggcgcggtggctcatgtctgtaacgccagcatttcgggaggagggattgcttgagtccaggagtttgagaccggacgggccaacatggcgaaaccctgtatccactaaaaatacaaaaattagccaggtgtagtggcgcgtgcctattgtcccagctactcgggaggctgaggtgggaggatcacctgatcctgggaagtcaaggctgcaatcagccagatcacaccactgcactccagcctgggtgacagagtgaaattctgtcaaagaaagaaaagaaagagaaagaaaaggaagaaaggaaggaaggaagcgtatctccattttcatccaaacaggtatttttctctgctactacgtacctcctcagagcccatcccccctactggtctgaggcttttttttaaacaactttctggacatagcccctcttaagactaacaacctatagccaggcgtggtggctcacgcttgtaatcccaggattttgggaggccgaggcaggtggatcacctgaggtcgggagtaccagaccagcctgaccaatatggagaaaccccatctctgctaaaaacacaaaattaggctgggcatggcggcgcatgcctgtaatcccagcaactcgggaggctgaggcaggagaactgcttgaacccaggaggcggaagttgtggtgagcggagattgcgccattgtactccagcctgggcaacaagagcgaaactctgtctcaaaaaaacaaaacaaaacaaaaagagtagcaacctaggccgggcgcagtggctcacgcctgtaatcccagcactttgggaggctgaggcgggtggatcacctgaggtcaggagttcgagaccagcctggccaacatggtgaaaccccgtctctactaaaaatacaaaaattagccgggcgtggtggtgggcgcctgtaatcccagctactcggaaggctgaggcaggagaattgcttaaacgcaggaggcggaggttgtagtgagtggagatcgagccactgcactccagcctgggcgatagagcgagactccgtctcaaaaaaacaaacaaacaaataaacaaaaagactagcaacctcctctccagcaatgccaaccccagtccaggcccccatccgcccaggatctcgatcaaaaaacattaatctgtggcctttctttgccatttccaactctgccacctccatcgaacgacaaggtccccttcttcctttccattcccgtcagcttcatttccctaatctccgtacaaatccctagcctgactccctttcctttccatcctcaccagacgcccgcatgccggacctcaaaagcgcaaacgctaaaaaccggttgagttgacgcacggagagaaggggtgtgtgggtgggtgggtgtgtgttagtgtgcgtgcttgcttgtgtgtggaagaaaccaacagggttcacgctggtgcccatttctggaaatgccaatcgcgcccgactgcgggagccaggatcaggtccccagggcgcccttgcagacagcaccctgagcgaaggagctcagaaggcagtccggcttcacccagacccccaatcccacagaagcgccgtcccccagcggcacagcaccccctccccggcgcggtggtagggcccgacgtgacgtcacccattgtttacaaatcaacccgagccggcaggattccggctcccgcggctgcaggcgcgcggctagagtgcctggcgggctccggcttccgcgtccgccccggccccggtccagacttagtcttcagctccgcgcccgctccgccgcggcccaccgcgcccgccggcagccgagcccccagcgacgcccgcacagctccgggtgcccagacagggggccatgccgtgccggagggaggaggaagaggaagccggcgaggaggcggagggggaggaagaggaggaggacagcttcctcctactgcagcagtcagtggcgctgggcagctcgggcgaggtggaccggctggtggcccagatcggcgagacgctgcagctggacgcggcgcagcacagcccggcctcgccgtgcgggcccccgggggcgccgctgcgggccccggggcccctggctgcggcggtgccggcggacaaggccaggtccccggcggtgccgctgctgctgccgcccgcgttggcggagactgtgggcccggcgccccctggggtcctgcgctgcgccctgggggaccgcggccgcgtgcggggccgcgctgcgccctactgcgtggccgagctcgccacaggccccagcgcgctgtccccactgccccctcaggccgaccttgatgggcctccgggagctggcaagcagggcatcccgcagccgctgtcgggtccgtgccggcgaggatggctccggggcgccgccgcctcccgccgcctgcagcagcgacgcgggtcccaaccagaaacccgcacaggcgacgacgacccgcaccggcttctgcagcagctagtgctctctggaaacctcatcaaggaggccgtgcgaaggcttcattcgcgacggctgcagttacgtgcaaagcttccccaacgcccgctcctgggacctctgtcggccccggtgcatgaacccccttcgcctcgcagccctcgcgcggcctgcagtgaccctggcgcctccgggagggcgcagctcagaactggcgacggcgttcttgtgcctggcagctaacacgcccggggtggccacagcgccagc

SEQ ID NO: 5040 - DNA, 6000 bp, Homo sapiens
aagaagagtacaacgaattcctacaacccttcacttagatccatcaattttcctttttttttttttgagacagagtctctctttgtcacccaggctggagtgcagtggtgcaatctcggctcactgcaacctccatctcccgggttcaaggggttctcctgcctcagccttccatgtagctgggattagaggcacacaccaccatgcctggctaattttttgtatttttaatagagacaccatttcaccttgttggctaggctggtctggaactcttgacctcaagtgatctgcccaccttggcctcccaaagtactgggattataaatgtgagccaccacacccagtcagatccatcaattcttaacattttgccacgttcgctttagttgtctttctccctcccttcctccttccctctttctctctcactccacatagacaccttccttatttcctaaaccaattgagagttagctgcaggtatcataacatttcaccctaaatacttcagcatgtatcatctaagacattctctgattttcttattctcacagttatcacactcagaaaacttaacattgataaaatactgttatctaatacacagcccatattcagtttttccctgactgtttcactaatgtctttatttatttaattttatttttttaagagctgggcatggggcatggtggctcacgcctgtaatcccagcattttgggaagccgaggcgagtggatcacttgaggtcaggagttcaagaccagcctcgccatcatggtgaaaccctgtctctactaaaaatacagaaattaggctgggcgcggtggctcacgcctgtaatcccagcactttgggaggctgaggcgggtggatcatgaggtcaggagatagagatcatcctggctaacacagagaaaccccgtctctactaaatatacaaaaaattagccaggcgaggtggcaggtgcctgtagtcccagctacttgggaggctgaggcaggagaatggcgtgaacctgggaggcagagcttgcagtgagccgagatcgcaccactgtactccagcctgggcaacagagcgcgactcagtctcaaaaaagagagagagagacaaggtcttgccaggttgccaacctggtcttgaacttctgggctcaagagatcctcctgccttggcttcccacacctgtgtgtaagccactgcacctggccctattaatgccttttatagctgttttctctgctgtgtatcagtgtcagtgtatgtgtgttgttcctgtgtccaatcagggatcattcattgcatttagttgccatgcttcttcaatttcctttgaactaaaatcttccttctttcagacaaaacaatgctttccttagactctcaacttctacatcccaccactgtgctagcttttctctccttccctagatagccacgttttgtaaagaagagactcagcagtcttcatatcctcacctccctcttcaacaggctgcagtgtggcatctgcaccccctaaccccttcatgatcctcactcaccagactttcctgctacctctctggtcacttcttgggctactttgtaggctcctcttcctgtgctcgtcctataaatcttacagttctttaggaccctgtcctagtcctgttgctctttccactgtttatgctttccctgggtgatttcttttctttctttattttatttatttatttttttgagacagagtcttgctctgccacccaggctggagtgcagtggtgtgatctcggctcactgcaacctccaccttctgggttcaagcgattctcctgcatcagcctcctgagtaactaggactacaggtgagcaccaccccacccagctaattttgtatttttcatagagatggggtttcaccatgttggctaggctggtctcgaactcctgacctcaggtaatccacctgcctcagcctcccaaagtgctgggatttccagtgtgagtcaccatgcccagctccctggatgatttcattcttttcgggggaagaagcgggagtggagtttcatttaccacctacatgctggaatccctatttgtagcccaggtctttccctccaacttcagtttcaaatctccaatggcctcctcaacatctgaatccacttagaaatctcacaggcaccttgaagcaatatgtccaaaaagagaactgattatcctcctaccacttctactgtgctttctgtcaaaaaaaagaaaaaaatacatatatatggcatccctcattcattacctgagccagatacatagaagtcatctttgacacatccttttgacatcatccatgacacatctaatcaatcaccatactccactgattctatcttcttagtatctctggaatccatctacttctttctgttctcaccaccacattcaggctgccatcatctctcccaggaatatttcagcaacctcataatcctttccccaagcttccagctgtgctccattttaatctctcctccaccctggactctgagtgattttctgaaaatgcaaatctgaccattttttaaattgttcagctagtttctcacagctctcaggatacagtctaaatgactgaacttggcctataagctggagtgaaagtcaaggtattttatatctggtaaggtacaggccctgatgccagtttagaaagcatgtcagctgatttatctgaccagtttatgccggctaaataatggcttgcctatagagccccatactcttctgcagtctcatctagggccactcttcctctaaagtcccactgatcttgttttggttctcagaatcaatcaccaaaaatgcagttacctttgcctggaatactcttttccagtggctgcaccatcatcccaccttatcttttcatttatttatttatttattttttttgtaactccatcctgttactgccttagtcctctgaaaacctccagctagttttcatacgaatgcgtttgaagtcttctccattttgcacttgtgtagaatttttttaaaaattcaagaacaaaactttttattaactgaaagcctattatgtattaagtatcatgctgagttttgtggatataggggctaggacaaagtatcaacagagtaaaagtgtaagctccacgaggaaataactgggtctgtcttgttcattaatgaatccccattcctttttctttttgtttaattaattacttttatttttatttcaatagtttttggggtacaagtggtttttggttatatagatgaattatagtggtgaagtctgatattttagccacccaagtagtgatgaatccctatttcttgagatgatgtctgcacacggttatatgcttaccatttgttggatgactgagtgaataagatagtttaaaatggagattttttcctataagtcaaaaagtattttcctagttcatttattttataaattcagatattttgtacaaggctgtcacaatctaactcacttttttttttttttttttttagacagagtctcgttctgttgcccagcctggagtgcagtagcgtgatctcggctcactgcaacttccgcctcccgggttcaagcaattctcatgcctcagcctgccgagtagcttgaattacaggcgcgtgccaccaggcccgactaatttttgtatttttagtagagacgggggtttctccatgttggccaggctcgtctcgaactcctgacctcaggtgatccacccgccttagcctcccacagtgctgggattacaagcgtcagtcaccgcgcctggccctaaatcacttttgttgttgttgttgttgttatactgttctttttcattgctaagtaatattccactgtgctacatatggaatatgctacaatttgttcatacaaccacctgctgaggggcatttgggtgtgtgtcagttttttaggctgtataaccaattatcacaaacatagcagcttaaaacaacctaaatcacttttaaccaaaccctagagttttctcctcctaaggtagacccaatttccaaaataaacccatattgtaccttttcaggccaaagaaaatatttatatgctttatttgctggaggccattatattccaccgttgaaggacttttgttaagtacctgtttgacccttagtgcagggcttacatcccacagttagcaatagcaagttatgtgctttttgagctctaaacactgagaatttcttgaaccgagttctattcggccctgacttgctgtgggggagaaaagattcctcgggagaagtgtgggtggcgatggcttaggaggaccttgaaattccgcatttgtctgtgagctgctgccaggtgcccattggcccagctactctgggtcgcaaacctgcagatgccagatacatgaaatttggggacgttcagcttcctaaaaccacagttaggcaggtcctaggacccgtgattcttgccacagtttttcttagtatttgggctacaagtgaggcattggccgccatcttgatatcaaatgccaggcaagccgctactggcgtcgctcggtaaccacggagacacccgtgcccctcccgtttctcatccttagaggctgtaaactacaattcccatcagccgatttcctctgcgtaatggcaacttatctaaatctggcttgtgggcaaccgcaacgctgccgcagtgaactgtgggagttgcggttcacggcgtagcctcagtttttttcctgggggaagttccagaactacaaatcccgtgagccagtgggctttcgcctgcgcacggagaagccgattctccttggcccctcagcctgcgcctgagaggtaagagagggcggggggaaggaagaggaggcgggatccgggcgctgcgttggctgcggcctggcaccaaaggggcggccccggcggagagcggacccagtggcctcggcgattatggacccggccgaggcggtgctgcaagagaaggcactcaagtttatggtgaggagacggtggaggccggggaacggtggaggcgctggcgttggcggcgtcgctggcctgggccgcccgcccactgcgggaccgggcagcgggaccctgggccgaggctggcggcggagcggctggagggatgggatgggagctccagaaaggaggctgggggttgcggagcggacccaggggtgggggcagcggctccgccatcttgtggatgagaggccaagtgacagcgggagcttaatcgaggagggggctccaggcggcgcgcggggccctggagggaaaggggcgtggggactgttactgaaaagcggaggaagctctctggagaaacgccgtgaggccgctggcggggccttcctggtgtcagggttaccggtaaggcccgggagaggaggtgcattcacgactggggaagggagcgcgggatagagtgaagacagatacggtgggtagaggggaacgggcagggctggatgcagatggatttaagggtggaggagggaacgctagggctggtgagaggcttatagttttgtagaatgaggagggaggatagcctttgccttgagggtggaatcccagcttggccaaactactgttgacaaactctggaagggaagaggcctcactaaagaagataaggactgggaatgaggacctagggctataatgacagtccctgggaggggaaaagggtgttgactgtaagctagaattacaaatgtcagggaggggtacataacgctactttgaaaggagaagctaaatactgtaataaggacaaggtgatgaaaagtaagagcagattgtcagggaaacatgggtacaggagattggggcaaaatgagtatctaatagggtaagcaaaacaaaatttaaaggtaaattgtgggacggtaaaatgtggaggccaggtgctttgtatcattttctgggaaaggaaaggccgtggagatga

SEQ ID NO: 5041 - DNA, 6000 bp, Homo sapiens
gaatctgcttccaagctcactgtcatggttgttggccagcctcagttcttcactggtttttggtcagaagctgctgctgctttttttttttttgagacagagtcttgctctgtcatgaggttggaatgcagtggtgcgatctcagctcactgcaacctccgactccctggttcaagcgattctgctgcctcagcctcccgagtatctgggattacaggcacgtgccaccacgcccagctaatttttgtatttttagtagagacggggtttcaccatgttggccagaatggtctccatctcctgacctcccacatttgatctgcccacctcagcctcccaaagtgctgggattacaggcatgagccaccgcaccccgcccctctaaaagcttccatttttttgccatgtgggcctctccatagtactgcttataacatggcactttgatttccccagagcaagagatccaaaagagggagaaagagagagcaagagagacagagagagacagaaaataggagcccctaagcccacagctgcagtctttttttttttttctttttttttttaagagtcttgctgtgtcgcccaggctggagtgcagtggtgcaatctcggctcactgcaagctctgcctcctgggttcacctgccattctcctgcctcagcctcctgagtagctggcactacaggcacccaccaccatgccgggctaattttttgtatttttggtagagacggggtttcaccatgttagccaggatggtctcgatctcctgacctcgtgatccgcccgcctcggcctcccaaagtgctgggattacaggcctgagccaccatgcccggccagcggcagtcttttttttttttttttttttttttgagacggagtctcgctctgtcacccaggctggagtgcagtggcgcgatctcggctcactgcaagctccgcctcccgggttcacgccattctcctgcctcagcctcccgcgtagctgggactacaggcgcccgccaccacgcccggctaatttttttgtgttttttagtagagacggggtttcactgtgttagccaggatggtctcgatctcctgacctcgtgatccgcccgcctcggcctcccaaagtgctgggattacaggtgtgcaccaccatgcctgacctccacagaaaattataagtcagttattataatcagatgagtctttggcgagcatggagtcagaaaaggacaaacgattggaggttcccagtttttggtggcctatggctctaaggttttccttcatggtcattaggaatgcacttaaggactagtagtcacaacacccctgttcaggtggcactgaagacccagagatatattaccttttttgagtagattttatggagacaccagacttagatgaatagattgtttcttcagatgctgaataaagcaaaaaagtggcaaaacgttccgctttcttttatattagtcttcctctcaaagccttatcaccataaaccagtagcattttatttttttttaatttttatttacttatttattttgagatggagtctcgccccgtcgcccaggctggagtgcagcagcgtgatcttggctcactgcaacctctgcctcccgggttcaagcgattctccctgcctcagcctcctgagtagctgggattacaggtaggcgccaccacgcttggctaatttttgtatttttagtagagacagggttttgccatgttggccaggctggtcttgaattcctgacctcggtgatccgcctgcctcggcctcccaaagtgttgtaattacaggcgtgagccactgtgcccagccttagagcatcttttagagtatgcatcttccacacaggaaaaactatgccatctgtattaatcttgctggctgctcataggcaactttatttcaaactttattgttgctcctcatatgactattttatacagaaaactgtgaacaagactcagtttccaaattagtggcttttaaagcctttttgagaagacaaagttaattcacctgaaacaactaattaagaaacaattaggctgggcgctgtggctcatgcctgtaatcccagcactttgggaggccaagatgggcagatcacgagatcaggaaatcgagaccatcctggttaacatggtgaaaccccatctctactaaatatacaaaaaaattagccaggcgtggtggcaggtgcctgtagtcccagctgctggggaggctgaggcaggaaaatggcatgaacccgggaggcagagcttgcagtgagccgagatcgcgccactgcactccagcctgggtgacagagcaagaatccttctcaaaaaaaaaaaaaaaaaaaaaaaaaacaactaaacagggctgggcgcagtggctcacgcccgtaatcccagaactttgggaggctgaggcaggcagatcacctgaggtcaggagtttgagaccagccagaccaacatggagaaaccccctctctactaaaaatacaaaattagctgggcgtggtggcacatgcctgtaaccccagctactcaggaggctgaggcacaagaatcacttgaacctgggaggcggaggttgcggtgagccgagattgcgccattgcactccagcctgggtgacaagagtgaaactccatctcacacacaaaaaacaaaacaaaagaaacaactaaacagccaggcacactggctgacacctgtaatcccaacacattgggaggccaaggcaggaggatcttctgaggctaagagttggagaacagcctgggcaagatgtgagaccccccaagaacccccaaaaaattagctgggcatggccaggcgtggtggctcacccctgtaatcccagcactttgggaggccgaggcaggcaaatcacgaggtcaagagatcgagaccgtcctggccaacatggtgaaaccctgtctctactaaaaatacaaaaacaaattagctgggtgtggtggtgggcacctgtagtcccacctactcgggaggctgaggcaggagaatcacttgaacctgggaggtggaggttgcagtgagccaagatcgcgccactgcactccagcctggtgacagagtgacactccatctcaaaaaaaaaaaaaaaaaaattagctgggcatggcagtgtgtacctgtagtacccagctactctggaggctgaggcagatggatcctttgagcttgagagatcacagtgagctatgctatgatctgccacggcactcttgctcaccgcactccacactgcagccctgggtgacagagtaaaaccctattgtctaacaaaaaaaaaaaaaagaaagaacatctaagaaaaggtccagaaaaggtcctctcttttcatgaacatgtgtggggatgtatagtgatgcaatatttctaaagggcaattttctactgtatttcaaatacatgcattgtttaactcggcacttgaatttcatggaaactattccacagaaagattgcacaaaagtgcaaaggtacatgtacatgacatatgcaagggtgttcatcataataatatgtaatagtgagaaactgtaaacaacttaaatattatttatttttgagaagaagtctcactctgtcacccaagttggagtgctgtggcatgatcttggctcactacaacctccacctcctgggttcaagcaatcctcctgcctcggcctcccgagtagctgggaccacagatgtgtgccaccatgtccagctaatttttaaatttttggtagaggtggggttttgccatgttgtccaggctggtctcaaactccttagttcaagtgattcacccacttcagcctcccaaagtgctgggactacaagtgtgagtcaccgagccacggccagaaacaacttcaatataatttaaataacaatacattcataaaatagaactggtgctaaaggctcagtaaatatttagctagtgagtggattaacatattgttacataaaaaaagcaaatcaccaatttgtgcccctatatatttttccattcatagaaaaaagcgtcaatgaatacacactaaaagtaacaaggggtttaaatctgggcagtagaactataatttgcaggcctactactttttttcctctaaacagtcttgtactttttgaaataatttttgtgctttgtaaaaagttatttaaaaatagcaaatatgaagtagcttttaagtggcaaatgaatgaagagtagagacagtgatggaccgtagaaacgcagagcgggatccctcttggctaggacaaccaaagcctttcctagattaaataaggcatgaaatgttttgaggttcaagtattccaggtcgacatataggcaggagaacacctgttgtctttagggaacagcaaggagacctgaaacagcaagaaacaaatttgatagagaaggcaacgtaagtttctgagtagtagcagagagggcggagaacgcgacattttccgattaagtttgcagtactgccgcaatatgggattaggtgaggattagcgcttggagcgcaagtgcccactagggggtggtgtttcaaaacatatacaggcccacttggccccacttggactaaggtgaaaggaacgtacagcaggtagaacgtcaaagaggacgttccaacagttggacaagttaacgacaataaaatacgcaaatgttaactttccccctaactgctgagcgctccctaaatcggtatcccagtgtaacgcaaaactaagccctacaggatgcctgcagctagtgccaaacggtccccacttaaagggactactactcccaggaaccttcgcgcgaggccagggccttcttccagggtgcaagtgggtctcgccgcacggctctctgggattcgtagtcttgcagtgtcattcgggagttgtagttcctttcccacaatcggctgggcgaggcggcgccagcgatcagagcagcgctgggtgttcaggggccaagatggcggcgcgccggggacggagagacggagtcgcgccgcccccgagtgggggccccggtccggaccctggcgggggagcccgcggcagtggttggggaagtcgaagccaagcgccgtatgggactttgggcgctgtgagcggcggcgagcaggtgagaggttggctggcggcccgcgacaggcagcaaagcggtgtgtgccgggcggtgacacgtggacgccacaggaaagagaggaagcgcctgagagtcgatgccgggtggccgcgggagccgggccggagcaagtgggccctaggccgtttgctgggggtaggcgggcagaggcagcgtctctacggccattcctgggggacgccggagggggagagcggggtgtcggaaacataacccgcggctgggggtcaggggttcggacttggggtcgaaggctgagacctccatgtaaggatgcccagtgaggctccccgagcccggcgccgcagttcccttttcggagccacgtggggttgggggagcaattttcccgggagaacttgtctgcctcccctccccctctaggcggcccgggcatccacgtgggtcgggctcctggtggaggggggcgcaggcagcgggtccacgtgggggcggggaaggaacgtccacgtggctcccgtcccaggctgtcgggcatctagtatcggccttggagcctggctgacgcgaactgggtgtgtctccacgggtcccgccatctcctgccggggctggaggcccgggccgggaaggaaggtaagggctgctagagtcaactttgttcagagccttggaggttttttttttccctgctgcttgggtccgcaacgtctctccactgcggatggtgaaggactctccagatgttgcgggagtttgttccctgcggatggctgagtgtgatggggagggtagagggctgaggctgaagggttgtggaggagtgagtttgtggcgcttccgtctgaccggcttgggg

SEQ ID NO: 5042 - DNA, 6000 bp, Homo sapiens; identical to SEQ ID NO: 1605

SEQ ID NO: 5043 - DNA, 6000 bp, Homo sapiens
gcctacaactcagcctccacttactcatttgtctggtacctttattcatggcacaaattacataaacagattggtagccctggatgggccgaggaatggtcttgtaagtagctgggcagaggcaacatcactgggcatgggtttgtactcagagatcttctgcaggggaattcctgagaaaacacaagattgtctcacagaagaaatggccagctcaaaatatctgctgagcccagggggcccattgctgaaggactccagctgtagaggtgtcagacacccactgagtctggagggcctgggtgtgaagctgggtgagaaaggagaaattgatggtacccatttctcaggctgaaggtgaagagagcctaacaattagataagtcagagggaatcttaaactgaaatgggaatattctgggtgttcaaagttataaaccagcccaagatttcatctgcacgggcccaggggaaaaaagcatctgggcattgagttcaaatggcattggaaagaaatttgcactctgttaggtccagctaatgagatgcagttcaatgaagacatctgtattcttgctgtaaagcacagggcttggcgcagaccaaggaatgactcataaggattaaaaggcatgaaaccaggttctttcttagaatttggcagtctttgcacttcactttctgccacatcattattttacagttagtacgtagagctggaagtggagggcaggacatttatgttcaagggtttgtggcaggctctcctgccagctgagcagctctctcctgtcgaagtctatggattctctctccttgtggtgtgtgcacgcagagccatgggctggctgaagctgcaaatggatgagcagccaacaaattgatcaatctattaatatttattgggcatctgccgtgtgtcaggctcagggaccaggcagccggggattcacaacaagataaatgtatgtccttgtgctctttaaatagttttctacctccactgggatttttactggcattgaaatctccacagtttatttttatagagtcttttatgtgaagtgtctcaaagcagggcagagagaaacacacagagaggcccccacggcttcttccaagctcatggtcctcatcaactcacacttaacagggctgggtgtgaagcataccattcccaaatgaaccaggctgcaaagcacaggcctgaagcaggcggtcctgtgaagggtaatgtcaatgaagtgattatttttttctgtcagtattgttcttaattatcttctgttcctgggctccaagcctgaattagaaaactctgaactcgagcataggccttgggatctctcctgaggtcctgagttccagctatccactggggtcctcctgactgtatctggggacccatggcttggaggagggtatgtttggcagtaagttcttatacttgtaaggagtagatgagccctacctcagcagagagcagacattggcacggccctcaaggtccatctcagagggcgtctgggtatccggatcaaggccaaggactgcaaagacaaaaattccaaacccagcattacctccctgtgctggccaattctgctcctccagctgagccttcccagtgtgatgatttgaatgtttgtcccctcccacactcatgtattaatattcaaagaaatttggttgctgctgtggcagtgttaggaggtgggaccttcgggaggtgaaaggaccatgaggactctgtccttctgggtgagattaatgctattagaagagggtgagtttgccttcctttttcctatttgctctctgccttctgccacatgaggacacaatgttcctctcctctggaggatgcagcaagaagactcacaccagatgctggcacctgatcttggacttcccattctccagaactgtgagaaaaaaatgttttgttctttacaaattatccaggctcaggaattctgttatagcagcacaaaacagactaagacacccagggattagcattgagcctcggaccatgcaggaaataaggaggcggtgtctgggggctgtggtgcagcaggcaggggacaaccaagcgacttcccagccctgttggaaagtggatctggagggatggactaaaagaggcagaactgaggcctgggctggaggacctgagagtgaaactgggcctgcactggggagtgaggaggacctgaagctgcaatgggaagccctgtgtggctgaatcctagaaccatgaggagaggcaacattagcaactagatctctggcctctgcttttggaatcacttttggattcacttttggatgagtggtgcatgaactcatccagactgatgtgtgaagggcatccaggcttacccctaaagtatggagactgcagtgggtctgttgctcacagaggaactcccagaaactctgggagagtcacagacctagagaagcgtatggctcaaacctcttgagcaagaaaagcagtgttcactgccaggcgtggtgatgaatgcttctgttttttgtgtcattaaacacttgcaactgtgtctccttttttaaaaaaaggaaaactgagacacaagttgggaagtaacctgccaaaggtcaccaactattcagtagcaaagcagggacttaaggccaggcttgcaaagctcctagtgctactggtaattggtaagactcaagggtttaaagaggcctccaaagaagggtagtaaactgtgatgggccctaaactttatagttcttcgaatttttcacaggtaaaaggacagaaagccaagaagagccttctgggtcactggcttctgggaatattgtgtggtcaagcaggaagtctgggggagatggaatgacacctcagggtccactcttaccaactgttcatttagcctccatgcaaggatttcctggtgatgtgaatgggggttattccctctgtgtgtcttggagcagccatgctgctcatgtttgtgaaatgatgaccagtgcagaatcttgatgttaggcactatgaagaaacattagacatggggtccatctttaaaggggaatcttaccctggtgatatagtttggatatttgtcccatctaaatctaatgttgggctgggtgcgttggctcatgcctgtaatcccagcactttgggaggctgaggcgggcggatcacctgaggtcaggtgttcaagaccagcctggccaacacagtgaaacctcgtctctactaaaaatacaaaaattagccaggcatggtggcatgctcctgtagtcccagctactggggaggctgaggcaggagaatcacttgaactggggaggtggagattacagtgagctgagatcacgccactgcactccagcctgggcgacagagcgagactccatctcaaaataaataaataaataaataaaatctagtgttgaaatttgatccccaatgttggaggtggggcctggtgggaagtgtctgggtcatgtgggtagatcctttatgaatgacttggtgctagtctcatggaactgagtgagttcttagtctttgttttcatgagaactggtcatggaaaagagcctggcacctcccacctctctctcttcctctgtcttgcacacattggctctcctttgtcttctgccatgagtggaagcttcctgaggccctcatcaaaagcgggtggtggtgccatgtttcttttacagcctgtgaaactgtgaaactaacaaacctcttttctttataaattacccagcctcaggtattgctttatagcaacacaaacaaactaagacatatggcaatggcgtgggttgcttgcagggtaccttggctgctacagaaagaaaaagtctctgtagagactcactgtcagtgactcacggagcagaaagctggcctcagagcctggacagagggtagctgtcactgcttaactgcagttcagctcaagcatatggctctctgtgggaccagcactgaaggctgggggataagtgaggcaggtcttgtcacaccttcagggtatctggattcaccaaagtggctcaggtcaggaccaatgaatagaggtttgttcgtcaagataaaaagattctggcttcctgttttcaggcaatgccaacgattgaattccctctacattgaccacccttgctgaagttgtcttaattgacctagcagccaactgacctcatattctggcacaggctctgactccttttgcctatctgccctgctctgatactacaaagagacccccccaccccagccctctggggcctcattaggggcttagagggcaggcgtgggtcaggcgagcattcctggagaacacagtcctcagtggttcaggatatgagcatagctcagagagctgttaacattatcagcctggcctgggagagggggacgcgcacagggtggtgcacagggcccgcagggaatttacagcggcgtccgcggcgatgggctctcagtgccttggaagaccggtagaggcaggttctgtctctcccggcctggcaagcagagggccgcggcgcagggcagagtgccgcggcgcagggcaaagctccagtgcgcaggctcgcgggcgcaggtgggattggatagcgacgaaggccggcaggctaggcgtggacccaactggcgaggctgctggggttgcagcgggacagttggggcggccccgcaggcccaggtgaggaaaggtggctgggggccaggtgggcagggggcgtgcgggaggccgctgcgccgggctgtgggagggcgggcgtgaagaaggaagatgccgttgacgtgcaggggtcacaaggcgtgggttgtggccctggcccgggagactgcccgggtgggcctgagctgtgaagtagtgtcgctgcagccagagggcaggacgtgattctggccgtgtgatgccagctgcactgtgacgcgtgttggggcgcctatgcgagacgggaccgggacaggaaccctgtggctctgtggtaggggaatgccaccaactccctgaggagcagccgtgtggtatgattggtaagaagccatcatcaggcgctgagacagcccagaacttcccaatgactcaagggcgggtggaggtcgagggacctagaaagaaagaacatgaattcatcaatccattcagcagctattttgaacgcctcctgtgtgccagatgctgttctagaagctcagaatatctatgaacgcgataggcaatgcccccatatgccaaggccctcatatgctagccttgactcaaggaaaactgtaggatggggtaggtttcatttttggaagttgtggaatcagtacttatgttttgaatgtgttaggtttgagatgcccagtaggtttttcccaatagaagacataagcatagctgggaagaattttgcagaggactctgaccacctaccacctacaggtgccatgaatatttagcacatttgatttttcacattacctattcaccttctctccatttatcagtcacctggtagttttttttagtatggtgaaatatacacacataaattatctagtagatatttgggttgagatatcaaatgtgctttttagaaatttaaatctgaagttctggaggatgtcgggctagagttaacctttggaatcggcatcatatactgtacatagtatttaaaatatatgggactggtgaagacatctagtttaatagtgtacacaaagaagaggaggcgaagccaaaaaagggagggaggtagtggtcaaccatgttgaatgttaccgtataagatgcctttggtaattaggaggattttaatcattttgacaagaacaactttaatggggaagaggggccttaaggttgggtagagtttttttcaagatagaagaaagcagaatgtttatatggcaatgtgattaaactcgtagaaaggaaaaactgctgcagatgaaagaggggaacattgtaaagggtagttgtt

SEQ ID NO: 5044 - DNA, 6000 bp, Homo sapiens
gcctacaactcagcctccacttactcatttgtctggtacctttattcatggcacaaattacataaacagattggtagccctggatgggccgaggaatggtcttgtaagtagctgggcagaggcaacatcactgggcatgggtttgtactcagagatcttctgcaggggaattcctgagaaaacacaagattgtctcacagaagaaatggccagctcaaaatatctgctgagcccagggggcccattgctgaaggactccagctgtagaggtgtcagacacccactgagtctggagggcctgggtgtgaagctgggtgagaaaggagaaattgatggtacccatttctcaggctgaaggtgaagagagcctaacaattagataagtcagagggaatcttaaactgaaatgggaatattctgggtgttcaaagttataaaccagcccaagatttcatctgcacgggcccaggggaaaaaagcatctgggcattgagttcaaatggcattggaaagaaatttgcactctgttaggtccagctaatgagatgcagttcaatgaagacatctgtattcttgctgtaaagcacagggcttggcgcagaccaaggaatgactcataaggattaaaaggcatgaaaccaggttctttcttagaatttggcagtctttgcacttcactttctgccacatcattattttacagttagtacgtagagctggaagtggagggcaggacatttatgttcaagggtttgtggcaggctctcctgccagctgagcagctctctcctgtcgaagtctatggattctctctccttgtggtgtgtgcacgcagagccatgggctggctgaagctgcaaatggatgagcagccaacaaattgatcaatctattaatatttattgggcatctgccgtgtgtcaggctcagggaccaggcagccggggattcacaacaagataaatgtatgtccttgtgctctttaaatagttttctacctccactgggatttttactggcattgaaatctccacagtttatttttatagagtcttttatgtgaagtgtctcaaagcagggcagagagaaacacacagagaggcccccacggcttcttccaagctcatggtcctcatcaactcacacttaacagggctgggtgtgaagcataccattcccaaatgaaccaggctgcaaagcacaggcctgaagcaggcggtcctgtgaagggtaatgtcaatgaagtgattatttttttctgtcagtattgttcttagttatcttctgttcctgggctccaagcctgaattagaaaactctgaactcgagcataggccttgggatctctcctgaggtcctgagttccagctatccactggggtcctcctgactgtatctggggacccatggcttggaggagggtatgtttggcagtaagttcttatacttgtaaggagtagatgagccctacctcagcagagagcagacattggcacggccctcaaggtccatctcagagggcgtctgggtatccggatcaaggccaaggactgcaaagacaaaaattccaaacccagcattacctccctgtgctggccaattctgctcctccagctgagccttcccagtgtgatgatttgaatgtttgtcccctcccacactcatgtattaatattcaaagaaatttggttgctgctgtggcagtgttaggaggtgggaccttcgggaggtgaaaggaccatgaggactctgtccttctgggtgagattaatgctattagaagagggtgagtttgccttcctttttcctatttgctctctgccttctgccacatgaggacacaatgttcctctcctctggaggatgcagcaagaagactcacaccagatgctggcacctgatcttggacttcccattctccagaactgtgagaaaaaaatgttttgttctttacaaattatccaggctcaggaattctgttatagcagcacaaaacagactaagacacccagggattagcattgagcctcggaccatgcaggaaataaggaggcggtgtctgggggctgtggtgcagcaggcaggggacaaccaagcgacttcccagccctgttggaaagtggatctggagggatggactaaaagaggcagaactgaggcctgggctggaggacctgagagtgaaactgggcctgcactggggagtgaggaggacctgaagctgcaatgggaagccctgtgtggctgaatcctagaaccatgaggagaggcaacattagcaactagatctctggcctctgcttttggaatcacttttggattcacttttggatgagtggtgcatgaactcatccagactgatgtgtgaagggcatccaggcttacccctgaagtatggagactgcagtgggtctgttgctcacagaggaactcccagaaactctgggagagtcacagacctagagaagcgtatggctcaaacctcttgagcaagaaaagcagtgttcactgccaggcgtggtgatgaatgcttctgttttttgtctcattaaacacttgcaactgtgtctccttttttaaaaaaaggaaaactgagacacaagttgggaagtaacctgccaaaggtcaccaactattcagtagcaaagcagggacttaaggccaggcttgcaaagctcctagtgctactggtaattggtaagactcaagggtttaaagaggcctccaaagaagggtagtaaactgtgatgggccctaaactttatagttcttcgaatttttcacaggtaaaaggacagaaagccaagaagagccttctgggtcactggcttctgggaatattgtgtggtcaagcaggaagtctgggggagatggaatgacacctcagggtccactcttaccaactgttcatttagcctccatgcaaggatttcctggtgatgtgaatgggggttattccctctgtgtgtcttggagcagccatgctgctcatgtttgtgaaatgatgaccagtgcagaatcttgatgttaggcactatgaagaaacattagacatggggtccatctttaaaggggaatcttaccctggtgatatagtttggatatttgtcccatctaaatctaatgttgggctgggtgcgttggctcatgcctgtaatcccagcactttgggaggctgaggcgggcggatcacctgaggtcaggtgttcaagaccagcctggccaacacagtgaaacctcgtctctactaaaaatacaaaaattagccaggcatggtggcatgctcctgtagtcccagctactggggaggctgaggcaggagaatcacttgaactggggaggtggagattacagtgagctgagatcacgccactgcactccagcctgggcgacagagcgagactccatctcaaaataaataaataaataaataaaatctagtgttgaaatttgatccccaatgttggaggtggggcctggtgggaagtgtctgggtcatgtgggtagatcctttatgaatgacttggtgctagtctcatggaactgagtgagttcttagtctttgttttcatgagaactggtcatggaaaagagcctggcacctcccacctctctctcttcctctgtcttgcacacattggctctcctttgtcttctgccatgagtggaagcttcctgaggccctcatcaaaagcgggtggtggtgccatgtttcttttacagcctgtgaaactgtgaaactaacaaacctcttttctttataaattacccagcctcaggtattgctttatagcaacacaaacaaactaagacatatggcaatggcgtgggttgcttgcagggtaccttggctgctacagaaagaaaaagtctctgtagagactcactgtcagtgactcacggagcagaaggctggcctcagagcctggacagagggtagctgtcactgcttaactgcagttcagctcaagcatatggctctctgtgggaccagcactgaaggctgggggataagtgaggcaggtcttgtcacaccttcagggtatctggattcaccaaagtggctcaggtcaggaccaatgaatagaggtttgttcgtcaagataaaaagattctggcttcctgttttcaggcaatgccaacgattgaattccctctacattgaccacccttgctgaagttgtcttaattgacctagcagccaactgacctcatattctggcacaggctctgactccttttgcctatctgccctgctctgatactacaaagagacccccccaccccagccctctggggcctcattaggggcttagagggcaggcgtgggtcaggcgagcattcctggagaacacagtcctcagtggttcaggatatgagcatagctcagagagctgttgacattatcagcctggcctgggagagggggacccgcacagggtggtgcacagggcccgcagggaatttacagcggcgtccgcggcgatgggctctcagtgccttggaagaccggtagaggcaggttctgtctctcccggcctggcaagcagagggccgcggcgcagggcagagtgccgcggcgcagggcaaagctccagtgcgcaggctcgcgggcgcaggtgggattggatagcgacgaaggccggcaggctaggcgtggacccaactggcgaggctgctggggttgcagcgggacagttggggcggccccgcaggcccaggtgaggaaaggtggctgggggccaggtgggcagggggcgtgcgggaggccgctgcgccgggctgtgggagggcgggcgtgaagaaggaagatgccgttgacgtgcaggggtcacaaggcgtgggttgtggccctggcccgggagactgcccgggtgggcctgagctgtgaagtagtgtcgctgcagccagagggcaggacgtgattctggccgtgtgatgccagctgcactgtgacgcgtgttggggcgcctatgcgagacgggaccgggacaggaaccctgtggctctgtggtaggggaatgccaccaactccctgaggagcagccgtgtggtatgattggtaagaagccatcatcaggcgctgagacagcccagaacttcccaatgactcaagggcgggtggaggtcgagggacctagaaagaaagaacatgaattcatcaatccattcagcagctattttgaacgcctcctgtgtgccagatgctgttctagaagctcagaatatctatgaacgcgataggcaatgcccccatatgccaaggccctcatatgctagccttgactcaaggaaaactgtaggatggggtaggtttcatttttggaagttgtggaatcagtacttatgttttgaatgtgttaggtttgagatgcccagtaggtttttcccaatagaagacataagcatagctgggaagaattttgcagaggactctgaccacctaccacctacaggtgccatgaatatttagcacatttgatttttcacattacctattcaccttctctccatttatcagtcacctggtagttttttttagtatggtgaaatatacacacataaattatctagtagatatttgggttgagatatcaaatgtgctttttagaaatttaaatctgaagttctggaggatgtcgggctagagttaacctttggaatcggcatcatatactgtacatagtatttaaaatatatgggactggtgaagacatctagtttaatagtgtacacaaagaagaggaggcgaagccaaaaaagggagggaggtagtggtcaaccatgttgaatgttaccgtataagatgactttggtaattaggaggattttaatcattttgacaagaacaactttaatggggaagaggggccttaaggttgggtagagtttttttcaagatagaagaaagcagaatgtttatatggcaatgtgattaaactcgtagaaaggaaaaactgctgcagatgaaagaggggaacattgtaaagggtagttgtt

SEQ ID NO: 5045 - DNA, 6000 bp, Homo sapiens
ctacttgcaccatcctgccctgatgcacttgggttgagagagggttgcgtgtgtgtgtgtgtgtgtagagaatatgtgtggtatgtgtactgggagaggtgtcccagacctctgccagctgtggcctaattgggagaaagaggccagtggggcacctcccttctgatctggagcttcttggcctaaccttaagctactgatcagtcccatcacttcagggcaaggtgtaccagggccatggttgctaacactagctgtaccaggtcgctcaccttcaggtctgcctgcccttggccctgagtcatggacaggagtgttatgttgtcttttctcttataaaatgtaaataatggctgggcacggtggctcacgcctataatcccagcactttgggaggccaaggtgggtggatcacaaggtcaggagatcaagaccatcctggctaacacggcgaaaccccatctctactaaaaatacaaaaaattagccaggcgtggtggcatgcgcctatattcccagctacttgggaggctgaggcagaagaattgcttgaacctgggagacggaagttgcagtgagccgagattgcgccactgcactccagcctaggcgacagagcgagactctgtctcaaaaaaaaaaaaaaaagtaaataatgtgtttttccctttaaaaaacagcacatgctcattaaataatatttggaaaatgaagaaaatttaaaagaagaaagaattgcttatcattctactgcccagacacaatcacttttaacattttagttttcttccactctttccttttctctgcataggctcttttttttagtagttgtaacagtgctgtttgtaccctgcttttttctcttataatagtatatcataagtctcttgcttgtattatttgggaacatcatttaaaaggactgtataatattccattaagtagatggaccatcatttatttaacatgctttggtctttaccccttgaaggcaaggcatatcctcctttccctattaacccattatggttcagtcatccgtgaagttggctaagcttttgaatttaaattttctgtctgcactgtctctttgaggtaatggtatgccagttgctgtgtgaaatgaaacttctttttatttgctttaaactttattaattcaagctttagctaggcatcttgttcttattcggctttagtttgataaaaaaaaaaagttgtgtttatcttcccctgcctggtcttgcagctttggtcctagggcctcccttccttctttcgaaacagatgccactgtggatggtaggttccacaagcatggccctgtccactcatcacagatgtgactcgagcagcttctggagctgcgctctagagggcattcaggtggatgtttccccacctgcaaggtgggatgtttgctggacagataacaagatttgcctgtttttttccccttcccatcacatctatttccttatccctttggtgacccagggtgccctgttggctggatcttaggaactggttgtctcacactttcacctgccccctgcctgtgtctttccccttcctgacttctgttgacctcctgttcccactctactggtctctccctcacagtgctgtcactgcagctatgctcctggcttcccctcaccgagtgagtttttgtgaccttcgcactgtattcatgctttgggacttactgctgtaatgatgtcagtggcggaggttagcagatggcggcagcagcaatgagacctgacatgttctaatgactccctccttcctacccttgctggctgagccaatggagggacagaggtttccttgaggtatttaaggagggggccaagggaaatcggggggcccccaggtgccaatgaggcctgtgacctttgctgctataatatcagtgtttcacaagcagggcggttcgggagcccacttgcagcccatcaaaaattgatttaattgcaatttttcctccaattaggagcactggagcctgactaattggagtaatagagagtaataaggctcagataaaaagccttcctcggctgcctttgtatctcgtgtcagtgcctgtcagaggtcagagagcttgcatattctattaggcagcctggccttcatttgtacaaattagtttacccaacagtaattaaaatgccaatgcgggttgaagagaactgaatacacttgatgggcatgttggtgaatgatgtgacagctctggtggcctcccttgccaaagtgtgtcagcccaggctcagaggctgctggggcctgggccagctgggcggctctaggccagccacggggcacagctgctgagcacgccacttgtgctgccctgcctcagagccactcagttgcttctttcttcttccaggtggagtcatttgttcatttgtccattcattcattcattcaatcaataagcatttgagttttcaatatgtgtcaggcattatactagatgctggagattcaaacaagactaactcttgaagtgtagcccacatgagaacttctgggcgaggggtggtataataacttgggtctggaatcaagactgactgggttccaattccagtccactagttgctacctgtgtgagctagagcaaattaattacctcccaaagcctcagtctcctcatgtgtaaaatagggaaagtggggctgggtgcggtggctcatgcgtctaatcccagaactttgcgaggccaaggtaggtggatcacttgaggtcaggagttcgagaccagcctggccaacctggggaaaccctctctctactaaaaatacaaaaattagccaggcgtggtggtgcgcacctgttaactcagctactgggggtgctgaggcaggagaatggcatgaacctgggagatagaggttgcatgagctgagattgcaccactgcactccagcctgggcgacagagcaagactctgtctcaaaaaaaaaaagggaaagtggtacctactgcatagtgttatgaggattacataggataatgcttttgaaacatgtgctcagcacctggcacatagtaagtgctcagtaaattactagtgttattaagagggcctaagctaatgcagaagcaggaggaatctacctgcctttcaggctgtccgtgcccaactaatttcccttcttaccttgctttcctcttttctatgtcttgttatttttaatctctcaacttgaatacacaaactctaactccctggcatcttcctctggtgagacaggcccctatgtctacttctggagcctgatgatagtctgcatgatgccaggtttgcctgagctagggccaggggacgagtaaggcaggttgaagatctggttaatgtctgggacagggtgagaaattatagaaggctggcttctggtaagggctttctgttccaaaaagagcttatggagtcaaaatgacttttagaccctctagctaagaggggatatgtgtacttgcatgagtgtgcctgactgtgtgtgttttgatgttaatttttaggtgttggtacctctcatctcttacctggttgtggtgcttatgagggacttctcactctcctgatactgtatgcctgtgtcatgtgtcattcaagtttgagcctttggtatttgggaattattcctttaggaagcagagggaccaacttcacagtgcacatgactagctttcccagctgtgtaggctttgggctctggaaggccctcttagttcagttccacaaatttttattgagtgccttctctgggccaggcactgtgctagacagtacagtacccaagagcctctaaaggattctgatctcaaaggggagatgggaagataaaccaaaaatgccatttgtcccatgagtatggaaaggactagaaggatggtcagcctacctggggagccaccagctcttgcctctgtctgttcagcacagatttgatgtccttgtccctggaatacccctgagggaagagatgggactgagggcaaaagccgtttgaattttctttcttttctgagccgagctgggtttttcatcactttcaaacccaaaattgaagttatagcaaaggcctttagtggggaaaagtcactgagcaatcccttgggaggagccacggagggaatgatacacgttttcatttcattgatctccaagtatttattgagagcctttgacacgcctagcacaggagccagcaccgtgagggatgtgacgagaatctggttgaagacatctcgcggattcaaatcgaacaggttatcagagcacagcattttgtttgggttaaatcacctgggttagagaactgaggccagtgagactgcctgtgatgcacagatcccaccccaccagccccttttcaaagcactttatcccgtgagtctcaagggaggagtctgagtgtgggggtaacaggtcctgtgtgcagccacagtattttaagtccattcatggaagcttggcctttgcttcatattcactttctgcacaatgggaataataatatctatcttgtgggctcattgtgagatgtgaagcaccctttgggtgctggagagtagtgaattccttttcttcctctgctccttgtatctgttgtaccctgagattgcatgtgcgcacgccctttctaatcttctgactttgagtgtggctggtctgtagcttttgctcattcttcctaatgaccatgggaataagggagtggggtggggggcaagaatggctgcaggtagtggggagtagttgaaggtgtgcaaaactgtgtctgcacccagcctgacccccaagagtcctgggcaggccccatggtttgggtgtgagtcctggtgagtgtttgctcaaaatctgcttgactattgatggttttttactgagtgttaaatttgattaaactcttaagtcctcctaagtgccaggaagacactctgctttctctccctcttttttctccttgattcatagtggttaggtgagagaaaagggcagcttttggaaagaaacatttatagatgtcacatctaggcagttaagaaagcacttcacaggaggctgagcgccagtggttcacacctgtaatcctagcactttgggaggctgaggcaggtggatcaacttgagcccaggagctcaagaccagcctgggcaacatagtgagacccctgtctctatttaaaaaaaaaaaaaaaaaaaaggccctgtacagggtatgaaggtgaggggcactcctcctggtggcagatgatcagggccagatgtgggtgggccagaatagaggaggataggagtccctgggaaggggatttacatccccacaccaccctcatccctgccactcccacagctctgatctccagcaggattaaagttgctcccctctctattgatttaccttgatgctaatttaggcctgtggccagtcagaggcctgccataggccttaagagatgcctggccgggcgcgttggctcacgcctgtaattccagcactttcggaggccaaggtgggcggatcacgaggtcaagaaatcgagaccagactggcgagcatggtgaaaccctgtctctactaaatatacaaaaattagctgggtgtggtggtgcatgcccgtagtcccagcaactcgggaggctgaggcaggggaactgcttgaacccaggaggtggaggttgcagtgagccaagattgcaccactgcactccagcctggtgacagagggagattcctctcaaaaaaaaaagagatgcctgtgtctgtgctggcgcccttcacctggcccccactcctcaaatctggagagtccaattgcctgctcgaatgatttccaagtggctattatgtttccagcccaaggtaattggctttaccagttattaatggattaccctaaatagaaaaatgtttggggagggaggagagggcaacacctcctgactttgtagtttggttcttcagtatccac

SEQ ID NO: 5046 - DNA, 6000 bp, Homo sapiens; identical to SEQ ID NO: 1606

SEQ ID NO: 5047 - DNA, 6000 bp, Homo sapiens
tttgtttaaagtatcatatcaatatgtatttgttgagaaaatattcggagttctttgcaaactgtaacacttgttcagaaaaaatagtgagaagaaattaggatcatttatttacttgaggcacatgagtgttctttatgtatgactcaaggacatcccacttctgtcctccctgatcttccatcttccatctgctttcctccctcttcccatctccctttcctcatattcctctccctctccctcacctataggactgagaattcctgtggtctcctgagatcagtttctttccaccagattgtaaacaagctgtggaaagttttagttcttagcgactccacgacccacactagtcaggcagaagcccccatgtacaaggtaccccttgagccttggcaaggtgcatgacacacacttggtcactggaggaaatgatgagtagagagtgacaagcagaggaggggagctttgggcctgagtcctctggggcacaagagtggttgaggcttggcacttgccacctagatttcagacaatgtgtcaggaatcctggatgcccagaaagaaacctgctcagggtctggagccccaacataaagcttttatttaggcaatgttgagcactaatatgtggttggagctctgcagggggtctccatgggtgcactgtgtagcaaagctgtgggagaaaggccttacccctcaaaattccagaattataaatctatcagccgcttgcaacttcagcctggaaaagccatgggcattaaactccaaactgtgagagcagccatgtgggctgcaccctgcaaagccacaggtacagtgcttcccaaagcccccagaagcctacccctgtcaccagtgtgcccagaatgaagaatatagagtcaaggaagttgattttgcagctttaagatttaatttctgccctgtcggctttatgacttgcatgaagcctcttcctcttctctttaagctgacatttcccttttgaaatgagattgttcaaccactgcctataaaaccattgtaatttggaaggaaataacttgtttttgattttacaggctcatagccggtagaaatttttcttggatctcagataaatctttgcattttagacatttaagttgattctaaacctgataaggctttagagactcttgaggtaaactgattggattttgtatgtaagaaagacctgaaatttatgtctgcagctttttctcctttatatcctcaactaacaatattttggggtttctatgattctttgctaaaatctggattcccgtttcaatttctcttgtgcataatctgtaattattttctctgtagttaccattggaatgacatactgcatcctatagttataccatccactctgaaatcaatgtgaatttaacttcagttccatacagaaacttcttttccacaggtacgtttctgcttcacattattgatgtcactaattacaactttatatatggtgtacatgttaacagaaagttattcttattgtaatgtaaatcttgaagaaaatgaaagtaaaagcaaatttcacaaatacatgtttccacgtttttcatacacctacctttacgagaggtctttatacctctatatgacttcacgttgctgtctaaacttctttcatttcaaagtgaatgactctcttaagcatttcttgtagagcagttctaatggcaatgaactcctgcagcttctacatcacatagtcttactaactttctaatttttaagaaataatttggctgggtgcagtggctaatgcctgtaatccgagcacactgggaggccaaggtgggcggatcacaaggtcaagaaatagagaccatcctggctaccatagtgaaaccctgtctctactaaaaatacaaaaattagctgggcatggttgtgcacgcctgtagtcccagctactcaggaggctgaggcaggagaattgcttgaaccgggagaaagagattgcagtgagctgagatgtaccactgcactccagcctggtgacagtgcaaaactccgaaaaaaaaaaaaagaggctgaaataatttttttgccaaatatggattcggtgaaatttttttttattgatcacattaaatatatcacctactatatcctccaaagactctcataagaaatctgtggatcaccttgtccaggatcccttgtaccccatgagtcatgtttatcttcgtactttttatttttgttgttgtttttttcagatggagtttaagcccaagctggagtgcgatggtgcaatcccaactcactgcaacctctgcctcccaggttcaagctattttcctggcttagcctccggagtagctggaattacagatgtgcgcccccatgaccagctaattttttctatttttagtagaaatagggtttcaccatgttagccaggctggtctcgaactcctgacctcaggtgatccgcctgcctcggctcccaaaatctcttgttatttaaagattatctctttgtctggcttttagagttggatgataacacatataggtctgagtctctttgactttatgctatatgcagttctttaagttacttgaatttgtagatttttgtctttaaccaatttgaaaaattttgatgattttattctccaaataatttctctactaccatgggtttgcacttccccttctgggaatccaatactatcatactggttggcttgaaggtgtcccataagtcccttaggacctgttcacatttctttattcttgcttcatgtccttagactcaggaatttcaagtgtgctatccctatgtgtattgattatatcttcatcctgctcaaatttgctattgaaacactctctggtgagtttttcattcaggtatattttttagctccaatttgtttccttttctttttataatttctgtattaatactatattgtgattttcttattttttcagattttctgtagttcttaatccatatttttcattagcaattttagcatatttaagacagctgtttaaatgcttctctactaattctaatgcctgtgattcttcaggaatgatttctactgatttatttcttcctcataatggactgtgatttcttgtttctttgtatgccttgtcattttatttttttgagctggagtcttgctctgtcaccagaatggagtgcagtggtgccatctcggctcactgcaacctctgcctcctgggttcaagcgattcctctgctttagcctaccgagtagctgggactacaggtgctcaccaccacgtccatctatttttttttggattttagtagagacggggtttcaccatgttggccaggatggtttccatctcctaacctcgtgatctgctcaccttggcctcccaaagtgctgggattacaggtgtgaaccaccgtgcctggcctgtatgccttgttattttatttaactgggcatttgaaaaaataaacatcttttttactgtatatagatttgttctatgtcatgacagtcattaacttatatgtgcggcaggttctcagtcaaggcatcagccctacgtaaaactcaagtccttcttagtttgtttctgaacatgtacctatgtggactgtgtttgcccttttatatttccccaaataaccaatggcttttgaattgcttactattatgaaattttgcatcccagtttctcctcaatagcttagatggactattgcatgtctcttcccctggccttttgcctataacatctgtatgtgtatagtcaccctgaatctctactgagccactccagaaataaataagtttatttcagtcaattttaggtattttctgatgtttccatgagttatatgggaatcttagaatccaccatcttgttgaaattactctgtgaaaaatttcaatatctttataatattacatttatgtcaatgataacaatttacctatttttcaatttctgtttgttttatgagaaagcaaatagaagcaatcagggcactgcaagttgtgactactccaagatgtgaatcatggatcatgcaaattacaatcttgttttaacctgacctccaaagggagaataaagtaaaaattatcccatgtgaggattattcaccagtttatatgtcattagttaccagtttttctttatgaataatgtttagcaatattataaagtatatctaatagttatcaggtttttggcttgttactttttggtagtaacttataaaactgactggaaaagaccaataaggcactgtttgcatgttacaaattatatccaaagaccaaaagctgttaataagaaatcttccaataaaaccacatcatattttcttttttatttacacccacatcaggattacaactttatcaggactgcaccttgatcaggaagggatgtttctcttacaaggctaataagaaaggaacaataaatttgctgatgaaaaaaagtcatgcatttaaaaattttaactttaatttttaattgagggcaatattttaaagaaatgctcattagtcattcctttaaattgtgtgtgtgagagagagaaaaatgaaaattagtcatttcaaatgctgcaagatgcagaaggaactcatcatcatggcacacacaaaaaagagctgtgccgctagaggtttctatattcttatgtaaagtcacaatttgttctacaaatctctttgagtaatttatgtctcatatatagagatctggaatagcaaaaatacttcagaggaaattaatgagtgtatcatgaccacataataatttacttatgaattttcttaggtaagaaacggttgaactggatgcaatttttatcacagcttgtgtaagactgcctctgtccctcctctcacatgccattggttaaccagcagacagtgtgctcaggggcgttgccagctcattgctcttatagcctgtgagggaggaagaaacatttgctaaccaggccagtgacagaaatggattcgaaataccagtgtgtgaagctgaatgatggtcacttcatgcctgtcctgggatttggcacctatgcgcctgcagaggtaacaataatatttttagtgttgagagttcaaaggagctagagtaagtggaagctgaccaggttgtcaggcttgtgttcctatgttactctgcatgactcccctttaaacgtcagtctttgttctgcaatgccgtcttgtcacagggtcatctactgcttatttgtggcactgttttgtcttctgtttatgtttatttcacagcttgtcagagtctataaaactcagcagaaagaacacggcttgcctgctccctctcttgaagattgattgcaatgggagtggtttctctgtttctttgtatagtcgaacagatatttacttcttccaagaagatacaattcagaggaatttttatggcaaaagttagtggagacggggtggatgaaatctgttgggagagtatcactgttctgatgggcggccttgagcaccacactgtaatactagacctggcctaaagagaatttcccatgtactattctcacctctgggaaaattacctgaaataataaaatatcctcattttaagaaaaaaaaaaaaaaactagaaccaaacaaggaaagtttaaattctttgtctttgttaatatgggtcagatttgtatcaaaatattgtaacagaaaaatttcttgtttctctgacaagaaaattaatggaatatattttattttctagatttagaaatagctaaatgctatttctacactggaagaaaacttgtatctcaagactgtcttgggaatacaatgtgtgtgaataggaactagttatataaaatttgagtctcacatttctcatctataagacataaggagttacaaagggacattttgaagaccattgacaggagtggtttattttgtaatataaattggcatggagaggaagtaaagatga

SEQ ID NO: 5048 - DNA, 6000 bp, Homo sapiens
cactgtttcataaaaagatttgatgcactcatcttgtgtttatttttatatagtatgcatctactccacctgtattttcacaagaagaaattggatccgttggtatatttgaactccacaccctgcctttggtagtaagcccttcttccttaataatgacactgtagatcatgtaaactgaatttgtagcacataagattctatgggtggatttaaaatgtgggaaatggctttaaagtgccctggacagatgcagaaattttctcttcctctccttcagtgaacttttgagaacctgctatgtgccaagcactctgctggagcctggtataaagcttggtaagcacagctggaggtcctacgttatgtgtggaccctggactcactttgcctgtgtctgcctctgtctcagccattttggtgccctccaacttcgggcacctctttaacctcatgaggccttaattttccttatacataagaatatgcacattctgtataattttatgtttctgatttccactttcatgagaatttagagtgacaattcagagcagggttctctgtagcctggtcaccaagattcaaacctcagcttcacctctcactatgtgattgagggcaaattattcagcttctctctagttcattttcattattggcaaaaggcaggtgataatagtagaacctacttcttgggtttcttgtgaagctttaaattagtgtaagaagtcagtcctcattgttagctctccccaatcttgaatcattcttccaaagtagattgggaagagcacaggcttaacaatcagccagatcaggctcggaatctcactccatcactgacccagcaagtgactcagcaagtaacttaaccattctgaaccccagtgtcctcatctgtaaagtgaagataacaatacttagccaggctgggcacggtggctcatgcctataatcccaacactttgggaggccgagaagggaggatctcttgagcccaggtgttggagatcagcctgggcaagatggcaagaccaagtccctacaaataaatttttcgaattagctgggtgttgtggtgcatgcctgtagtcccagctactcaggtggctaaggtgaaggatcccttgagccccggaattcgagggtgaagtgaaccgtgatcatgccactgcactccagcctggatgagagagtaagaccatgtctctaaaaaacaaaacaaaacaataccattgatttatattccccatttcccctaaagtaaaaatcacttgagccagataatatgatgaaagataaaggcaggaaaatatgaaatgatattctggagaattgcaagtaaaaatacaatatagtgtatctttaaggtcacttttaacatttgaaaatttgtccttttaaacaaaagctctataagcataagagaatgatttatccacttttattattttctgactgtttgtctgttagagtgtgagagaataaattggaattaatagaatggtttatagatagatctccaagccaactgctataaaaaccacaaaatcagttttctttaattgtttttaacacaaagtgtagtgtctttgtagctatgctgtcattcataacaggagaagaacatcatgtcaaaagaaaagaaacctgaatggtgtggtaagtcagggaggaaagtctggtcagccaggcaagcactggaccagtgactcaggtgctggtcaagtgtaccaccttcccctgacctgatgacaccttgctctgccctctgtgtttcatgtttctgcttccatgctgggataaggaccaaagaacaattttaggttaatttctccatctcattctctaaaggactaaggtggcaaatagcttaagaaagggaagtcttagaacatttcacaaattatgaagttcttaataaatacctaataataacaatgaaaagcaaaaaatgaactcttttatttagttgacacctctatatcaacttttctttaaaagcatttctcaggttccttttcttccaaagccgggttcatttaaatctggcttatgtaatagcctgcctttttccatcttgttgaaactatttctgagcctggagagtgacccaaagggcagatgctggccagagctgtaaagccagcaatatctaacttatctgattctcgcttggcaagcacagcttgcattttttttttgtcactggatggaaaaaagtgggggcatagaggggtggttttagctttgtctctgctgacttatctgcctccctcacccccagggtgatctggagcacatcttgagcttctcccggtcaaattccatttggaagtaaagtgtcaggactcaactagatttctgagttcttttacatgtcttaatgctcccctgcagatgatgggggcaattttcacattccagcctggcagcagtccccttagccaagtgtctactgccccagggcaagattctagctctctgattcctccaagctcccttctagccacttcattcattacattagaagcctggccctgcagccatctgagtttatgacccctgagaaccagtctttctctctaaagctgggagcatgcctgtgtgtgagcacaagctcatttttggttcttagttgataggcaagggctggcctgagtagaaatggaagtgctggctatatactcttctaaaagaaatctgggaaaacttggtgcaagtgataacaggcatgtgtcaatttcagaaaccagttggtggatgtagaatattttccaggcacaatttccttgtccccaaaacataagttcatatacattgattggtttgagcaacaatcaagataacatgtgctctggtgcttaggaagtatttgaatcaaagacagactttctaaaattacctttcattggctgggtgcggtggctcacacctgtaatctcagcactttggaggccaaggcggtggatcacttgaggttaggcgttcaagaccaggccaacgtggtgaaaccccatatccactaaaaatacaaaaattagccaggtatagtgctgcgtgcctgtaatcccagctactcaggaggctgaggcaggagaattgcttgaaccctgggagatggaggttgcaatgagctgagatcacgccgctgcactccagcctgggcaacagagcaagactccatctcaaaaaaactattttattgaaacatagagaaaagaacacaaattatcagtgtataggtcaacgcattaccacaaagtgaacgcacttgagtaaccataaaccaggtaaaaaaatacagcctaagaatcccctattgtgttcccttgcctctttagaagtaagttttttatggtgttgacagtacagtttctccatttttccttccagaacttattcttgggaccatgttgctctcattctcactgttacttttcccctcttctctttttccttcttagaacaaaacaaaatactattgactagcagtggtcattctcttcactctaacctgaaagtcaataaattgagtagaaaggactgatgggggccaaaagggctgaacctccaccacatttgtgctgtaagaaaacatgacatggttgcctaggctccacaggttttttaaactctcatctcacacaaactccatgatacaggcaagattcttgtaatttcatagacaaggaaacagaggctcagcagcttgatcagcacttctgaaaccaaccctttgccaggtgtagagtcttcgtctaggccaggacctgtcacttcagtgtataaaggaagttctcatcaaggtggttgatggccgcagtcccctttaagaagtagaaagtgtggtgcggcttcccagaaaaaacacagaggaacacaaaaagtgcatatcactttggaggtttcccacggccggcgaaccactggtacctatggacagcccccagctgctgcagtgactgagggataaaacagccatccatctctgcgcgcaagcccattaccaaagatagtattgccaatggtagtattgttagtgcagttcaactgcaggacagactgaacgtccttagaagcagcctgtgtgtgtgtgtgtgtgtgtgtgtgtgtgtgtgtgtgtgtgtgtgtgtgcaccgcaggacgccctcctttcccgcggagctgtcacaaaggactgtacttggcatcctcactcctcacttcccaggatcacggactccacaaagttctggtgcccgtttctccgggaccactgccagctgagcatacagctccggccaggagggcgccagcggccccgggagccagggagaccaaggaacactcgcattcatttgtacaccccggctccccccaaacgcgcacggcccttggcgggcttggccagggcacgtggtgggcggcgggggcacagcggcgcctggggacgcgcgtgtgtgcgcaccgagagggcgcctggccgacggcgcccacctctctcgtggctttggtggctccaggcctggtagggccggggccgcggctcgggcagtgccctccctactcctggccgggccgggagcagcgggagcaggcgcagcgcccctaccgcccgcttttccgcctccatctcctccgcctcctcctcctccttcccccaaccacccgcgcagtcacaaccggttcagactggccggggtgccccgcaaagagagacaagggagaaaaagacagcagggaaaaccccggggaggagaaggcgaaagagaaggtggagctcagagaagggggccggctccccagctccatgtggccgccgccgctgcgggtctgtgggggcagagggcggcggctcccggggcagcgcgtagcgggaccgattgcctaatactccggcaggggccggggccgcagctggctcggataaatagccgcccggctggcccggagctgcaggggagagcggcggccgcgatccccaccacaccaccagcccggccgcacggggcactgagccgggtgctgagcaccggaggccccgccgaggccgggactcaggtaaagggctggagcttgcggggagggttccaaaggtgggcagcagcccctgctgcccagcgtcctagaggcaagaagtaactccgactcggagcagtaggagggggcggtggagcagcatggaaccgggcttttgtctggggtgtgtgccgggggcttcgagtgtccacggtgcgcccgcccctcgccgccccctttttgatggggtgcttctacaaagtgggcaagttttcccgggaatccgaaggcggcattttgtacggagttgaaagagagggagggggtcctgggggtggtacggtggccccccagagagctgcctctggactccagagagcttccagggttgctggtggaagagcagggagaggtgcatgtgatgcaggtgggcctccatttcccagaggaccgaaaggcctccaactgccttggtccggagcgcgagcaaccaggtgcccccggagggttgggaatggggcgccgcgggtactcctgacctacgtggagcgcagcgcgcagggccggcggattctgcacgttggcgccaggttcagcaccacccggcagccctgggcgagcgcgggagcccagccttcgccaccgccgcaggaggcaccggcaccgcgcccacctggaccctcagccagcacttgggaggacttggtgcttaatgccccatctttggttcgccctaggtaacctgctctggcttcagcagcgcccagaggctttccagagagctgataaccacgaacaaacttggctgtcaaaagcaaatcaatgctttaccttgttttctgggtgcctagtctatccaacacaaactatccccgaagtttagtcaggatttacgctaaatatattacttatatagtaagttattcgatataacatttttggtcaattttctaggctacagttttgatgtgttttttaaaaatcttgaattaactg

SEQ ID NO: 5049 - DNA, 6000 bp, Homo sapiens
caatcctggaagatggggaagaaggagtgtcaggaaaggttttgcaatggcctctaagtggagtattcaagaattatatgaaagcgtatttcatgctgggcatgttggctcacgcctgtaatcccagcactttgggaagctgaggtcggtggatcacctgaggtcaggagttcaagactagcctatccaatatggtgaaaccccatctctactaaaaacaaaatacaaaaattagtgaaacaggagcatttctgttattgattttatagctgcgaaggaagcagagtcaggattagtgagcgatattcagaattatgcttaattggatgcttttatgtaagttctaagaaattactgggtggtgccaaggctgaaagatgtgctgagatcaacaggcttcccctgagtaaggtaaaggattttgttgttaaccacaaaacatgtttcttgtgtacactgagtatttcccagagactctcatgacctattgcttactatggaggaatcctttggttcagatgaaggaaagctttccatcaatgcaagcattgtgacaacgttgattgatggttattgcaacccagctgtccctcagaatgagtgtgttcactggaggaggtgacagtaccctcatcaaattaatgaaagtaaatgtctaggtttttagcaaaagcataaagtctgaaagaaagcatagcgtacattaaccagcttgccctgtagcccacttccatataactgcttactctttagagtcatgtaccctgtatcacaaggtcctaacctcataggtaacgtctcaaacagtaggaaatctcacgttttccactcaagatattttctgcatcatgcattataacagttccacagatgccatccaatctacaggcccctctgaggaactgactcagccccacaatgcagttaccacatccttaggctttcatagtccacaccctggccagtcagcaccccgccctgctcctcagccccctgcctgccaaaattcccttgaaacccctgtctaaaactcctcagggcagtgaattcgaagtttcctcctacttcctcgtttgtctgccattcaattattaaaccccttttctgctgcaacagccactatttctgtgtgttgatcagttactgcacaatgggcacaaatatgcgggtcctatacagaagatccccctgtcaggtgtctatgagaaagctcctgtaaccccaaggagaaagtgaggcacggacagcgtcttcctcaacttccttccagaggatcgcactacacacccaacagcaggctctcagaagtcttaacatataaaaacgtagtagataggtaaatagacttgcagaaggataggttttcctcccctcaattcttaacatattcaccctcactcatgcacattctcatgtacagtttcccagttaccctccctaatcagatgctcttaccaaactgtgccctgtgtccggctgtgtgcagttgggggtgaagggaagggaggaaggaaagacaagagacttggccctgatggtcctcagtcatggggagaccaatcttaggccatgcactattccttcattgccattgtcagggccatgtttgctacttctgggactgggttttattactttccttcaccttttctgctttgcatgggaaatgcagatacccatgtaggcacaaagggcattttcttccctctctcttctgaagttttgataattagagtgtataaaacaaactgacaagtgaaaggttaatataaaaagacatgcaaatgtgtatacacgtacatggacatcagattcctgcaaataagagactccagggcgttcctgttgacagagggtttcatcacatcctgaggctacggagagaacaggggtttggggtctctgggggaggtggagtctcaggtaatgggggagtggaagagacacatggtgagccaaggctgtccccacatagatgtgagcctctcaggggctccccaagctgctctcaggaaggcaggtggcggcctgtggagaagcttctcagacagacctttaaagtgtcaggatcttagtctgtttttcctggaagttaatctttctttgatccaataaggcatataaaggggtcctcagagaaaggcttttaccctctgttcacttcactaatgtacatttcctcagcacttacaaatctctgcgagagaagaaagcttttcaggtctttctgtgtgtcggcagcctctctgaattgtgacccctctgaatagtcatataaaaatatgccagaaaagtacattttgagtagcacattttgctttccttcaccctgtgtaacacgtcttaaaaacaagagtgtaccatgaggtccacagccggtggccccactcctgcctcctgaacaaaagcttcaacaaaagggataatttaaaaatgagcagctctatttcatgggcctctttccaaccacctggcactaaagtaaaagaccggtgcaactcagaacaggtgcaatgatccaggctggtgattggcaggtctaaaatgccacccaagtcccctagtcactgtgagtcagcaagattttccagagaaggaggttggagataacactatcaaatcacttttagatgatcatgcctggtgaatgtgagtgccttaatgaggggtggggtagagcaggcatgtctgatacatgaaagcaaatgggcctgctccacacatcgctcagcaaacagccgtctcaagctgctcttctcttatttaataatgaggcagtcacttgcttcaacagaaaacattttcaactgactacattatcccataaagcaaaggtatacggttgaaatcatatatgttcttaacatttctggaccctcctatacctatgaataaatttaaatgacttgcttattccaaaatgaaattcctatgttatttagaaaacatgttgaggaaaatattggactggagagaaaaacaactcacaaagagtcctgtactcttccggtgacctacttcgcatttggaagtttggttactttttatgccaatcaaaacatcctgccatgtaactatggagcatgttcagtaaaatcaaatgttttacccacacagaaaataaaaatgaactttaatgtttttgccttggtcttcaaaaatgcacccaaaggagaaacactgcatttcccaaacaggacaaagtgatttggtgccaatctcttaagaatgaagaatgaagtgtttagctagtttgagagtcaagaaaaactgagaaatgcagaactcaagtttccacttgaaaatcattgtaacaagtgacaggaggaaagaaaatcctgtagtcttggcatgacccatcatttttaagggatttttctataccatctctgtttattgattgtataaccctggatgccaagaaggtataaaatcccatgtccaggcatcaatacaggccctctgctctcaatgagagaaaaatacctaggacttgtggggatacaaggaatcctttgtccaagtgattagtctttggtctttaacactcagcctagtacattttgggttgggagaggggaaaaatggggaatattaacctcatcactaaactaacactaatattctttagtggaaaaaaggttatcctgtcgaaccagcaaaatggctagaggtttctgcagacattctagttcatccaaaagttttaattaattttaataatcttagtgaggtgctaaaagagggaccctaatgggatgtgagactcccaaactcaaagagattctagtttcatgaaaagcaaattctgtgacttcacaaactagatatttcattaaggtcacaatgtagccaagcaattctgggcatgactgtttaaaacaggaatgtgaaaccagagcaaaggcagccctcctttggctgggcgatggcatagcagaccaggaactttcccccacatggtgctctatacaggacaggggtgaatcagctcagctacaccatgtgccttagagactctgaacatgagacatgtggaaaaagaccctaaaaaacaattacaggcagaatgcaggaaaaacagccagatcaccaggcgtggtggctcataccaataattccagcattttgggaggctgagccaggaggatctcttcagctcagaccaacctggaacacaccacaagaacttgtctctgctaaaaggaaaaattttaaaaattagctgggtgtagtggcacctgtctgtagtctcagctacttgggaggctgaagtagaaggattgcttgaacccaggaggtcaacgctgcagggcactgtgattgcaccattgcacttaaatcttggcaaaattttttacagtggcaacacaggttatgggatggagagaagaacaagcctggctagcaaacgaggtttcattatttagatgaaatctcccaggaagcagccctcagagagaacagctgggaaatgtttttctttagacctttaaaggtatcagattctcagttaatctttcttctatccaagagagattctcagagaaagcccagctgtaacaatgcaaattttctctacagatgcaagtctttcccactaaagacagctttttggctcttctcgtatttcctgcccttctgaatagctgtcttgaaatgtgtcaaagaaatttattttagtgcaaaatgtattggttcccttgaagctcaactctgactccaagtaagacaagaggggatttataaccatagagcacggtgaggtcagaggagaaaaaattgctaagaggaagcaccagaggttagggtggcaacagcaaggcagaaattctggaataccaaacgatatggtttggttctgtgtccccaccgaaatatcatgtcaaattgtaattcccggtgttgaaggaggggcctagtgggaggagattgaatcatgagggctgactttccttttactcttctcataatagaattctcatgagatctggttgtttgaaagtgtgtagcacctccaccttctctctctctctccctctccctctcctgccagccaagtgaagacatgcttacttccccttcaccttccttcatgatggtaagtttcccgaggcctcccgtgccatgccttctgtacagcctgcagaactgtgagtcaattaaacctcttttctttgtaaattacccagtctcaggtagttctttatagcagtgggagaataaaataatacagaaaattggtactaaatagtgaagcattgatataaagatacctgaaaatgtcaaagcaaatttggaactggataggtagtaggtgtgattggaagagtttagagggctcagaagaagatggaaagatgaaggagggttttgacttcctagagacttgaatggttatgaagaaaatgctgatagggatatgaacaatgaagtccaggctgaggagttctcagatggagatgagaaacttattgggaactggagtaaaggtcactcttcctatgctttagcaaaaagattggcatcatcgtgttcctaccctagagatctgtgtcactttgagcttgagtgagatgatttagggtatctgatggaagaaatttctaagcatcaaagcaagcaagatgtggcctggctgcctctaacagcatattctcacgtgcatgcccaaagagattatctgaaactggaactcatatttaaaagggaagcagaagataaatgtttgaataacttgagcctggccatgtagcagaaaagaaaatattattttctgaggaagaattcaaggtggttgcagaaatttgcatgagtaaagaagagccaaatgttaatagccaagacaatagggaaaaatgcctccaaggtatttcagagaccttcaaggtaaccccttctatcacagacctggaggtttaggagagaaaaataatttcatgggccaagcccagggtcctactgctctgtgaagtcttgggacatggcaccctgcatacc

SEQ ID NO: 5050 - DNA, 6000 bp, Homo sapiens
gtgtgtgtgtgtgtgtgtgtgtgtgcaccgcaggacgccctcctttcccgcggagctgtcacaaaggactgtacttggcatcctcactcctcacttcccaggatcacggactccacaaagttctggtgcccgtttctccgggaccactgccagctgagcatacagctccggccaggagggcgccagcggccccgggagccagggagaccaaggaacactcgcattcatttgtacaccccggctccccccaaacgcgcacggcccttggcgggcttggccagggcacgtggtgggcggcgggggcacagcggcgcctggggacgcgcgtgtgtgcgcaccgagagggcgcctggccgacggcgcccacctctctcgtggctttggtggctccaggcctggtagggccggggccgcggctcgggcagtgccctccctactcctggccgggccgggagcagcgggagcaggcgcagcgcccctaccgcccgcttttccgcctccatctcctccgcctcctcctcctccttcccccaaccacccgcgcagtcacaaccggttcagactggccggggtgccccgcaaagagagacaagggagaaaaagacagcagggaaaaccccggggaggagaaggcgaaagagaaggtggagctcagagaagggggccggctccccagctccatgtggccgccgccgctgcgggtctgtgggggcagagggcggcggctcccggggcagcgcgtagcgggaccgattgcctaatactccggcaggggccggggccgcagctggctcggataaatagccgcccggctggcccggagctgcaggggagagcggcggccgcgatccccaccacaccaccagcccggccgcacggggcactgagccgggtgctgagcaccggaggccccgccgaggccgggactcaggtaaagggctggagcttgcggggagggttccaaaggtgggcagcagcccctgctgcccagcgtcctagaggcaagaagtaactccgactcggagcagtaggagggggcggtggagcagcatggaaccgggcttttgtctggggtgtgtgccgggggcttcgagtgtccacggtgcgcccgcccctcgccgccccctttttgatggggtgcttctacaaagtgggcaagttttcccgggaatccgaaggcggcattttgtacggagttgaaagagagggagggggtcctgggggtggtacggtggccccccagagagctgcctctggactccagagagcttccagggttgctggtggaagagcagggagaggtgcatgtgatgcaggtgggcctccatttcccagaggaccgaaaggcctccaactgccttggtccggagcgcgagcaaccaggtgcccccggagggttgggaatggggcgccgcgggtactcctgacctacgtggagcgcagcgcgcagggccggcggattctgcacgttggcgccaggttcagcaccacccggcagccctgggcgagcgcgggagcccagccttcgccaccgccgcaggaggcaccggcaccgcgcccacctggaccctcagccagcacttgggaggacttggtgcttaatgccccatctttggttcgccctaggtaacctgctctggcttcagcagcgcccagaggctttccagagagctgataaccacgaacaaacttggctgtcaaaagcaaatcaatgctttaccttgttttctgggtgcctagtctatccaacacaaactatccccgaagtttagtcaggatttacgctaaatatattacttatatagtaagttattcgatataacatttttggtcaattttctaggctacagttttgatgtgttttttaaaaatcttgaattaactgaataacagttcatattgaaggtggattctcccattccctgcacccaggattttccgttgttccatcaaattctgtaaatcggtatgccctaacagtttcttatatttgagttggcttcagcttcgagaaattcttcaggcaggtttaggcagagggctgaggaagctagagaagattccgaagagaaaggatgattatttgttgcatgattatagcttcttttaaaacttctaataggaaaacccttccactttcctggaccaaatgcagagtaaagtcattttctattatctgttgcaataattaataataaatatgtaaatgcagaaaacatggttagtacccatatcattgccagaaaccagtcccgctctccctccaccatcaaaaaaaagtcctcgcaagtaggaattagataaaataatttaacctgcaattttgcaacaactcagactttcagcaccaccgaccccctaataacatccctactggtttcttccattttttgtgtaggcaagtggaataacaggtatccttcatatccataggaagagcattgggaggagccaaagatatggggaggtagatcaagacattaggaaatcttttctggcttctgactttgagtctgaaaaggtggtgtgaattggttggtgtctgaatctttatcaggacacattatggtggtctggggtggatctggccatgcaactcaagctagaggatgacaactacagagatgtggtcacattttcaagttttacttccttacctcaatctttcaaacccctaattaattaggtaataaaaattgtatatatttatgatgcacacaacacagtattttgaaacagtaatacattgtagaatggcccaaccaacataattaacctatatgtattacgtcacatttttatcttttgttttttttttttttttggtgtggtgagaacacttcaaatctaccatcttaacaattttcaaaattgtgactatagtgactatagtcactatgttgcacaatagatctcttaaacttattgctcctatctaactgaaattttgtatcctttgacaaacatctcttcaccccaaccctacctactggtaaccagggttctactctattctctgagttcaacaattttagattcaagtctcccttcccttcccttcccctcccttcccctcccttcccttcccttcccttcccttcccttcccttcccttcccttcccttcccttccctcctctcccctcccctcctctgccctcccctcttttccttccctcttttcttctctctcttctctctctctctttcttctcactgcagcctcgacttcaccaggctcaggtgatcctcgcacctcagcctcccgagtagctgggactacaagcgtgtgccaccacacccaggtaatttctgtgtttttgtagagatggggtttcgccatggttcccaagctggattacaggcatgagccactgtgcccagctgacttccctttttttttttttttttgagatggagtttcactcttttttttgagatggagttttgctgttgtcacccaggctggagtgcagtggctcaatcttggcttactgcaacctctgcctcccgggttcaagcagttcttctgcctcagcctcccgagtagctggcattacaggtgcgtgccaccatgcctggctaattttttgtatctttagtagagatggggtttcaccatgttggccaggctggtctcgaacttctgacctcaggtgatcaacccgcctcagcctcccaaagtgctgggattacaggcgtgagccaccacgcctgactgatttccttctttttcaagtctgaattagtctcctattgtgtgtgtgtgtgtgtgtgtgtatcacatttcttcatccattcatccacttatagacatttaggttgattccatatcttggctatggtgaataatgctgcaaggaacatggaagtgcagctatctcttcaatataatgctttcctttgggtatatagtgagattgctggatcatatggtagttccatttttaatttttctgaggaaccactgtattgttttccatcatggctttccaagatagtatcacttaatgacttcaattttaattaatgattgcaaaaatgtatgtattttgagctacttagccttttcttctggaggttcttggcagacaccaaagtaacccttatggatgatgagactgaactataacaaaacaccaagttcaaaaaaaagaacacatggtccctgcctccaaatgtttagtgagaaaaatagatttacaaatatctgcattacaagatagtataaatggagtcatagggtagaacatcaatagtgtgctactgaatgacaaaggaaaggagaggttcattcaaggctaagtgtgaagaaaagttgtggggtgggtgtagcaatttaggaagaggatttccttgatggaaaagaggcctgctggaacaagagaatagcacagagataaggaagtctagtgtgtttataggaagcaaagcagtttggagtagctgaaacctggaatttaagacagataaggctgggaggtgggatggggctagattatagagactatgacatgtcatgctaagaaattaaaatatgattgaacattattggtatatttacataaacagtatcaacatccttaactgtactttttgcctttaatttcagttttatgagtttccttctaaaataagtagttgattaaaatctcaatattcacttcctatcagtttctttcaatcagtaaaagaataatgtattcctaatatccttcaatgctttatctaaatccaacagtgttttacccccaaacctgcattcctatgatattaatagctcttagcttgattaaaacttccgatagaaaaacacttccactttcctggggcaatatgcagtgtatagtcattttctattctctgttgcaatcattaataataataattaatgtttattaaacatgttatgtcaagggagccacatagccttatgttatctagggaggcattattttgatcttagactgagaatttttacaaggtcacacaactaagtaaagggaccaaggagtctacccccagagtctgtgctttgaactattgtactatcatgtaacggggcatagtgtatgataattattgttaatattagatagaaactgggcctgattcctgtagcaggactgtttctctgttttttttttctttgcatcttaattttcatcatttggattaattttatcttacactttcagtgacgggacatattttaatgttttaatacacttttaaactactcatgggatctcgtatttttatgacccacccaaaagaaactcttaaactctgagaagagacaggatgtgggacgaaaaaaaatgttagcaacagtgatggcacaagatgtgaagaccaggcctctggaagaatgttgattaccaatattctcatgattcccaataaactccccaaatcaccagatctttttgcatttcagcatcccatatatttttctgtgtgtcttgatttttttattatgaaggtaatacagtaaacatactactttgtacatgacatactaaagtatgtatttagacaacagatcaaacatcacatgatcatgtataaattgtgcaaaacgtttgctaactgaaagaacacgtcagtgttattatcatagatttcttcaccagaacactattctcaggccaagctctggaggagagggttgtgtggagtagagagaagctgaaatgagagcctggcagtccagtgaccctggtaacagtgtgggacacagggagatgatgataccaatgtatctcagtgtctggccctcactctgcctaaatttaactgttacatctttatttttgtatttactttgttaaatatttggacctttccatcttttctcaggctctgagtggtttacagattctgctattttcacttttgagtttgagagtaggacttagaaatagatgactcttcaatggattggtgagtaaaggatcctgaaactgttctctcctttagcatgacgtctctcaacttc

SEQ ID NO: 5051 - DNA, 6000 bp, Homo sapiens
aacatggtgaaataccgtctttactaaaaatacaaaaatcagccagatgtggtggtgcattcctgtaatctcagctactcgggaggctgaggcaggagaattgcatgaatccaggaggaagaggttgcagtgtgctgagatcgcgccattgcactccagcctgggcgataagagagagactctgtctcaaaaaaaaaagaaagaaagaaagaaagaaagaaagaaaacaaagaaaaagaaaaaaattaaatttcatatactgcaattttttactttataaactttttaattttcttaatgttttgactctttcataataataataatacttagcttaaagcacaaacacattgtatggctgtacacaaacattttctttctttatatcctaattctataagcttttttctatcaaaatttttaattttttttcttataagacacaaacacacacattagcctaggtctgcacagggccaggatcattaatatcactgtcgtccacgtcggcatcttgtcccactggaaggtcttcagggacaatagcatgcatggagctgtcatctcctgtgataatgatgccttcttctggaatacctcaaggacctacctggggctgttttacagttaacttttaaaaagataaggacaaggagtgcactctaaaataataaaaagtatagtatagtcaatacaactattaacagtcattttttatcattatcaagtattatgtaccatacatcattgtacatgctgtggtttcacaggactggcagtgctgtaggtttgtttatagcagcatcaccacaaacacatgagtaatgcattgtgctatgacattataacaactatgacttcactaagacataggaattttacaactctgttataatctttttttttttttttaagatggagtctcactccatctcccaggctggagtgcagtggcgcgatctcagctcactgcagcctccacctcctaggttcaagcaattctctgcctcagcctcccaagtagctgggattacaggcgcctgccaccatgcccggctaatttttgtatttttagtatagacagggtgtcaccatcttggccaggctggtcttgaactcccgaccttgtgatccacccgccttggcctcccaaagtgctgggattacaggcgtgagccactgtgcccggccaactctgttataatctcatgggactactgccagtccttcattgactcaagtcattatgcagtgtgtgactgcacatggttaaaggagacagcaatcagattttatagccttgtcttttgtaataaattcactccattttctaatttgtttgtaaaaatgatacaaaatactaaaacataatacagttggccctccagatccatgggttccatatccatggattcaaccaaccacagattgaaaatattttgaaaaaactatgtatctctattgcatatgtacagactttttttcttgtcattgttttgtatacaatacagcataacagctatttacatagcacttatattgtattaggtattataagtaacgtatggagatgatttacagcatatgggaggatatgtgtagtttatatgtaaatactatgccatttatatcagggacttgagcatttatggattttggtatccatggttactgtatctgtggggtattctagaactaatccctcatgggtactgagggatgactgtacttaaaaaataggcacacaatctcatgagttatggtcacttacatacgaaggcttttctggttgtaattgttgttttgtcatgaagatattaaagccttggtttcagacaatttttagggaattatttcttttcttttctttttttttttttgagacggaatctccctctgtcgcccaggctggagtgcagtggcaccatctcggcttaccgcaacctccgcctcctgggttcaaacaatactcctaccttggcctcctgagtagctgggattacaggtgagcaccaccatgcccggctaattttttttgtacttttagtagagacggggtttcaccatattggtcaggctggtctcgaactcctgaccttgtgatctgcccgctttggccttccaaagtgctgggattacaggcgtgagccaccgtgcccggtcgggaattacttctttaaaaagtgtggtgaatgtttgccccaccaggaaaatcctagaatttagcttaatctttctgtccaatgttcagttttaagctctacaattctgggataaacagaaattaaagtgtcatattttcaaaagttcactcttagacatctccttccaatctagttttgaaaacaattttagaagtttttctgtgtaggctccctgcccctccacttcctacactacctcactgtccagtaaaactttttgctatgatttgacacaggaatcaaggttgctaagagaccacctgtgctgaatacactttgttctggcaagagcagaaaactgagaagccgtgttacctaccactacctgggattaattcaggtgagaaatgggtctctactcactcctcattcctcactaattgtctattcccctcctcacttcttatttcagtctctctcttactctatttggagagagttgaaggtacccctgggagccacagactgaagaaacacaagctggagtttgaggtttctggagagaaggaaaatcactttgcaaacccgtgtattatttttgctccttgttgctgaaacacaggcaaaaggaattgttgcatgcagggaaaattctaggtgtttcttttgctaatgattattgtataatttggggcaagtaattcccttctctaggaatggagcaatttattacagaaattatcaagatagctcaaaatgggagtagacaacactggcagagtactcatttctttccccttctctttttcttattctctcttaaaagtctacctgccttttttattttggggtgaaaatagtagatgaaatattttactacccaaatcttgccacgtttttgatactgacgttcattttaagttgagtatatatggggaactttggtgtaaggctttgaaaaccacttatttgcctttacatcccctgtaaaagggattaagaatgcttctaaatgtcctgcctaacagacgtttggtaaactgttccaacaatgtggaatgcagaccacaaattccaggtagtttttaaaacctgttttattaatacagaaatgtggaggaaattaaatgtttgatgtcttagtaagtaaccaaaacatgacagacaggatcttgaggaaagaaaaatacctttttttttttttttttttgatcagtacctgccttttttcatgtcttcaaattctcacttcctggtaacaccaatagtacaagttagaggaatagcagcttcaccaatgccaataaaaatgattgaaatgactgcagatacttgataaataaacttactacagataacatgaaaagggaatggccactatgaaagttccttgagctgtttgttttagaaagaaaggcaagtttggcatagagaaaagcctgtgattttgacagaaagtggtcaaaataaatgggagaaaaatattttatttcattgattggttacaaataggtgtggaatattccctggaagacttaccttgttcacaatctttttatagtggaaatattagattgagttgaaagaatcagtattataaatgtgttcatttgaggatacttttctcttttttcctagggagcgggataattctggatatgactggtaaaaactggatattaatttctactactactcccaaaagtctagaagatgaaattgtgggaagacttctaaaaattttgtttgttatctttgttgacttaatttctattatatatgttgtgataacttcttagaaagctgacttcctttccatgtacatttcaaactgaattacagtgaataaaaatttgtattttaacttgttgagtgactcacattttatgacattgccaatttattctagaagccaacaggacactgcaatacaaacaacattgtgtattgtttagttctttatggtttatgaaacattcacatatactgaagtgaatttttttccccaaaaacatctatcctactgagtcatgaaacttctagatttttagccaggtgtggtggctcacacctgtaatcccagcactttgagaggcccaggtaggcggatcccttgagtgcaggagttcgatacgggcctgagcaacctgaagaaatcccatctctactaaaaataaaaattaaaaaaatttgacaggcatggtggtgcatgcctgtatagtcccagatactcatactcgggatgctgaggtgggagaatcgcctgagtccaggaaatcaagtttgcagtgagctgtgatcacaccactgcactccagcctgggtgaaagagagagacccagtctcaaaacaaaaacaaacaaacaaacaaacaacttctggatttttttaacatagtcgttatttggtgtattgactaaaatttatacgtgagattgtgagtgaagttgattttttaggatgtgtacctatgtgacattttatataattctatttttaacataccaagtttaacattccagtagcataatctttacatatgctgtaccaattttcttatacacatatttcatctgtttgtaggtggattatttttcttaaccctgggcaattggataagtgagaaatatttctatcaacaaagacttacgaatgaaaatacttagaagagattcttttaggaaaacaacttataagaaaggagagaaggcagagtataacctatgttgagttcctatttgggactaaatgctcactctatgtcatttaatctaaggcttacaataaccctaggtggcaggcacttcttgcctccattttacagatgaagaaactgaatcttggaagaattgtgccagtttgaggccaacactaggaagtgtctggaaccggatccggaggcttcacaatctatatgttgcctccaaaggtaaataataactttataagacaagtgtagttaaaaaccaatctgtagagctaaactctttttcttacagtaattctttattcaagttcctcttgctgtatttaatattgcctctgttttcttattccatatttaaacatttttttttatcaagaagaaagatcaagtttacttttttcttatgtcccactcgaaaatgtgttctcttcccctgttttctccatttccgctttatctcacagggttaaaatataactgttgaacttctactttttaagcttttgaaaaacaaatgactctctgtcctttagactttttgagttcttactttggacacacatactcaacaaaattctgagttcttctatgtgataattgttttctttgatttggtccaatcattaatgcaaggtttcataagagatctaattaagtgtgaaaggaatctggacctttgagacatatcctttaaccagctcttacttaacctgtcagcagtgttgtatatttaaccacaaaccaaatagagtcaaactgagtgttaattgaaaacagtagcagaacgtcctattcttcctctacactgtattattagaccatacctttggggtataaggaccacctcctgttgatgtgatgtgcttctcctcaaacccctatatttgagatttgttggaacccattatcaggtcactcctgttttcaggcagttgtttcttttctctgggaacttccaggcagtagacaaggtggtccgaatcatctattctgaagccagactgcttgggtcacttcctatagttcgacagccctatgtctctcagcttccttacttataaaatgagagcctagctcatagggttgtagagaaaacgaaatgaagtaactgatgcaaagtgcttagtacagtccctggcatatgggaaa

SEQ ID NO: 5052 - DNA, 6000 bp, Homo sapiens
ggtaaccctggaaggtcaggcttttagatagcctgaagaacgtcagtagttattctggcaacaggatccaaactaatattttattcctgaggccaacccagtggcaacaaagtgattcatggttgaattgaatccagctgtatatttccccaacatattttaaaaagcactgcccggtgagaagtgtgaattgtggtctaggtggagacaaggccagagtcagaggacatggctaaggcagtgatgggagaagggatgcaaaaacagaagatggggaatccagagtagttggaatgcagtttgcagaacctgtgaggatcttccacaagtgtgggaaggactgtaagagtaggcatggcagcttcaaggacagtgggtctcacctgtactatatttgctgtagaggcagtatgacatcgagttagaagcacaagcctggatccacactgtctagttttgaatcctcttctgtcactcactagctatctggtgttagacaagttacttaactgtcctgtgcctccgttttggaactgtaaactggggataatagtacgttgatgaaaagagtcaaattctttaaaatatttgaatttttatgagtaacaaatggcctgtgacagagtcccatgagagtctgtctcaggtggtcaggctaaacttgattttatacattttagggagacataagacatcaatcaatatatgtaagttgtacattggcttggtctggaaaggcaggacaactggaaacaggggcttccaggttgtaggtggattcaagaattttttaagtggcagtaaattgaaagggttaagttattgtctgaagatctagaatcaatacaagggaatgtctgggttaagacaaggggttgtggagaccaaggttcccattatgcagatagaatcaatagaagggaatatttcttatcagacttaaagagtctgttctatcagtcttaaggtgcctgttttaatgttaatactggtcagctgtgtttgaattccaaagaggggagagtataatgaggcatatccagcccccatccccctgaccttatcacggcctgaactagtttttcaggtttacttcagaatacccttggccaaggggagggtccatcagctggctgggtggcttagaattttatttttgatttacaaatagtacccatcacattgggttattggacatatgaaagggatgtatgtgtaaggcacatgacaggggctctcaagtgttagcagttataattctgacctaggtttccctaatgtccaaatgtatttgtgttgaaggtgttgggagttgcatgctgtgacagatgatcttgcttttcactcagtcttgagaggagggcataggggcctggtccatagcacactaaataaaaaatgaagcaactatgggcagtcaagatttaaaggagttttcagtttcaactcacagggagctaggtgaagggaaattagggagaagtatgaacccaccttcagtcaaagatatgataagctaaacaaaagtcacagcagagttttttaaaaattaaaaagaaaccccgcatcaaaacacttgaaatattgtgacctagttgaaagaaaggaatgtgggcatgaaatgaaggtttgggggaagcgatcttcctctgtagtgaacaggggttggtccacaaatgcctatgggccaaatctggcctactgctggtttgtgtatgattaacaagctacaattggtttttacatttttaaatgaatgaaaaaaatcaaaagaagaatattcataatacgtgaaaattatgtgcaatttacatttcagcgtgcataaataaaattttattataacacagccatgctcatttttttatggattatctctagctggtttcatgcttcaagggcagagttgagtatttgggacagagattgtacaccctctatgccttaaatatttactctctgatcctttcgggaagttattgacccctagtattaatgagttaaagcatggctgtatttctcactgcttcgtgttccctgaacgccatttaatattttctctctttgtaataatgtataacatgcatggaagcataattagtgctttatttcacttaaccctttacaatgattattttaaaattaggatgctctttttgaagattaaaaattacagttttagctattgcacgcagggcttaattcctaggtaatgggttgataggtgcagcaaaccaccatggctatatttacctatgtaacaaaactgcacgtcctgcacatgtatcctggaacttaaaatttttaacaatcacagttttgcagtttacaaaattccaccaggaaactctaaattacttttcaataccctgggggaaaaaaatcctgtatctttctaaaccacagacatgttcttgtgggatgaaggctgaggaaactagcctccaatgtgtaatttgatattccccattctctgctatcttatgtgttcaataaatatctgttgaattgattttcatcatgttgacagataaacttggttggcaagaataggaaagttgtttatttatttgttctgtgtgaaaatatagaactttcaaaacaccaagagcatttttaagtatctaatgatgtgacactttgttagaatctgtacaaagaaataggcaaaaatcacaaatttatagttaatgggtactaatgcagtacatgaggtcaccctgctgtttttaattctgtcagtgtgttttctgtagcgtttttaacttttacagtatatgccacgtttaatgagagaaggaaagggttacatttgtctactgttattacttctcagtagttagcaaagagatactctcttagcagtcccaaaagatactattttagttgccattacattaacatgaaacattaatatttgcatgcaaagttttttttccttttgggaatgaaggggttaactttaaaaaatgttaagaagggacaactgaggtcccaaagaaaatattttcttacaactctaaggcagagccatttggctatttggaagaattgttttattagatgggtttttatagcaatcatatccatgcaatcagtgatgcctctgagcttggtcctattggcatcctgatgagattataatgtaatttaatactgaccattttaaacatatgatcaaccttttcagactatttttttcctgatttttcacatgacatttcccaatgacatttacatttaaaaatgctcagtttattaaagattgaaatcagaaccagatgagaacagtaccaattgattaggctaccataacttggcaaccctctgtgtttagtgtgatcagtgctaaaaaggtgaattattcacagtgttacatagatgtataaaccagcatactttgtaatttaaataccctaaaaaaattctacttttctcataattgtattaatgcatgaaaaggatgactcactcattccggtgattcagcaatggatttgaactatcaagccattataaatatccttaaactgcaatatactatttttaaaaagtaaaatatgaaaatttacttttctggaataaatatgtagcatggagcctggcacataataagtgcaaagaaaatagtttcatgatgatacttggtttttgggtttttttgtttgtttgtttgcttgtttgagacggagtctcactctgtcaccaggctggagtgcagtggtgcaatcttggctcactgcaacctctacctcctgggttcaagcgactcttctgcctcagcctcccaagtagctgggactacaggcgtgtgtcaccatgcccagctaatttttgtatttttagtagagacggggtttcaccatgttggccaggatggtctcgaactcctgacctcgtgatccacccacctcagcctcccaaagtgctgggattacaggcctgagccaccacacccagccgatgatacttgttaagaatatgggctattgggttcaaactgactgagtgtgaatcctatttatgttctttacagatttttgatctatggcaaatttctcaaccattccagccctaggtcacttcatctctagattgggaataataataggacctactcaatgggatcagtaaaagcattaaacatgatcgtgcaatgtaaagtgcttaacagtgtctgagctgcaaattctaattcttaaatgttctatcagtattactatattattgttattattgttatcttctatcttcttaatatgattttaatatgaagttacatataaatgccagtataaaaaataaattgaattgtgatattacaaattctaatcctgagagcctcagattacgaggttgaacagttcccattccctttttaggttcaagcgttggccttttcatatatgctgctctgcagaggatgctggttgagttctatggactggatggatgcttgctgattgtgggtgctttagctttaaatatattagcctgtggcagtctgatgagacccctccaatcttctgattgtcctttgcctaaaaaaatagctccagaagatctaccagataaatactccatttacaatgaaaaaggaaagaatctggaagaaaacataaacattcttgacaagagctacagtagtgaggaaaaatgcaggatcacgttagccaatggtgactggaaacaagacagcctacttcataaaaaccccacagtgacacacacaaaagagcctgaaacgtacaaaaagaaagttgcagaacagacatatttttgcaaacagcttgccaagaggaagtggcagttatataaaaactactgtggtgaaactgtggctctttttaaaaacaaagtattttcagcccttttcattgctatcttactctttgacatcggagggtttccaccttcattacttatggaagatgtagcaagaagttcaaacgtgaaagaagaagagtttattatgccacttatttccattataggcattatgacagcagttggtaaactgcttttagggatactggctgacttcaagtggattaataccttgtatctttatgttgctaccttaatcatcatgggcctagccttgtgtgcaattccatttgccaaaagctatgtcacattggcgttgctttctgggatcctagggtttcttactggtaattggtccatctttccatatgtgaccacgaagactgtgggaattgaaaaattagcccatgcctatgggatattaatgttctttgctggacttggaaatagcctaggaccacccatcgttggtaagatatttatcttaaaatcatcccattttactgttcttccttgtcatatctccagatatagaggtccagattgtaatagtagcacagatttgtacaaaagaaatctgcatggaacatctcatggtaatgatttattcaagactgctttgatataattgagaaagcgaatatgcatgctctgggatttgtgttcgctctttatttgggagaaactcaaaatgcctgcttttttttttttttttttttgagacggagttttgcactgtcgcccaggctggagtgcaattgcgtgatctcggctcaccgcaagctccgccttctgggttcatgccattctcctgcctcagcctcctgagtagctgggactaaaggcacctgccaccacgcccggctaatgttttttgttgttgttgtttagtagagacggggtttcaccgtgttagccaggatggtctccatctcctgacctcgtgatccgcccgcctcggcctcccaaagtgctgggtttacaggcgtgagccaccgcacccagcctgcctgcttattcttatccaaatatttgagagattctcttcttctaactcccagtaaaccacgctggaagtagtggagtaatatatatactaattataactatatataaaactgatataattagggtatgggatggatgttcatactatttccatgaaacttactt

SEQ ID NO: 5053 - DNA, 6000 bp, Homo sapiens
gccctaagcaactattaatctactttctgtctacataaacttacctattttggatatatataaatggaatcatatgttgtattttcttccactggtttctttcacttagaataatatttcaagattcatctatattatagcatgtatcagtacttcattcttttctattgccaaagtaagaaggatttttttaactttttttttttttttagacaagatctggctgtgtcacccaggctagagtgcagtggtgtgactggctcacttcagcctctgcctcctggactcaagtgatcctcccaccttagcctcccaagtagctgggactacaggtgctcaccaccacgcttggctaatttttctattttttgttgagacagggttttgccatgttgcctgggctggtgtcgaactcatgagctcaagtgatctggcagcctcagcctctccaattactgggattacaggtgtaagccactgcacccggctgatgtttacattttcaaaagatttaaaaataaaataagtgataaagatcaaatgtgtccagcaaggctgaaaatatatatactatgcagctcttcacagaaaaagtttattgacccctgaaataaatgaaaaactggccatgtgttgaaaatgggtgaagatgagtgatgcatacatggggcttcattatcctatttgctctacttttgtatatgtttatttttccataataaaatttttttttaatttttctgaacctgagatgatggaaatgtctgtgcttcccattaaaacaggttcagagtacaacagaaactttgagggaaaaatagataatgttcaaaagtaaaaaagataaaattcctcatgatgaagtctctgaagtcatctttaagttaatggtttaaaaaaattaaaattttgctaagttcaataaaaaatcaagtcattgagtaagtactattgtcgacacttgacttaaaatgtgacccacttggggagagggagagactagatcataattttccagtagggtttctaattggttgtttctgaaagcattatgagggatgcttagagatcacaagggcttctgagataagcacacaggattaattttcagactcttaaaagggtagccaacggtcattcactatctgatttctcttacctcctctttctgcattcacagctgattccactgaatcaacacaaacttccatgagaaatccatttgctgctcctaaaatacatggagaatggtaagagttcataaaggttctatccatccagaccaatttaccacaaagggtttacattctgctgccaaaatgcaaatgtccaataacaggtaatagataagtacactagggcccatgaatgcaataaaatatcacattaattattgaattgatgcctatagactgaaataggtacacagacagatgtataaaaaattatactgaggaaaatgtctatcgaatgccaaattaatcttcctaaaacatagacctcatcatcacattccagctgagattcttacaatgcttctcaatgcctgcagaatatatttaaacttctttataaggaatataggtttaaaagcaggacagacttcaaatccatgtcccaccaactatttagtgtgagatcctagattagttacttaagttttctataaaacaaggtagattttagtatgtacctcagagtagtgaggattaaattagataattcatgtaaagtatatagtctcaagaatcaaaaagtattagttatctggccgggtgtgatggctcatgcctgtaatcccagcactttgggaggccgaggtgggtggatcacatgaggtcaggaattggagatcagcctggccaacatggtaaaaccctgtctctactaaaaatacaaaaattagccaggcatcgtggcatgcgcctgtaatcccagctacttgggaggctgaggcatgagaatcgcttgaacccaggaggtggaggttgcagtgagccaagattgtgctactgcactccagcctgggtgacagagtgatactctgtctcattccttcttatgcttccagatctctccagtccctaccgctggctccccaatgccttctcctcaacccagagttccttctggcttcatctctgaataaaatttttcaaggaacatttccatgattttttctgtctcccaaagtagaaaattttatgtccctcttttgaactcatttaactcttcatgagttatgaaaccccaattgttccttcttaaaatatgaattactttctaccttttattatttatgcagataaatatctgatcacttctacttgacttagagttcctaagtttgtttttttttttttttttttttttttgatacagagtcttgctctgtcgcccaggctagagtgcagtggcatgatctcggctcactgcaacctccgcctcccaggctcaagcaattcttgtgcctcagcctcctcagtagctgggactacaggtatgtgccacaacacctggttaattttgtattttttgtagagatggggtttcgccatgttgcccatgctggtctcaaactcctgcactcaagcgatctgccagcctcggcctcccaaagtgctgggattataggcatgagccaccacgtctggcctcctaagtaaggtctttatgtgagaaatctttatcatcacccacaccaagcacagtatctaccatggtacacaataatcaaatatttactaaaagctgaataattacaacaaaattaatgtatttatattacaaagtgtgatgtaaacagagttttgagtttttttccgggagcacataatttaaaaaaatgaacgaaacaatgcacacttcatgtaatgacacttactagaatgttcctcacatactggtaatggtcacttctggtggggtgtgatttgaaattatttttattttcttctttttacttttctttattgctttattttttctacccaatattgcttttataatttaaaaaagcaatttttactttgaaaaacaaataaaacaaaaacctatcatctgctaacatcaaactgcaattgccttacttatttaagactatcagtccctgtccggcgcggtggctcacgcctgtaatcccagtactttgggaggccaaggtgggcggatctgaggtcaggattttgagaccagcctggccaacatggcgaaaccccatctctactaaaagtatataaattagccgggcgtggtggcgggcgcctgtaatcccagctattcaggaggctgaggcaggagaattgcttgaacctgggaggtggaggttgcagtgagctgagatcaggccactgcactccagcctgggcgacaagagccagactccgtctcaaaaaaaaaaaaaaaaaaaaaatactatcagtcccaaactgtgaaagggttaagtgtcaatctatgctcttaaccaacagctctgcattattaactccatgagtttcctggtagctaccagaccagctgtcagatcagtggcactggccgatgctgatgctgccgggggactatttgcctcacacaagaaaggaccctaggcaggagaagatggagagatgtataaaaaaggctatgacagaaggcagagcaaggcagttgtcccaagcaacaaagttataggatcaaaggagaagcagcagcagttctcaaagtgtagtagtccagagagctttgggagcctctgagacttttcagagtctgcagggctacaaccgttttcttaataattctaacactttatttgactttttcactttaattctctcacaagtgagaggcgttttcttttttgaggcagagtctcactctgtcacccaagatggagtgcattggcgcgatctcggcttactgcaacctccgtgaagaggcgttttcaagaggctacttgacatgttagactgaatgaagcagcgggcatgagaatccagctgtcttccattaagatatactgaagaaacttgcaaaaatatatttccactcttttgctttttttgttgttgttgtttaggaatatttctttttcaaaaaaatattatgtcaatatgtaatgggtttactatggttattttctaatcaatattttaaaattttgttttaattttatttttatttttttgagacggagtctcgctctgtcgcccagggtggagtgcagtggcgcgatctcggcttactgcaacctccgcctcccgggttcaagtgattctcctgcctcagcctcccgagtaactggtattacaggcgcctgccaccatgcccagctaatttttgtatttttagtagagacggggtttcaccatgctggccaggctggtctcgaactcctgagctcagatgatctgtccccctcggcctcccaaaaaaaaatttgttttaatttctaatacagtcaaaatagatagatgtaatccacataaagaaaaaatctttgaggattcttgataacttttaggaaggttcctcttcacggaggaagagggacttgccaaattctctggcacctgccatgccatgctaccctggcactcaggaagaactcgggtcttggagcagccacaagctcggccacttggtagctgcgtgactttggggaccaagccccgtccccgccgtggcagctacaggtaactgcaggttaggaactgggctccgcgctcgacaattaactatcccagcggagtactggctgctggtgcgggcggtactggcatcctcgtgtggcgacggaaaaaacgtgaagctgaagttaaccaacttgcacaaggtcgcagggccgttatgaggggaccccgggactcgaaccttggctccacagctgagccattctcgctacctgcccctcgtcacgccctccgtttccacacctttaacgcctcaaagatagaaggtgccgcccaaggggctggaaggagctgaggaaacgactccagaagaaatcaccactgactacgactcccgccggcccgccccggggagccttcggccgaccgtcccctcccccgccaccttccgcaccggccttcccggacggtatccgcgctcgttttcgctcagaggaggccccctgccttttcatgctccacgcgttcctccctcgtgcgcctgcagtttccacttggaatttgggctccggcgcgcaccagctaagaagcgcgtcaacagctgcgcgcgcccgtgcgcgcgtccccgacacctacgccccagcagcccccgcgaaagcggagtcgcaacgcaggcgcacttctgttcgctccggtccccagagaaggcggggctcccgctgcccgacccggaagtgcttctcttttccttggcggaggagggagaccacagagccctgggttgtggaagaggtggctgttccctgtcatcagtatgcagcgattgctctttccgccgttgagggccttgaaggggaggcagtatctgccgctcctggctcctagggcagcgcctagagcacaggtaccgcactgcagcggactccgagtcgcgggagcggggatggagtgaaagggccgggataaagataatgtagagccccacatcacgtttccggagctccttacagtgcactcacaacgcataggttcagatcagagcccctaggttcagatctggaacattgacctgctgtgtggtattggccaagttaattaaactttctgttcttcagtttccttatctgtaaaatggggataacaatacctactttaaggtttgttatgaggattacattctttaatatacatcaggcctttagcacatggtaaaagctgagtaatttttacccatatagtttatttttgcttaaaaagttccaagtagtcagatgaggaagtattactgcatcctacagagaaggaaattgaggcttaaagttacttttctaaaggtgactcagttaatcagaaataggaaaccgagcatggatctttggactcacag

SEQ ID NO: 5054 - DNA, 6000 bp, Homo sapiens
ttggcctcctaaagtgctaggattataggtgtaagccactgcacctggccagcagcagctatttaaggctgagccttgttctccctaactattcccactatcccaagggaccacaagcagcgattattagtgaatagaggagaaggtgaagtgcaagagaagatatcaactgcacccttctccccactgcaggctcctgagccccagctggatgaaaacagacattttgaattagaagaaagtttatagttttaacaatagactgggctagaatagataatatcagatggtgactggaaatcctacgatctgtttgaaattccatccagagatacggtggaaggtggggaacgatctacaaaacaaatttacttggagaggggtgagaaagaaagaataaagttactttctgctcctcttcatagaaagtctagcttgtggccaggcacagtggctcatgcctataatcccagcactttgggaggcgaaggcaggcggatcacctgagaggtcaggagttcgggactagcatggccaacatggtgaaaccccgtctctaataaaaatacaaaaattagccaggcatggtggtgggcttctgtaatcctagctactggggaagctgaggcagaatcgttttaacccaggacgtagagattgcagggagccaagattgcgccactgcactccagcctgggtgacaaagcaagattccctctcaaaaaaaaaaaaaaaaaaagtctagcttatttgtttaataaacaagaaaacagagtaagatcattctatttaacatacttagcagtctctgacatagcagtacccaatcaatattatttttattattgaaacatagtaatagcaatacagtatcttattttccacttttagaatagaaaaataatagaggtgatagtatatcttgaccagaaattaattcaattaattattatcttgaccagaaattaattggaaagaagcaatttggcatttccataaccatgtttttcattgtaccatactttctgtatatgcttatataaagtacaaacataattttttcttgtattctcacatagcattaacctatactagcatctcctgagtggggtctggtttgggggcttttaactagcattgcatcctagaattatctgtggagcttttaaaaagagcacattcctatctctgaggcaagacttacccaatcagaatctctgggtctggaaaccagacgtgtgtattttgaaaaagctcctcaggtggctcaattgtaaaacgaggattgtgagtcatcggcctaggtcagtcacttagctcttttgtaaactagaagccaggctcctattcctagtcttttgatctagttggggctacccagaaaatttgttaaaaaataacaaaagtcatctgaattagataactaagtaattggttaaccaacataaacaaaatgaatgcattcatcaaacatttactgggtactgcctctgctccaggctcagtatcaggcatggggattccgctctaccctgagaatattctcagcctacaagtgtgtgaactatttaaatgtggctgctctcaatttatattagctactaagagaaaggcaacaaacacctacttcaaagacttacttgcacaatactatggcatacaaggactctcccacatgaatcagccaggcaagccaatacctgaaaccaaaaaaaaggttaatcttttttaaggtgatagttatctgctgatgaaatctaacacagcaatctcaaaaagaaaagtgccttaaggtgaaccgacactactcttagataccaaaaggcagctgcaggccttccaggtttcccatgagaccagagctccagtgtccacagtccacttgtgcagctctccttacccattgcacaggagggtgtgatggtggtccaccaagtactgagtgaaggggcccaggggcccaaggttctgataagggatactctgaggccagaagacaacccactgaaagagaagcagagacacagaatacctattaggtcacttaaaacctgttttttgtttttgtttttgagaaaggctgtgaaacagtaaaaaaattaccacagaccgaagaaactctgaacagtcatttgggtctccattcttggcttctattttctttctttcttttttttttgacagggtctcactccgctgctggggctggagtgcagtggcatgatcatgactcactgcagcctccaccatctgggctcaatccatcctcccacctcagcctcccaagtagatgggactacacgtgtgtgccaccatgcccagctacttttaaaaattgtatatagagatggggtctcactatgttgcccaggatggtttccaactccagggctcaagcaattctccaatcttggcctcccaaagtgctgggattacaggcatgacctactgtgccaggatgacttctattttctaaaagcaactctactgggagacttatgctgaggaaagtatgtggttatcagactcagtgcccacggtggatgactcttaaagtctttttttcttccttttcttcttttgttttctttgtagagaagggatctcgctttgtcacccaggcttgagtgcagtggcctgatcacggctcactgcacccttgacttcccgggctcaagcgatcctcccaactcagcttccccaagtagctggaatacaggcatggctaccacgactgactaatttatttatttatttatttattttagatggagtttcactctgtcgcttaggctggagtgcagtggcacgatctcggctctctgtaacctccgcctcgcggattcaaacgactctcctgtctcagcctccagagtagctgggactacaggtgcatgccaccacgcccagctaatttttgtatttttaatacagacagagtttcaccatgttggccaggctgatctccaactcctgacatcaggtgatccgcccttctcggcttctcaaagtgctgggattacaggtgtgagccactgcccatggctaattttgtgtgtgtgtgtgtgtgtagagatgaggttttgccatgttgcccaggatggtctcgaactcctgggctcaagcgatttgcccgcctcggcctcccaaagtgctgggattacaggggtgaaccaccatgcctggctgactcctattaatacattccaccaaaaccattattttataaaagatattagcaaattttgagtttatgtgctttggctagtttctttactgcagaaactggctccagccaaacctctgtttaatttagaattcctttctcggctttccctttttgtacggctaaaactgagaatgatccactgcatagagatggaaaataagtgagataaggttgtgacattttaatagcaactgcttaatcacataaatttttcgtaatcttaactttcagcctctgtattgtaacttctgtcagctaagacttttctgagaataactcaacagtttcaaaatgtattgtcccattcaaatctttgtcaagagcagtactacctctctcacgatgttgtttcacatctgaaagttaaataatgcacaaatatcactgcatcctcccaaaccaaagggaaaggggagcatctgccagctccacaagatcccaatttgaagtccccaaagctttcctccaactatattctaactagtcacagacactaaatcgtagaacagaaatgcacctttgaaaattttcagttcaacacctccattgtacatatggggaaatcaggacataggttgtcagatttgacaccaacaaacaacactgtggacaagacaaatctccaatctccaggatctattggtatacccaaatagcttcgccttccttcaaaattttaccaccttatcacttgacgttaggagttcgaggccagcctcaccaatacccatgtctactaaaaacacaaaaaaatagctgggcatagtgtaatcccagctacaggtaaagacatgagaatcgcttgaacctgggaagcagaggttgcagtgagccgagatcgccccactgcactccagcctgggtgacagagcgagactccgtctcaaaaaaacacaaaactaccaccttagcccccaacctacttttccacgcatctttctcgttatcctttaaacagattatttctcagccaaacaaacgtcgctctttttctaggtacagctttcttcttgcttccacacctatgtcagaacagttatagcctctttatcctcccttaccacttaaatcctacccatcctttagatttatccccgttttccaaacaattcctattggctcaaacattctgcttcggaagccctattctgacttggcaggcctatggcagtctgttaacttgactttccgcttcgtgagaggcttaggctcggataacccgttagtaaccatgcagaggtgaggacccaaagacaggaacactagaaagcagaaactatcctaagagcccaccgaatttccgcttacatgagtaaccgagacaaccgtcagatgcgcgtgcgcacaggccccgttcccagagctcccctcgccctacgagggcccggcgggccaaaacagaggcccgccccgccccaccccacgcctcaccgcgaagtagcccagccccaggactgtgaccagagagggcaagggtcttgctggacggaaataggcggtagccgcattgctggcctccgacttcaccatcctcttgaaaaacccagacacagagttggctgggagctccccagccgtccccgcccccatataagaaaagcctggctagccggtttctcagggccctgggcgcccgcccaagaccctggcggaccagtatgcttgctctcattgcggagtctggtcccctcccctccgctcctagcgcgcgggagtcgggattgtgcttgcacgacttcccccggcccgcggcctgtgagcccaggtcctggggtgaaccgagcgctcgctcgttcgtcagaccgtagcgctccagcggctgtccttactgtgtagtagccaaagctgagggtgatgactgtgaaccagaacagactgcctcgctgaaagtaggtcgcgccggctgccgtagccatggctgcaacacctccccgggagcgcgcttcaggacaccgtcgagcgcgagcgcggaggcagggccggggccggcccgcgctccctcgccatccccgcagggagaagatggtgctggttgggaagtccctgagagcgagtctccctgtctggccccagtacaggggccttggaatcacacctgggctcaggtctggagggctggtcatcatcttgtaggggagacactcctgtcacttttctgggtttaagataaagatgttcgggctggcgcggtggcgtgtccctgtaatctcagcacgttgggaggctgaggtagaaagatcccttgagcccaggagtttgagaccagcccgggtaacatagctagactctgtctcgaatgaatgaatgaatgaatgaggtgttggaataaattccagcaatttgggaggccgagtcgggcagatcacttgaggtcaggagtttgagaccagcgtggtcaacatggtgaaaccccgtctgtactaaaaatacaaaaaatttgctgggcgcggtggtgcctgcctgtagtcccagcaactccagaggctgagacaagactctcttgaacctgagaggtgcaggttgcagtgggcccagatcacgccactgcactccagcctgggcaacacagcaagaccctgtctcaaaaaaaaaaaaaaaagatggtgttttactaagagtctaatttttgaagttctctgtgctgtgcaccttgagaaataatgctgtcctcattagttaagatgtttggaactatacagcaccatggttatgagcagggactgtgaaacaggctgcctggatttaagtcctggctctgtctcggctatttg

SEQ ID NO: 5055 - DNA, 6000 bp, Homo sapiens
aatgaatcatatgatgtctactacttgaaaacaactccattttatttactcagtcctccgctgtttaaaatttatgttgattttgacaaatctcatgttttatacactcacgttttcaccacttttttgctatcagtagaggcaaagaagcagtaacaactagataaaatggataggaaataaaaaataaaaggtttgggaaaagacccctaaagttctgaaaaatggcttaaaaatacttaaagacacatgaaaagttgtgaaaacaaccccaagtgcacttacaccttacataaaaaaagcgaactgaaattggtggctagggatatttgtcttcaaacaaagcagtcttctcagttgcttctggccatcgcccgcaatctttcagactgaaatgctctctaagaagtcagtgaccttctacccaacataatggacgcccctgcacatcaggccttttaaataagaacagactggcaacaacttgttgtgcatagtagcacaagaaggagactttgcaccttagtgatattgatttgtccaacccatgaacatggtatatctctccattgattttgttccttaatttctctaagcaatgctttgtagttttccatatatgaaagatgtctttcacatcttttgttagatttatccgtaagtatctaatgctttttaatgttatttcaaatgactttttaaagttttttaatttctaattgttcattgtgaatgtatagaaatagaactgatttttgtgtagtggtgttttgtatactgcaaccaacttagacacatatggctgactgatgttcaaaaggtataagagaaggtcagtgaagataatcttttcaataaagggtgctggaataattggatatgcatatatagaaacaaacaaaatcccaaaacaacctttaattcatgcctcacattataaacaaaaattaattcaaaatggatcacagccataaatgtaaaccctaaagctataaaacttctagaggaacacatagaagtaaacctttgtaaccttaggctaggcaaatatttcttagatatgacaccaaaagcccaaaacacaacataacaaattaataaattagacttcataaaaattaaaaacttctgcttttcaaaagacactgctaagagaaaggataagccacagaatctgagaaaatatttgcaaatcatatacctgattagggcctcgtatccagaatatataaagaactctcaaaattcagtaatgatacaattcaattttttatacataagacagagtcagaaaaaaaaaaaaagacagtctcgctctgtgtcccaggctggagtgcagtggcgcgatctctgctcaccgcaacctctgcctccagggttcaagcgattctcctgcctcagcctcctgagtagctgacattacaggcatgggctaccacagctggctaatttttgtatttttagtagagaaggggttttaccatgttgacctggctggtctcgaactcctggcctcaagtgatctgcccgcgttggcctcccaaagtgctgggattacaggtgtgagccaccacacccagctgatacaattcaatttttaagagagcaaaaaaaatataaacagatactaccagagaagatatatacatggcaaataagcacataacatcaccagctgtagaaaaatgcaaattaaaactacaaggggagaccccctacatacctagtagaatgggtaaaattaaaaagattcatcataccaagagctgacaagggtgtgaaggaactggaacttccctacactgctgtgggaatgtaaaatcgtataacaactttgggaaatggtttagcagtttctttaaaaattaaacttctgaggccaggtgcaatggctcacacctgtaatcccagcactttgggaggccaaagcaggcagatcccctgaggtcaggagttcgagaccagcctggccaacatggtgaaaccccatctctactaaaaatacaaaaattagccgggcgtagtggtgcaagcctgtagtcccagctactcaggaggctgaggcaggagaatcgcttgaacccaggaggcagaggtttcagtgagcagagatggagccactgcacttcagtctgggcaacagagtgagattctgtctcaaaataagtaaattaaaaataaataaaaattaaaaataaataaataaaaattaaaaattaaacacctgagaggtcaaggctgcagtgagctataatcatgctactgcactccagcttgggaaacaatggtgtgacattgtttcaaaaaaaaaaaaattaaacatacacctgccatataacacagccactctactcccaaccattctctacccatgagaaatgaaaacatgtgtccatacagaaacctgtatgtcagtgttcatagcagctttctttgtaatagtcccaaactggaaacaacccaaatgtcccttaacaagtgaatggctaaacaaatgatgggctagccatgggtagaatactactactcaatggtagaaactaatgaactacttatacaaattacaacatggataaattctcaggataattactgtctgtgaaaaaagccaaacaagaaagagttcctaccgtgtaattctatttataaaaaattttagaaagtgcatcaaattgcctgggagatgggcgaggtgggagatgaggactgtgcagggcatgaggaagtctttgggagtgatagttgtgttcactcttggtggtggcagtggtttcatgagtatgtatgcatttacctccaaacttatcaaagtgtgcaacttcaatatatgcagtttattgtcggtcaattatacctcaataaggctgttaaagggaaaaaaaacaacggctgggcaagctggctcacgcctgtaatcccagcactttggaaggccgaggcgggcagatcacaaggtcaggagtgatcaccatgttggatcagcctgaccaacatgatgaaaccccgtctctattaaaaacacaaaagttactgggcgtggtggcgatcgcctgtaatcccagctactcaggaggctgaggcagcagaatcgcttgaacccaggaggcggaggttgcagtgagctgagatcgcgctactgcaccccagccggggtgacagagtgagactccgtctcaaaaaagaaaacaagaaagaaagaaaaagaaaaagaaaaaacattgagagctttgggaagggaaggtagcaacatctttctaaggtcaaagggcaaggctgtgcagctgatgagatcagagatctcacagtggtgctcccctatccactcagtcttcaaggaagacacctcctctctgctgggctttgactaaggctgcatttcactttcatattgtgtaatccagctgccccagttgccagctatggggtcctgtgacactgctagccaactgggaggaaccaaccggtcaccaactaactctgcttctcagatgtggggggaaatccaagcatcagagtctcatgaaaacgaaacttcaagaagcctcgcagagctggggtgggggtggcagagggtgggggggcgttcaggccacaccaggcagcagcaactgtgcgtggaatggctttggccagggcctgggcagactggcccgactggatgtaaattattcagggtctcgcttaaaaacacacacagatcatggcgttactaattcctatagagagtccatggatggccttcagtggggctttgaccccaaaatcatatgcacattttgtaactatgttcattcatgcatttttctgggggccgggggttcatagctttcatcagaccctccaagagctccctgactataaaaagataaagaagcgctgacaaggatagagctagaccctgctactgttttcctccttcctctggctgccgggacaaaacccctaggaatcgctcattccgtcctccctgccgagatcagagctccgcgacccgctttcttctcgaatacaccaagcgatcacagatctcttccccctttttctgcgagtgtagactccaggctggcccccactccccacccccatccggtcccgaccgcctctgctggtttcctgatcgcttaagaattggaagttgtttccaggtccccaggtgtgcaacttgcccgacgcgtttccccctgggacacagctcctccccaccctcccagctcccactgacataatttacttttgcctgggagtcgggaggagtagtttctcccggacccctccgaggaccgcgtgctatgcaacacccgccctgcagtccaggcgcctgggagaagcgcactcgcccgtgtctccaaactgctggacgccgccggctccgcgctcccgtggccaaaacgggcttctcagaactgctcctgacctcggcctcggagaccccagccaggccgcccgctcccttacgtgggtgacccgggcgcagcggcggcgctctccctgcgaccccggctcccggcacgtgtccctcctgcccggcgccgcgtcccctccccggcctgggcctgcgcgcaccgcgctcccgagggcaccgacgcccccgcacggcccggggagatggggcgcccggttccctccagctccacgtcccggcccccttccaagtcccgcccgggcgcccctgctcccagctccctaccccgcgtcgccggcggccggagcagcagcagcagtagcagcgccgggagaccgagggtccggcagccgcgcgcccgccgcggggccatggcggcagctccacaggacaccgctggactccccgggcgagcgctgcccaggccggggggaggtggcgagcgctgctctgggacctgccgccccgccagtcgcattcgctttcgcttttgctttggcccccgagggctcggagaggtgcaaagcggtgacagatccgtgactcagcgtccccacccctgctggggaaggagccccgccggccgccgcggcaccgcacagccacccctgtccccgggacgcatgggccgtgcccggtggggacccaggaccttacccacgcaagcccgggagcctcccggtcctccgcgctcgtcgtgctctgggacctccagtgtgcactcggtccggtgtccccactgcgaagagagtgggcaaagtcatcggagagcagactctctccagccctctctgcggctcggatccacttgacctcgcccggcgctggtcgcctccagctgctccgccttcggctttcctggtctccctccgcggccctgcgctcggttgtgagcggccggcctgggtgagtgcccgcggaggtgtcgccgcggtgcggaggcgcgggcacctgcctggtgcgctctggcccgggcggagcgcagcccccgccacctgctggctcccgcggcccccggcgcccgctggggccccagctccgccacttcgccgaattcctgctgcagctttgctcccctagaaaatgcctcatcttagaaggagagggggcggaggggggagaagggggagaggagccacagtgcttcacctctgagcctcgcttccttaggttcttccaggctgccatcctcctctttggctggtgggtttttttctttcttggggtctcaagtgaagcctgagaaccgggtctgtaagctcccaagtgcagattctcaggtctagcggtgacattggacaggacgagacatctccaagcctcggtcattgcctcttaaaatctcacaacgtgtttatgaggcttttgtgacatacttgcaaattctctttgaaaacgaaataatctgtacaataatcccccaagacacaggtttacctttataacaaacctgcacttataaccctgaacttaaaagttaaataaaagaatttagggccgagcgcggtggccactcctgaaatccaagcactttcggaggccaaggcaggtggatcgcctgaagtcaggaattcgagactagcctggccaacatggtg

SEQ ID NO: 5056 - DNA, 6000 bp, Homo sapiens
gatgactcagaggaactgtaacctagaaaaagataaaagttaaaaactaagtagtttttttttaaataaacagaacaatctcctttttttgtcaggatttgttaagagttaaaggtacattatatatcaactctgtatactaaaaactgtaagtactcagatttactgctggtgagacgaaaactggtatgttctttcaggatattattctgaatatgtaaatcaaaagtatcaaaaatacatacatttcttgtttgtagcaatccaccttctaggaatttattataaggaaataatctgacaagtacttgcacatgcatagagaacaactctcatcgaaacatttaaaaaatagtagaaagctggaaacatccagcattaggggagcggcaaaacaaatgataccactggtcgagtgcagtggctcacgcctgtaaccccagcactttgggagaccgaggtgggtggatcacttgaggtcaggagttcaagaccagcctgaccaacacagtgaaaccccatctctaccaaaaaatacaacaattagatgggtgtgatggtgtgcgcctgtagtctcagctacttgggaggctgtggtagaagaattgcttgatctcaggaggcggaagttgcagtgagctgtgatcatgccactgcactctagccagggcaacagggtgagacctgtctctcaaaaaaaaaaaaaaaaaaaaaaaaagaaactaccacagaatgaaatacatccaacatttaaaaaaaaaaaaatagtaagtaggccgggaatggtggctcatgcctgtaatcccagcactttgggaggccaaggcaggtagatacctgaggtcaggagttcgagaccagcctggccaacgtggtgaaatcccatcgccactaaaaatacaaaaaaattggccaggaatggtgttgggcgcctgtaatcccagatacttgggaggcagaggcaggagaatcactcgaacctgggaggcggaggttgcagtgagccaagatcatgccattgcattccagcctgggtgacaagagcaaaactccatctcaaaataaataaataaataaaaatgaaaacaaaaaaaacacttgagcccaggaagttgaagctgcagtgagctatcatgccaccacactccagcctgaatgacatggcaagaccctgtctcaagaaaaaaaaaaatttacttaataaatatttgttgagtaaatgaatacattaaatgggttcttattatataccaggtttagtactacaggctttacttctatcatcccatttaatcctcaaacagctataataatgagtaacaattatacttcttgttacagttctgtcagagacttttgaaccagagtgactccatctggagtaggggcaaaatgagggtaaatgaggctgagacctactgggttgcattcccaggaggttaggcattctaagttacaggatgagatagggtgtgggcacaagatacaggtcataaagaccgtgatgataaaacaggttgtagtaaggaagccagccaaatcccaccaaaactaagatggagaggagagtgacttctgctagtcctcactgctcattatgtgctaattataatgcattagcatgctaaaagacactcccaccagaccatgacagtttaaaaatgccatggcaacatcaagaagttaccctatgtggtctaaaaaggggaggaaccttaggggtccccctttccctgaaaacttatgaataatcacacattgtttagcataaaatcaagaaataactaactgtaggtatccttcgtggacaagcccaagcagctcctctgcctatggagtaccccattctttactcctttaccttcttaataaacttgctttcactttatagactctctcgcctttttttttttttttttttttttgagatggaatctcgctttgtcgcccagactggagtgcagtgatgcaatctcggctcactgcaaccaccgcctcctgggttcgagtgattctcctgcctcagcctcccgagtagctgggactacaggcgcaggccaccacacccagctatttttttgtatttttagtagagatggagtttcaccatgttagccaggatcttgatctcctgacctcgtgatccgctcgcctctgcctcccaaagtgctgggattacatgcgtgagtccccgcgcctggcgactctctcgaattcttgtgcgagatccaacaaccctctcttggggtctggatcagggcccacttccagtaaaaattccagtgtttatctccttcaaaactcaagtttgagttgagaacaatggcaaacttagttgccactgtaatcctgttaagaggtgggacctttaagaggcatttagttcaggagggctctgccctcatcaatggactaacgccattattgtgggtacagaccatttaatagatgaagacaacaaagatttagaatctgactcaaaattccagacttctcatcccatggatattgatacacaaataaattcgtgacatactaaggaataaagctgaccgtaaaactaccttaagtatgcatacccgtgggggcgcggtggctcacgcctgtaatcccagcactctgggaggccgaggcggacggatcacaaggtcaggggatggagaccatcctggctaacacggtgaaaccccatctctactaaaaatacaaaaaattagccgggcgtggtggcgggcgcctgtggtcccagctacttgggaggctgaggcaggagaatggcgtgaacctgggaggcggagcttgcagtgagcggagatcgcgccactgcactccagcctgggcgacagagcgagactccatcttaaaaaaaaaaaaaaattaaaataaaaaaaagtatgcatacccgtgtttgtttatagaaaaaaatgtgtgaaagaatttagtctaagatacgtatccctgagtaatgagattatgggcgatcttatttatactttcagcatttttagcaaaaaaacatggatttgttttaaggctagtcaagtgaagcaatgtatcatttttagagtcagaaagaaacagtaagttccttacagcctgggggcagtaaaaagaaaaaaaaataaacagtaacttcttttgaaactttaaaaataatcaaatcatttcaagatacatattttctacctctttgaaaagatttatttgaattagttatatctcttttatttgaattagttatatctcttttctttcacaaaaggatttagagttgagctcttctcaatgaaaaagttcattttctgtgtcttcctttttaccatttaatttcaagtgtattcaaccaattaagcaacaaggaattccaaatgtgttaccatccttcaaagcaagaaatgcctgagagtcctcactatatttgagccctgttaagactgcctagggtacataaaaatccctttatcatctctaccaacatcacatactactaactgtccattcagttgatggtaaattctcctaaaatcaggcctcttgatgtgaactaaggcaaagagttgagtttcaaaaacttcaataccatattcaataggccatgtcagacttctttttcaaacaattactaggacttctccagacactgtcatcttggtaaatagcaccttcaatgcattcatctgatcaaacccagaaacacctctccccatcatctctctgatctctcatgcaattccactttcttcaaaatatatctcattctcttctttccataaccactgcaacagctttaattggggggtgggtgggtatttttagctgataacatcttccactcttgccctctcctattctccatatagcaaaagccagtcatctcttaaaaatgaaaatctaatcatgttttaaaactttcaatggttcccaatacacttaaaatgaaatcagccataatatatcctttactccctgtatgatctgcctcaagtcttttctccaacctcttctgtcactaccccctttaactactatgttctagccacactagccttatttttgttccttcaacctgctaaaccctttcctaactcaggacctccaggtatttttctgtatgcctgtgatacctgttcactcttcaccttgctaagtcctactcatatttacttcatatcaatattaagagaagattccacatttgctttgctcacctggtacataactgatgcccaataacaagcagctgcttcagtttgttagccagtactagcacaaaaaattaaaaattcttaaaatgagggggagtaaaagttacacaaaggaacacaatcatatgcttaaatcaagaacctaagagtgtcgattttcttaaaaattatgttttaaaaaaactcaatgttttaaaaactatttctttgcaaaactgtaggaactctcaaaaaatctattaaaatgttaccatcaaaaaaagagactggaatgaagcaagaataaaacattgtcacaagtgattgcccaagagcgtaatgaaaacccttgaaatcatttttctcttcactaccttttgttttacaaaacgatgaggatgaggctgaatcaaaattttaactgcaaacagtttacgactcggaaatacacattttagttacttctggtcaaaatgagaaaaaaacttgcatggctggccatccgaaatattataccatgtttgggttaaatttaaattccatttaaaaggaaataaagagcaggggataggggctgtgaacactaaagccactggaaagtcggaaaaaagggaacattacctgctccctttaatgtatggtacagacattttcccaccccagaacgccggacactgaacaatgccggacggattctctagcagaaattccacgcaatcagttcgataagccagggtctctctctatcactgagctcacatcccgcctctgccctcaacagcttcatcgtcagcactgaagtctccggcccactctcagcgtcgtcccctgatccactcctcaatcctgggattcgcattgagtacatcacttcatttctagagtcccttctgagaaatcgcttccacgagcgcaatttgcaaacagccacgggcagggcgggaggaaaaaaaatgggctgaatgcctggcttacctggggttgcaccgtgctcgacaaggaaaacatctccggcgggccctcagcgacctcacccgcctgccgaaactgtgcccctctgtccacggcccggcggggaggcgctgagcccttcttttttcctttttctccgacccgttgcccctcactcctcccagaaacggaaaatggcctccccttcctacagctactgcaacgacagacaatccgccccggaaggcgaggcgctaactcaacagtacttccggggcaagtgagcgcccacaaggccaagtgcctgcgcgttctttcccgcggaagtagttgacatttacaaggagcagcgcccccaaaggtctttagctgttttttaaggggagaacagcctttaccctctttggactttttcttcgttttttttttttttggagacggagtttcgttctttcgcccaggctggcgtacagtggcgcgatctcggctcactgcaacctctgctccccgggttcaagcgattctcctgcctcagcctcccgagtagctgggattacaggtgcccgccaccacgcccggctgatttcctcttaagactttctacagcttccttatgaaatcttctgactgggccttgagcaataaggtcttttgctacaatttagtgctcttttcctcacactaaatcgaaaactctccctgttggtcctgatctgtttcagtcaggcaaattacatcctgggaaaacgtcagatgacaggggaggccactcgcttcctgctcatccagtttcgacactttctgtgctttcattagcttccagacctcagccctggccctcgctttactgtacagtcagaactgg

SEQ ID NO: 5057 - DNA, 6000 bp, Homo sapiens
caagtaaattatcaagtaaccaagagataaatgggcaaagtatatacatactgtatgcataatatatataattaataaaaatctggacaagcattcaactgtgctgataaataaaatacaaaagaaaacaatgagatatgttatatttattggtaaagtattaaaaaattaaaacttccgattctggctacattgtgataaagaaagtactcacacattgctgctagcatgtaaaatattaatattcttttggaaagcaatctggcaattcatatcaatgatcataaaaatattcagtgtttgactcagaaatattcctcttgtatttttatcccaaagaagtatgtacttcaaaagaagtatatataatgtccattatagcattataattgcatttcagcattacttataataatgaaatattaaaaattatctaaatgtaaaattaaatacaaatagatgaatggctaagaaaataatactggcctgatcaaacagaagatactaaataggatttcagagcaacatagaagatgcttataagatttcagagcaacatagaagatgcttacaatataataaagactagtataacatttttactatactctaattaaaattatgttacctacacacaaagtgattcaaacaaaaaatgtatattgaagatacttcaaacattcagcatgctgggattttaggagagcatgtttttcctttttctgataactactactagcatttactgaatgcttactatgtgccagatgctggactatggacattacatatagtaatgtatttaatcccatggggtaggttatgacgcataaatggcagagttaatagttgaatttggcaatctggcttttatcttgatcttaatcacaatgctagatcataaaaacaaattaagaaaagttagggaaaaaaatggaatttccctcaacttatgagagtcatgtttcaaaaggtgaggtgtggatatcatatatgaatggaacatcattggtaatctcaaactactatcccttaaaaattggtaactattcatgcctgtaatcccagcactttgggaggctgaggtgggaggatcacctgaggtcaggagttcaagtccagcctggccaacgtggtgaaaccccgtctctactaaaaatacaaaaattagctgggcatggtagcacatgtctgtaatcccagccacttgggaggctgaggcaggagaactgcttgaacccgggaggcggaaattgcagtaagccaagattgtgccactgcactctagcctgtacaccaagagaaaaactccgtctcaaaaaaaaaaaaagtaactaatctgtcaatcttgcctgtgatgttaaagtaagctgagattgaacagactgtaagtaatggaaaaatactttcatatcatcacagaatgctaaggctggacaaaagagcttggcggttatcaggtccctttgcctcttctaagaaatagaaccaaggtctataatcagcaagagactgcctcagggtcattcagctggttaaggtaaccaaagccagttctgaattccaagtttcttggtaacaatccagtgatatttcttcctacaccattttactcacttccctcataaaaaagctatctatatatctattacgttttaagtgcacactcaatgccaagcaccacacttccacgttttagttaaactaatttaatctttacaacagtcttttttttttttttgagacagagtcttgctctgttgcccaggctggagtgcagtggcacgatctcagctcactgcaacctttgcctccagggttcaagtgattctagtgcctcagcttccctagtagccaggactacaggtgtgcgccatcacgcccggctaattttctttacaacggtttcatgtggtatttattataatgacttaaaggcaagaagactgaagctcagaagggtttagcatgctgcccaagaccacgcagctgtaaacagtggtatccagggccaggtgcggtggctcatggctgtaattctagcacttagcgaggaaggtgggcggatcacttgaggctaggagttcaaggccagcctggccaatatggtgaaaccctgtctctactaaaaatacaaaaaaattagccgggtgtggtggcgtgcacctatagtcccagctacttgggaggttgagtcatgagacatgagaattgcttgaattgggaggtggaggttgcagtgagttgagatcacaccaccgcactccagcgtgggcgacagagagagactctgtctcaaaaaagaaaaaaaaaagagtggtgtccagggctaatttctctggtgttaaagtgcaggatcttgggacaaagtgcttctacatacagggtgctttggttatggaggttccctgcccatgctaccagaggttcatgttgagagaagggtctgatcttgctcaggaggaggtggttgtctcagtgggttagaaagaatcaagtaaattctacctcctggtgtgaaaaaggtttccaagtttgtgtagatcctgtgattgctctttcatgtttagagagagaaactgagtaaagaggaaaaatagaatgatgtttatattctctacaagtgtgctttctaatgtgctaatgtgttcacggctcacaaaataacagttcctgacacttgagaaatacatttcttttcatgacattttcttcctcacattattgctccctgtcgttagcctcaaaccttacattctgtagctcaagtactttaactggagagaggctttaatcccctctctccagttagggagcctcctaaggagtctccttgtcttccaggtctccattgccaatcatttcacagaagggcagagaatcttccaaagcaaagctgttgctgccttataacatttaccccttctttcttgaaaacaggccccaggctacctttccagcttgctttttccccacccgagtccctcacgcccactgtaactaatctgggcttttcctcctctgggctttggctcacgccggtccctatatctggaatcctttcctttttcatctttggctgcctagattctgtccattcttttttgttttttttctgaggcacagtctcactctgtggcccaggctggagtgcagtggcacgatcacggctcactgcagccttgacctcctgaatttgagcgatcctcctacctcagtccctgagtagctgggattacaggtgtgagctactgtgactagctaattaaatttttctttttttgtggagacaaggtctcgctatgttgcccaggctggtctctaactcttgtgatcaaacaatcttccctccttggcctcccaaagtgctaggattacaggtgtgagccactctactgggcctattctttaaggcccatctgaaacgtaatctcccttgccttttctgattctccaaccagatatcccttccttgtccaacactgggtattagagtgggtgtaacttttacaagagttgacatttggacctgtactgcagatatctgtgcacccaaactgtcaattcccatgatcaactacgtgttactgacctttgtgttataggtagcacctagaacagacattcatattcattggcaattatgaaaaacaaaagtctaaaagtgcttcacaattttctgtcagctgaagaactggtcaaagaaatccagaggcttttttttttttttttgtaaagtacagcttcttaatagggcacttgattttctaggtgtggacacaacagttgatagacatctactaggtcaagaaaggtatgcctgaattagataaatgacagactcaaaagagaggccaggaaaaggctgaaaaacaatctgaaggcatctgtggtatccttttgtttatatcttgatttttagtttcgtacaggggaacacaggaagctctgaggctttaaaactagaaactttgcgatttaatcaaatgaaaaattttgaatgctgtgctgcaaatctgattaaatagggctagtaattcacttccaaacaaaataaaccccaaactcagaaaatctagctccttttaacaaaaagtctggtaatgttatttttcctaaattctaaagcttatcagagaagcctgccccctcacataaacattttttcatatacctttatgaaaccttctgagataacactactacagaggtgaataatgaattcataggccctagctgtaactacgtcattgtttacttggtgactttttttttaatcggggagaggggtaaaatggagatgagagaaaatcagtttaaactgtattcaaatacatttacacgattaacaccaccaactcaaggaatttctttttcttacagacctgtagcacttgttggtaggagaacaatgaaatgaacccataatttgaacaaaggcaacaggcacctgcagcctttcaatcacttagcaaatatttccgccgagacagggccgaattcggggatctgggcgagcagccggtgtcacctttctcggtaagctgcaaatcttgggaaaactaggacccttcccagggatcctgggctgggagcggtctccggtttttagacaaatctctcctcctaccacacgtgaccgaatggcaatcagccgccaagagagacaccgcaacgcatcagccgcgggatacaaaggctcggcactgccgtcgcatcctcgggaggatcgcggagcctcccgcgctcggcgtctgcggagcctgcgcagggagcagctgcgaggcgcgccgctcccgggcccgcagggcggtgccgcgctgcgcggggagcaggagcggggagcgcgcgccgcctgccctgagcgcctgcccacccagcgccgccggagcaggggcgccgcgccgcaccgcacgcagccgagcagcgccacagccgccgccgccgtcgcagccgcagtcgccgcagctaggccctcggccgtcgcagggagctccgcagcgacgtggaccaaggtgaggaagccgagggctcccccagaccctcggcaggcccgaggccgggctaccccgtccccgcccaggcccaggccttccctttcctctcggctccttccccttcccacagctcccctgggcctcgcgccggctgcagggcgcagtgagaggcacttacaccacggctctggagatcatccaggacaccatcttcacgggggcttgggccccacgtccggggcgggtgggcgcagggcgctgcggaccaggccgccaacggcaggccgcgcgcttcgccggctcctcgcgctccccggggccgcgctggcgccctcaggagccgggcccggtgtgtgcgcgcggcggcctgggctgcgcagaggtcggtcccccgcccgtccccgcccgcccccgcccgccggcccggcagcctagtccggacagcaccccgcccctgcgctccgctgataggcggtggcggcggcgcgttggcccgggccagggctggggccaggcggccgggctccagggctgggctggcgggatcctagcccgcgctggacggcctcgctgccgcggccttggcccctgcgctctaaccaaccttaccctccttagctctttgggacgcccacactcgcggcgagagtggggcaggaggctgaggaagggtactggagggtagggattggcagtgcctgtgtgaaaagtgagatattcgcaggaactcggtgtccaataaaactctcgaccaggccctggttttggagagccaagactttgaggtgtgcctggccacatccggtatcctcagtgtttacggaggcccagcaccaaaggcgtccttatattaccacattttaaaggaatcgtcgagaggttcttgcacaggcctccgtgtgtgccacgagtctcgtggtgcaatgcagggagggacagaggaggatttcatgtttgcagtagtgggtgcagtgataccactgttctgggcctcttagggcac

SEQ ID NO: 5058 - DNA, 6000 bp, Homo sapiens
gtggccttccatgacctggttccatctgcctccccagccccattttctacctgtgctgcaccaagaggcagcctttgatggaagctcttggagatgcctttttaaacggagctgtcccaacaccacccctggcccaccttggcccagtggatcttgggaatttttttttaattattttttattagagatagagtctcattatattgtccaggctggcctcgaactcctgggctcaagtgatcctcctgccttggcctcccaaagtgttgagattacaagtgtgacccaccatgcccagcccagggccgtttattttgtaaaagctctccagatggagccattacctagccagacatgggacccctggagacaccctattctttagctggaaagggctgatgcttcattaatgcctgtccatggaatactgggtatttgacctattccttgaccaaagactcatttttctcatctgcaaaatgcaggataatactatttcatagggttattttagaattaactgagataatagctaaatcatcacttgctgtagatagttgctgacttaacaatggttcaatttattatgatggttttattggtaagtaacccatcgtaagtaagcatctgtagaggttacttactgttttttgttggtttgtttttttgagacagggttttgctctgtcatccaggctggaatgtgtggcttaattatagctcacgcagcctcaacctcccaggcccaagtgatactcccactcagcttcccaagtagctgggactacaggtgcacgccagcatacttggctaatttttgtattttttttgtagacagatctcgctgtgttgccaaggctgatcttgaactcctggactcaagttgtcctcctaccctcagcctcccaaagtgttgggattacagatgtgagccaccgcgttcagcctacttattgccattttgattatttgggatcccagaggagatgaagatgccactgcgggacaaactagtaggccaccagatggttgaattagaagtactgtgcccagatgccgggggcaatggcttacatctgtaatcccagcactttgggaggctaaggtagggggactgcttgaggccaggagttcaagaccagcctgggcaacatagcaagaccctgtttctacaaaaaataaaacacttagctgggcgtggcatgtgcccgtggtcctagctactcaggaggctgaagtggaaggatcccctgagcccaggagtttaaggccacagggagctatgatcatgtcactgtactccaacctggatgacagagtgagatccgacctcaaaaaaagaaaaaaaaaaaaatgctgtgcccatggcttgccactctggcaatacttacaatgtttactgtggttgctgagattgactggcaggtctgtacctacccatctgtgtccccaacaatcctggcatccctgattgaggaagaaggggaggaaaggagctggggacagggcagaccacatacctggttgtttttccctttttgatgacatttgctttgcatctctggggaggcttcccagtggatctagtggaggcaaagggaataggctgatgcactgaccccaatacctattactcataggaccaggcaataggaccccacagagttggggaaattggggtggggatcaatttcaggaggaacactgaatgcaaggaacacctgggctgggaagggcagtgctgtctgaccagggggctatggaaggctggcagggttttaaggaagttgaggtcccagggagctggataagcatagagaccctctgggtggtccaggttccagggcctgacctctttgtgagccccatctcctatgtcgttggcactgagagagaacagggcacctcgggctcccaccagcagccttgctgaggcctcctccagcagcagtgttgagtagttctgggcttggcccttgaagtgccgggtcccagagagctctggggagagcaggaacagtgagccctagttctggggtgcctccccacccccagccctggcttctgctgccttttgaggttgagggtctaaccttcatagggtatggtcatccgaggggtggcatctagttctctagacggtctccgcagtgagggtcctgggactgcagttgctgtgaggatgctgaggaggaggggccagagcctcccccacatcttcctggggaggcccagactaacaagacccccaaagggagccagagtcacaggttgtgggggcggggaatgggaagcacagtcacaggggtcaaagtccaaggaagtcacttggaaggtcaggggtcataaggtcataggagtcaaggaatcatggggccatggggggtcctggaatcggggggacatggagtcacagggttgtgtggccatggaatccccagctaagaggtcagaaggagggagggatcacatgcctttctgcatcaaatgcaaactccatggtgagagggagttgtgaagttctagaggggttgtaggttactgatggggtcaccctgcccccgacagtagagctagtcctggttttctgaggtccgttttctgaagaaaaaacggggaaaaaaaagccctttgatctgtatgtgggtggaagatggatggcgttacccagacttcagggggcactgaaagaaggaggcccagcatccacagaacgcccacgccaggatcgactcacaatcattctgtctatcgctttgctctgatgcaggaggctggggtggaacttaccttccttacaagaccctagatgcccacaacccgaaacccaaggtcatgaccctcttctggccaagtcagaagctccactaggccctcaagtcaaaggagctggggttcttggagagaatgcctgcttctcccaacaatgagatgcaactcggtcagcagctgcccctgctgcctgcgggggtgccttatgcaggagggcctaaccagagaggtttaatggacctttgtttattttgtcctgctttccctttgttttttcttttccctggcctgagagctccctctggaatttctctttaattataacttcttggtattcctctccaagggggtgcacatctctgcccacgccagtctgtattgcaccctctggctaggcatccacacgtgtccctatctgcaagtaggcattcacaggcattggggtgggtacctaggatccccctggttgcacaggtataatgtctgtgcagaaggctgtagtgtgcaaggccagttgagacataagcaacgtgaagaaggtaaatgatgggatccctgagcccttggcccctcccgacacatcttggaccctccctcaagccaaccagttggggatgggatgggggtgggtggcaggcctctcccaacccctgtaacaggcctcctaatcaccaaggggttccttgaagagttcctgggctgggtgaggtgtggagagacctaatacattccatctcatcagccacccacaggcagggccagagggtgccactggtgcctcctctcccaggtcaaatattaactatctggccttggaaagaggggaggaatcaggaactggccagagggataacaggagcaattattcaagaggtaaaggtcagcactgcaggggcagagccctgaggggtagagtcaaatatgaaagggagagaagaggattccctgaccctgaaagggcataggctccctgtttgggatctgggacagcaggaagcttcaggcaagccggccatgccccacccctccctgtggaggcacacctgtttacctttgggacctcctatttgctcagtgcaaaaggcatgtgtgtggggagcactatggctaggaggaacatgccccaggttagaggagccactcagtgtggtgcatgtcacacttatagtttaagagtcacatgggtgactattaggaaggtgatatacatgcacatgggtgcacacacacacacacacacatgttcacaaggaggactgtgaacacgtggattcacaggggtcattcacacatatactcacagggagttttgtgcacacatatgctcatacagagggccacagccacaggtaatcatacatattcacatgtgacgttgaatttacatgcccatccattcagcaggtcacacagcctcagacattgaggagagataaacccacacatgtgggtttgtgtcaaggactgtgcacctattcaacaggagggtcctatacatacacatgtatgtgtagggacatgcacacaaacccattgatatagtgggccaggcaatcatgttcacagaagggtcaagtacatgtgtgctcacacgcagttcttgaacacacaactacatccatgcagagacaagcacacatgcatacaggggtccagtttttgccataggcttggaggctgccagtgtccactggggtgagatgcagagcagaaccctgcctctgttcctgaaagtcccaattctaaggcccaatttcaagtgtgtgtttgtgtgtgggggtggtgagggggttgtgtgtgtgtgtgtgtgtggtgatgggggaggcttctgaccttggatgggcagatgggatgggtgcatgagtcaaggccgctctacaagggagggaatgggaaagtaactcaggcaggaggaggcccctagcttcagcaaagatggaatggaacgcataatttagtactcctccacccctatgtatattgcggttctaaaggtgggagacgggctggagctctcagcccccacttaacctgtgggagggggcggggctaagtgggcggggcggagcatatcacccctcccttcagtggcgaagtacgggtttaaggtctccagtccacgccccacactccaccccaagttccacagttcgggttcttccccagggccagccccctgaactctgatcacctttcctctattagatcttggggtggagggaactggggaggagagacccttcaaacaggatcaatggaggatcagcaggctctcgaccttcatcccagatgtccacctgcctagtgtaggcggtatttccctctgcctagtaggatggcggtctctcctggcttgagagagcccctcccccgggaccccctccctccaacatcctggacagtccgcggtcctctcccttcgtcaggtctaacctcagtctctactgctgcagctcgaggacaagctctccttcgatcccgccggacgccgggagacgtgacccagatcctggggaacactgttcgccacgcggccccctccccgcgctggtccccgactccgtggtggccggtttgcaccccgcgcagcccgaggcctggcccgcgcccctctagagccgtcatgcaggaccgggggacttggtggtgagaaaggcctggcccagcttggagggtagaatggacgtgggggaggccttgcccgacccccggcccgcagccccaggctcacgccagggcgccgcccgcactcctcgccttgctcacctttgcgctcggatccggggccatagagacagcgacgcgcggctccgcggccccacagcaccagctgcgagaggaaggggccgcggctggaggcggggcggggggggggtggtggaggcggagccgggggtggggcggggtcctgaaaggcggggccgactgggtggggtgaggggaaggtcgccactctcttctttgcgccccctactctagcacaatagaggcggtttgagggcgaggctcacacacagccttcggccatcgggcgaccccccacctctaggcgctgcggccctgaaatcgccccctggtggtggcctcgccaccccgtgcaccctccacatgcttatagcccgtcctctcctccgctgtaaccctaggacccccctgacttgcctactgctggggacgtgcaaacctgtcctggcgttgcggggttgggggaccctctcggagggcctt

SEQ ID NO: 5059 - DNA, 6000 bp, Homo sapiens
ctggaataataagaaaaggggaagagtagaaaaacagtattaatcggtcatttgagggtatgtcagaaatatttcaaggctcatgacgattgccccttttgttatcctccccatgcctggctggctccctctcttctctaaggcctcagctcaaaggtcacatccccagccaggcctctctgaccatccagtggcaccttcccctgcacacccccctcactctgtcacccaaaccactggggccttcagagttctgatcactcatttgttcacttgttttctgttacctattaattcatctgtttattaattactcacatctttattttctaagccccttgactaaaatgtgaggtttgcgagggcagaattttgcctgtttattcacttccatattctcagtacttgaataatgcctgacacaatacagtagatgttccgtacactgttgttgaaagaagagtgaaaagactctgtgccttctccagagaaaactactcaaggttgtctaattcacctgcccacccaggaggttccctccctacatggccttcacacacctctctccggatgcagctctcacccattcttcctgtgacagctcaaatgctgtcaagttccctgttcccgacccaatattctgcagcatatcctttctcctctgaactgctggagtgagtaagattgggagcctggagtcttcactcttctctctcaactgacaactaactggtcccaaaagggatgacttaataactctgtgcctcagttttctcatctaaaaacgggagaaaacagagaaacaatataaactacagtttttgaaaggatcaaatgggactatctgtgtggaacacttggaagattctggaagataggaaatgctaaatattcataattattctgataccagcacatttgagcactgtatcaaaatgctaccttttaaaatgtcgaccgtgtttgttttctgtttttttgtttttttttttttttggtctggtcacacagtgtttagcatagtatcatatcatgcttgctcattaagcaattcaaaaatacttgtctgattgaacttaataaagtaaaaggaaatgagagataacaaagcaaggtgaccaaataggtgagttattatttattaactcacaaatgatattttccttggatttatctggggaagaaaactcagtgcttaaaattgtatacttttgccagtaagttcaacctagctttctacttattctcagataatgcctgctttcgagtgaacagccttcaaacttgtcacagtcttagtaatttttttctatccctgaggaatattttattggctggaaagcagctgaaatgttgacttttatttgactttacctaaatggtaattcacagatccattggattgttgcccagacaatagaaaataaaatcaagaaaatcttaagccaagtgatattcattttcatcttacagaaatgtaattaaatatgcaggtgaaatagataaatattaggtgaaaaaaagcaaactccaggagtacatattttttttagcttaacgggggacatgttgttggctcaccctctctattctataggattccaacaaattaaatattaggtgaaaaaaaagcaaactccaggagtgcatattttttttagcttaacgggggacatgttgttggctcaccctctctattctataggattccaacaaatcaaacctctccaactggcgagttactagtgttgatgtaatgttgcttgtccctggacagctgagctcagcaattccagttccatgtttcctttccaaaggatagctaaagaaacattcactggataagtgtcatatgtttgctgtgtttcaaaatatttagttcacattttcctctatagctctatttattgttccacaatttctgtagattggactcgtttgggtccaagtgtaaatttgaattaaaagaacaatactcaaagtagcccagagtagtccaaaggaagttcatggatctgattttcaaagaaaagaacttttccaccttatatatgtatatattttagtccatcattcatgtttagtcaatcattctgtctattctaatttattcctctttatttattttcaatatggaaggtttttttttccttttcgccttccctttctcctcctcctttgctcctcatttcaacttgtagaaacaatgctttcaattgatacaaaggacaattcttttacatttttaaaaaatgtaaccataatatacacaactctataactttagtgtcctgataatatatcatggacattccttgagtttagtggttaaaatctagctcattatttttaatgtcagcaaaatagcctatagtatgaatatttcacaattcttaactattcctctgatggacaatcagtatgctttcagctttactttccacaaacaagatggatattaatatttttgctcatgtcttcacatatgggtacctttagttctacagggttgattccaaaatataagactataagagcaatggaaaaaaggcttatctatatatagattaatgcatattaatatttttctatatagaggtatagatgttgccataatgtttacttcatctctatttaattccatcagcctagattttcgaatggaaattttttcttaacactcaaaaacaaaaattacaccttgctttactcagaatacttcacctagaaagggaatgttccccaaattgaacgttttttcattgttaacatattatttcaaggataatttcctacatgttttagcagcccatgttctgattttttattctcacatttatgacagaatagtgtgtgggctttttccaccacaaaaatgagcatatgtctatattcagttgtatttggtaacatcaatagaataaagcattattaatcatattcctatttagaccatttaccaagactcatttgttgctgaaattttatactaagtcaaatcaatcaacttttttctttgcttattttcaaatatgagtgtagatactatgccagcaagattttccttgaattcatgttataatgcacaatatatataatgggtctgttcttccaaaataaaggtgagaattttttttttgacgtttttgcctggaaccaatggtttattggctagtcactcaagtaaatttgtctgacttgtgcggacataaagtgtgcctagttgatacaataatatttttaataagaagaaaataaagaaaaatctttggatttagaaaagatcattgctttcttattcatcaccagtcaacatatattattttatataattctctaatcacctatgaggtaagtattcacaggtaagaaattgaggctgagacattaagtagcctgctcaaggtctgacagcaagtaggaaaacccagattttaccccattatctgtctgattttgaggtgcgtactctaaacactagtatatccccagttccctgtataacttgacttattgaccatcactcatttttatcccaaccatttttcctctctcggttgtaagtcacatgtcagtaccaatcagcagtaaacaaagatgtagacgtgaaggtaaagttccattggctatagtatttacacacaacaggaatgtttgacttaatgcgagttaaggcctctggtctactcttggagggggagagcagcccctcttctgaggctgaaggtctcctagaaactctggcggttggtggcaggactattttccaatgaacagttttcagcctcagacttcatctttctgtgaccaaagatatttccactctggcttattaaacctactcagtcaaagttaaatcaatgttatatgacctgctgagtgaacaaacacttttctccccctttgtttctttatccctgaggcttacttgggaaactaacaccatttttctttgagatttccaaaaggcacactggaaagtacctcaaatgtctcacgcttaataaattcttcatgggggtggggaggtggagccaggggtagtcacattcccatcctggtcgtattaaattaggattgttcttgaataatttcagcattgataattctagaaatttttcaacagtagaaaatgtaagtaagattcacatcatcttcagaggcaacatgttttcttccgtgaactgtcaggaaatacaaagccttttgtagtttagtatgtaaaactgtagaggggttgtttcattttttttgaacacaatgactataatgccattgtgtatgtaattgtaaattgcctaataccattttctcctttctcatagcatgagatatttttaatgtattgatatatatatatatatatatgaaaacacatcctatttaaagaattaaaagagaaagaggcctaacttggagaagttctggatgaacttccagatggattcctctgggggttgggggaggctcttcgtcaatggcaagagaatctttttctcaattatttgattgccattcaagcctttcggggaggaaataagcaccacacgtggcgtgtagttattgcacacagacgttaagactgaaccactacctgctggtcccttcaccagcgttacaacccgttccttgcaagataggcaggccgttagccaagccccaaagccagcaaacccagacacctgaagctggcgctgtgctagagaacgcgcgacgcgcgcggctggagggaagggaagcggatgaaaccacagacgtgcagcgagggtcttctcgtcttaggagggtggccagtgtgctcagctcttgcgaaggtcgctgatgcccagcgaaggacattcccacatgtgcacgcacgcagagtaacccgcgcacactcacacaccccagtttcagaaggcacactacatggcaacctccttgtcccaagactcccctatttgcgggcacattcagcaaaatagaccagcgcttcctctctttactcatcttccaagtttccaaacctgagactgggtgactcttgcctaggctcacagatcgagccttcccagtgttgcactgggaccctagggtggccctggggtgcccaagagatgcgcaagcatctcgcgccttccaagcgatcagcgaggaaaaacggggtccaaattcgagtagaatctgcgggttgcgggaagatggcctgcgagtgcggtgggggacaataccctagggccccgtgcgccctcgctttcccggggcactctcaccatttgtagcctctgccgcgcttgaacttgagggtgagcgcagtctccaggaagagcaagaggttgagcagcgcaagcagccagtaccgcggctccttcttcacctcggtcactcgccagaccccgaccagcgagtgcagcaggaacagcaaccgagtggccagggcgttaaggaagaccagtccctccatgctggccggagcactctgcctacgtccccttgcctgcgcccccaggaccctgccgggcgtgcccggagcccaccggtgagcaggaatatgacaagcactgagacctgctgctgcttgtggtcccttctcaccctcagcgcccgatgccggtagaactggtgcgcggctcgcccctcccccaaacttcctgagaactcttcaaagaggggtgagtccaaacccagcttttccagactgctgggttttccagggagtctggggctgcgctgccctgtctccagggcgttattctccagcgctgcccatccccctcccaatctcggggccagtctccatccctgtccggtatccccgcccccgggcctctgtgaggttcccaagaacttccccatcacgagggggcggaaagaggagggaggaggactgaaggtcaaggtgcagcacagccagaaaggcggaggaggagagcatctctggcagctccgccttacttttccaccgaagtactttaattcactaacacgtttcacgctgtcatgctgacccgaagccgggac

SEQ ID NO: 5060 - DNA, 6000 bp, Homo sapiens
ggtgcagagggtgtatgtgaagaggaagaaagagaaattaatttaattccatttgctgatgtgactgtagcacaactatttttaggtataatccaaacagtgcatatcttctccattttgattagtagaaaattggcagggagtcaaaagaattagtatttctcagcacattatgccagaaatgtacaaataaaatgatattatctgtgccagtgtgtttaatttacttctaaggttttaatttttttccttcaactaaacaaatgagtccagcttggttaaaaacattttttaaaaagtctttcacaactggcagcaaaagttacagaataatttttctttagatccttgctgagaacctcttacaaaaaacttaaatgttaatattaccctgatactctgggtgcagaatttctgtctggcaattttatatactgccagaggaacgggcacattcaacaaaatgtgaaattaacataagctaggaaaatgtgcttaacaaggaaagatttcacaatagccacttaggagttattaataattccaattccaaagaaagcatagactaagaaacaaataaactctatttgcaaagttttatataggcaagttcaccaaagtatgaagccatatgctataccaattacacatttctacatcggagagagaatttataaatcctggaaaatctccattgagttattgttagtgtttaacctgaatgtaacgtccaatgtagcaaatctatggatcttgatcacattttcctgctttgattttaaggtttatgcttttggtactttgatacacacaagcccatgggtaaggctgcctttttgcacactcaatgtcttcttcttcctatttctgcagtgcacaatctcaccagattaagcaggactggctgctctctcctcccactgccatcgctactgggactgacagcccagctccccacatttcctattataaatcaatggctgccttcttcaaaagcgacaaaaagtagtcttcatggggatttggaatcactgacatggtctgtttctgaatccatgtaattttcagttggagatcttgggagatcacacaaaaatcttttctatttcctgccaatacatagaaaccggccccaagattacagtggtttcctctaactcactaaagtgactaaacctgtgtactaagtagttaaattatacacatttgttcttaaagcttaaaggactttcatgattttaagacctgagtgattttaagacctgagatttgaagggcctgcgtatatgttttgggctgggaagatttctttttatttaaatgtgaagacttatctagacaaaataagtaaataaacaggaaaccaagaaagtgaagcatttacctggtacttcagtgtctagtaatttcaaacaaagaaggacaaaacccctaagaaaatgcatcttacatactcatggtcgggggtggatggatattaaccatatttggttcctagggaaattatagtgacatttcatcctgagactgattttatgttcttcaaaatatgtttaagtatttatctttgtattcttaaagaagctctcctttttccttttcctttttttttttttttttttgctggaaaggggttaaacttcatagcagcttttgttgaggctgttactgttcatgcaaccttctgctggtctctaaaacatctacgtcattaacctttctcagaagatggttgccttgtctttagaatatgccattgcaaaaaagaatattcagtctcaacttttccctgttaaagaatactccgctcatttaaagtgcagcataagccagaagttaatattctttactttggtttctttactgtatggtcatgaaataaaaagcttatttaaaaatatagtaagaactttaaatgtattttggagaatgtaaaattaatctcaggacagaattgcactatcccttcctttaggaaataactttatgaaaaataccccatcctttgggtgctgtaattttgttggaaacttaaatcctttcacacttgcttttacctatgatctgtccacccagaacttctggcaaaatgatctatttaactacataagagaaaaaaatttacttcagaagcccttttatacatttttgcttaaccatgaaagcatttttcattctaaacagcctctggagaaatctgcacacactgatcatccgcaggctgtgattttctattggaaaacaaaaataagctgtggaagccacttattgcattccaagtaggcaactgatcattcaatgagttagtctttcctgcatttccgtgaaaagttgcagctgagttaaatgaccgcgtcacttttttttttttttttttttttttaggagctacgcaatcacaaaggtcacttcttcagtcaagtgcagcagatgggatcttgaaagtgcctacaagtagtctagaacaccttgaatccggctgtgaaaatgtagggtaaatctgtagctctcagtaggtaaacaccttatttaggtctggaggcattttgctatgttattgagtcatggaaacctattaaaagagctctatgggaaatccagtctatattttgaacaaaacaagctgtctttttcattgtcactgaccctttacagacacacagtacataatcttgattgtgcttcattggtatttattgcacatggaccaattcctcacacagtagttagttgcaccagagtataaatacttggtaaaacacacaagaggaagtagaatttacacacaagtgctaactttcaccagcaaattcacgtgggcacttggacataaaaaaaaataaaaaatccttaagataattatatttataatatggatacagttacagtaccatgataaaggagtataaaaaggtattttcccaatgaatcattagctcaataacatactagacaacagaagtagagtttgaattttatttaagatctgcccagcccctctccctttaaaaaatatttaatttctttttgtgcaagtaacatcttctgtggattttgtaattcctaacactgtgcaaaaatggcattttgaaccactccttttttttgtttttgtttttatccacatgtgcagtaatctgaactgtttctctctctcgctctcttttaatgtcctgtcttcaattgacagagtcacatgtcacagagagaggctctgcgcctggtccttccaactaatattgatacataaataagctgtttaatataaacaagtctttctatctgctgtgcaaatgcacagtgtgaggtagaaatccctcagcctgaccacccaggcgcgcgggggacagcgggtttgccctacacaaggaaagcaaggtggggcttgttccaagaagagcttaacatttcttgaaacgtgatttttttttattttgcctccatcctttctctttgctttcataacagcagaaatcattacttagaaattaaaatgaaatttctctggaaagcaaaaggaaatatgtcttgacaaactgtcattctcctctctctggctggtagtgtgttcctgttcccgggaaagggatgggagccacgatgatcgattttaatcccctcctaatgcttctcccttcccctaacccacccatcttccactccggtcctctcagagagtgtcaaaaaccacctggtgggggaaaaaaatctaaagatgcatcacacgcacacacaaaagaaggccggaccacaaacagaaaaaaaaaaaaaaaaaaaaaagaagaagaaagaaaagaaaagaaaaaaaaaacaacaaggaacatcagcaagccactctcccatcccttcccaaactttcctttttgtgcaacggtccgtggcttttctctttgcctcggatgattcagacgaggattgtgggcttcgagttcacctgctatcggtcttaagtaaacacagatctcctcgttcccctgggaagccgtgcccggagtccgcgccccgcgccgggccctacaccttggattccgaggcgaagccggggcggcacggctcgtccaggctcgagtcgctgtccgccgccgccccgccgttgcagccggcccagggctccagcaggcgcgcgggcggcgtggccccgacgacatcgtcgtcgtcgtcgtccgaggcggccccgggcgatggcgggggtccgggccgggccagacagcccgaggcgcgcggccggtctccgtgggtcgcgtggcgccggcgggcagccctgcgcgcgcagcagagcagtccctggaaggccttgcggaagtcggggctgcggcagtagatgatggggttgaaggccgagttggcgtagcccagccagttgaagaagacgaagaggcggtcgggcaccagctcgcggtggaaggccttcaccacgttggccaggaagaagggcagccagcagagcgtgaagacgcccatgatgatgcccagcgtcttgagcgccttctgctcgcgcagggccacgaggcgcgagggccgccgcttacccgcacgcccgttggccagcggggcggtggcggcggcggcggcggggcgcgggggtccgggcggcggcgcgggcgcggggacgggcgagggcgagggcgagggcggccgcgctgggccgccgaggaaacggcgctcgcagctgtcgatcttcttcacctgcttctgggcctcgcggaacacccgcaggtacacgaaggccatgatgcacaggggcacgtagaaggagactacggacgaggcgatggcgtaggcccggttggtgacgaagtcgcagcacttggggtcgttgtagcagcggcgcgcctcgtcgctctccgcccgccaccagtgcatgaggatgggcaggaaggacaccagggccgagatggcccacacggtgcacacgaggccccgcgcccgcgcgcgcgtcagcaggctctggtagcggaagggcgaggtgatggcgaggtagcggtccagggcaatgacacacagggtctcgatgctggccgtcacgcacagcacgtccactgaggtccacagctcgcagaagaaggagccgtactcccagcggccccacaccacgatggtggccccgaacggcaccaccagcagccccatgaccaggtcggcgctggccagggacatgatgaagaggttggtgagcgtctgcagccgcggcgtcttggcgatggccacgatcaccagcacattgcccgccacgatgagcagcacgatgagcgccatcagcagacccatgcccgctgtccactgctgagacagcggctcggggctttcgctggcgggaggcagcaacgaggcgggcggcgacgcgggcaccagcagccgcgccgcggtggccgcgccgtcggggagcggtgcggccgacgacaggttaccgggctcggaggcgcccaggacgagcacccccgcgcccatgccgagctgcggaggccgggggcggggggtgtggcagggctgggccgtggttggggaacaccccagaagcccgggcggcgtggtgcgcagagggaggtcgcggccgggtcagggcagccgcggcgcggggccggaggcatgggcgccgggcgcctttcccgcaggagccgagcgctgtcgctgccgctgccgccgccgccgccgccgccgctgctgctggagccgctgccgctgctggaagagccgccgggacttcagcatgtttctgagcgcgccgggcccgcagctccggcacccagcacccaccccaccccgctcccactccccaagccaacccccggggcctcgcgtcaggctcctgcagccaatccgggcaaaggcacgcccccgtctggtctgcacccccacctccaactccccgcacccccctcccgttggcaattgagcggctcctgagagtcccgagctgatcgcgtagctagtgcctcccgtgcgcccgcgggttcctgcggacgcaccccttcctgcgcccgctggttcctggtccctgtt

SEQ ID NO: 5061 - DNA, 6000 bp, Homo sapiens
ccattcttccagttcgcatttggaggtagtgattgcactagaccatgtcctgcttccacaggtgtactgttttattttgaacctgtaaactaaactctattttattaactcatagaaaccattaaaaataaggcctttccaaacgccgaagacaataaatacatccatattcgaaatcattccgtgaattacagaacaaataagtgactgtcctccctgggtaaggcagaaaactggagaaagcctaagctactttgagttgttaattgttttctgaagatcacagtttaggccttaaatgtaaccagttagcaataccatctccattcagggttaggaaactggttaggaaactatatgctttctgggtcaagaaaatgctcttaggcacaatcattttaaaacaaataaacacactctgcttatctgtgtctatctcaccactctggacgttaatcatcactgaaatagataccccaggcccccagcctcaaagagctccaaggctacaggacccctccacaggaatgaatgtacatgccaggacaaacacctcaggagcctcactccctaaacacctattgttaattccaggcaaatctatcataggcaaatgcaagacagcacccaggtactgctcaaaggctatttaaaataaaattcctatttgagaatatgtagcacttaattcgggaggaagaggatcaagtaagctttctttaacataagactggcaatagaatcttttaaaaatagctttacatgcacagatgtactttttctttccattatttgcgtttgttaattttcagtatcagaatttgcagatagcgctcctgttcttcccctgtcataatgtctacttcttgcattcagtctacattatcaagtgacagctgaattccactgtcttgttcttgtaaacggaactaggttagtttgtcctcttactctttagggaaaatttgaaagactgctatatgaaacatttctttgatttttattgttatattcaggatatttctattccaacaggcttcataaaatctccaaacaaaactgattttaaatcagatgactgactccaactatctttgtgtccctttaaaaaaaaaagaaaagtaagcttaggatatctattagtgttcactgttcgggcaagaggcctaaagggaagcaaattatttgtttgtggttttaaagtggccagaatgccttcaagcacaagtataagaccattagcaaatcacaaggaaccaaagcagttcatcttactcaacaaagctatgatcagttaggaacagccaaactgaatgggacttgccctgggccggaaggtcagtaaaccttagcagtttgtgtttctgagaatcaagaggctcttcgtcccggagtgcaggccataagtccacaggttctgctgtcatgtttccaaaaacattcaggacaggtgagagaaacgaagcacagtgcgtgtgtgtgcgtgttcttccctttgtctttagtcagcacctctaagtcaaaccatccccacttttgctatatacagactaactagaggagaacccaaacaattaaaaagttccgttttacaatttattgtgtgcttactatgtgcttaatgctgtactagccagcattctacacttaagcctcattttaccaggcaaggttattcccattctttataggtaataaaacctagggccagtgaggttatgtggcttctggtcaaatcaagttttgtgtaatgctgataaaaactcatctcacttatctagtctgcagttaattagcccaaagcaatgaacgacagccctgccactatccaagcagccatactcttgctgtactttgggcccgggttcgctgactccctaagtggactggggtgcatgccttctccctccagggatgacaaccacctctctcagtggcttattaagtctctgcagctgtccagaaacggaccacactggtaaacattctctccacctgctgtaacacgcataacttcttccctcaatccagaaaacccgagcagtgaccctgctctttatcaagtgctatggcaaaataacttccctagaaggccaggacaccttaccctaggacatgggcgagaaatcaaaacacacatgtctaataaataataaagccatatcatttggcaatctcaaagcattttacaccataaattcactttctttttttttgttgttattattgctacagaatgtagattcattcccaatatctctcttttagagcatttgaaaataaacatcaattctttcattcattcactcaatctctatatgaagagagagaaagccaaactttgccttagctagcttgggttacagtcactttagacttctcttataggttaactgataatattctttgaaagagttattctcatgagaaaggaagagaataaaaaactatttctgcaggtgacaagactgcatgcccaagaagtcccaaggaaccattatcatgaatacaatcatcctagaataaaaaaccatcaaattcaaaatttacaagagtagagtaatcttctacattcagtaatacccagccagaaaacatactgaagagagtgtatttgcaataaaaacgaaatgcataacattttcggaaatacataggagtaagtgcaacaacagatatgtaagaactttatcatgaaaaccacaaaagtccttgaaaaagtacagaatttttttttttgacagagagttgaacagaagtgtagaagtgacacacacacataaatccaacaggataatcttaccctgacagattactagactctatcaaaaagtaacaatatttaaaatagtatggaaatggaaaactgtatcagtgacacacaatgaagagttcagatatagatccaatatacacacatatatgtctatgtgtatatacatgtgtatattatatataatatatatataaacttattatatggcaaaataagctgtccaaaacaaaggaaaagagaattacttaacaaagttgtagacaacaatagtaagttgaattcacctcttgcaccaaaagtgatattgatgaaagtgttaactattaaaaaattaaattaggccaggcgccatggctcatgcctgtaatcccagcactttgggaggccgaggtgggcagataacctgaggtcggcagttcgagaccaacctgaccaagatggagaaaccctatctctaccaaaaatacaaaattagctgggtgtggtggtgcatgcctgtaatcccagctacgcaagaggctgaggcaggagaaccgcttgaacccaggaggtggtgagccgagtgcacaccactgcactccagcccgggcaacaagagtgaaactccgtctcaaaaaaaaaaaaaaaaaaaaaatcaaatttgtaagaaaaccagtgggaaacagatttatcaggtctgtggaggaattataaatttctcagctttggggagaaaaagagaaaaaaatcacaaaagactggcagagcctaataaagtgtaaaacagtaaagtaaaatgaattgactgggaaaaatatctggatcaaagatgacagactagattctaacatctaagacccacaaagattccaaatttataggaaaaacaagaagaccccagtaataaatgggcaaagagtgggaagagacagtctcccaggtgaaacaaacacatgggaatatatttatcccagccagtggtaaaagagatgcaaaataacacaactttggtaccttaaatgaccactaaagtggcaaagattttctaaattctcacataaaatttgttcactctgtgctggtcccactataatttggtacagcacctctgcaaaccataacctttgctataatgccaccttgagactttatcctaaggaactgatttttaaaaaatatgtatggtaatgacatgtgacttatatttcagtaaagctgttactcaaaaatgcattatttcattattatctataataacaaaaagctgaacactacatgtaagtttaatagtagagggatgttctttaatctcattatgcgacagcccacaaacatttactatgtacctattctgttaggatcagtaagatagcaattatatgtgcaactgaaaaggtttttaaatgaaaataattgtctagaggtgatggtattatggctttttatgtttttaaaaacgttatttaatgttgtcataatgtactagaaagaactactttttaaaaaatgggtggaatagggggcaatctgaaagctcttattcccccaattccctacatgttttttccttcctatttaacagtttaagtggttcagaaaagtttttcattcacaggtctcagaccctaccaaaaacaggccaaattgcaataccatgtcttgtacacatcctggacagactccagcctcctgcctcaagcaggccccctttttcgtgtcgctctgcctatatgaagtcataaactatggctgaacactgggaccgagggcttctcttaaggtccgagccctgaagcttaacaacctttagaaaagggtagggaggatgaaagatgaaagtccacaaaaatttatgatagaccacttaaggaacctgagtcctagacctggactcaaggaatcgtccaaagcaccgtaccagactggctcctctggggcgaaggaaccggggcagctaaacctctgcaaaaacacacaatcgaaagctgtagggagtgcctaagatggctaattgtgaggagcggcccacccgggagggtgcctactgagggatgctctcgggaggctgcctcagatggaggccttggggaggaggggcaaaggggtccccgagagtgctcgggaaagggtgtaggcggaggtcaggtgtaggcctagaaactcggggtgcgacacgaccctgggccgaccaggccgcggcgccccgccctttcccgggacgcggggccggctcggggcggggagcgggcgggcgagcggacgcttacaggtcggtgccgagccgcgtgaagccggagttgagcgaggcccgggctatccggcgccagagcagatcgcagctggtgaagcgccgcagccagcggcacacctgggccaggcggccgagggcccgcatgtccaggtaggagcagatgagcagcagcagctcctccggcaggcgccagagcgcaggccccgcggccgggcgggcagccgactcccgagccgcctcctcctcctcctcctcctccccggccgccgccgccatggccacccctgtccccgcgatgtcggcccaagcctgaccccctcgtccctgtgctcttcccggcctggcgccctcccgccgcctagccctgaccctccattcctccttcttcccatactctcttccttgtgcctccttcccggcccctgcgctcccctcgactcccttgacgatgcctctcgccccttcctccacgcttctgcctccctctgcttcctcccttgggcatgccctcgctcccgcgtcagcccccggcccggctgcctccttcgccgtctgcggcccgggcttcccttccgccccgcttcctcttccgccttgccccgctctcgcttttcccttccccttccccttccttcgcttccccctcgccaccctcccttcctgcagcttcctcgcctctccgccctcgccctcgccgggcccgccgttcccggggggccccgagcggccctggctgcccatgagcggccgcggggccggcccgacgcggagcccagcccgagccgccaccgccgccgccccgggaggaggcgacaccatgtcggaccgggtcacatggggcggcgcgggccgagccctgggcacgcccctcacacctgcagccttggagccacttcggggtgcgggctggggccggggcgctgacaccacccccgcatccccgagagcgcttggtggaagcacaggagttcgcgctgcaaacacgtgaggccgg

SEQ ID NO: 5062 - DNA, 6000 bp, Homo sapiens
attccagagtctgctggacgcccaggcggacgaggccgtgttaggtaagccgctcggctcggctcggagctggatccgccggggtggaggggcgctcggagaagaggagccggcggagcgagaaggggaaagccccgggaagaggaagtctccgggctttgcccttcgctccggacggagtgttggggacgtggctctgccaggactcggagcagactctgagcattgttttggccccacttggcacctgcatagagccaactccacgttcctggcccggtttccctcccagtctctttgttcttttgtaaagccggtgttcaagtcttgtttgtggcctaaacatctaaggtgtttagccttgtctgaggctgcggctgttttgacagttggacttcatctggggagctccctgcaattcaagcttccagggctaggctagcaaaggtttaagggtctgtttccgaagtaattactaggtcagacagtgttgacatttgccaacttagagcatacctcaagttgctatgatcactccagcgctctagttcagcatgtttacacaggttctacgcctagaaccttaaactatgatgcacaatactttgttccgccccagttaccaggatgcgagtgtcttttaagcgatccggtcagtgactgcggaggtgcagtgtcagtatggattgaagacatattttaagaccgatcgcttttagatgattttcttaaatataaatatcccaacaattcaaatttttgttttttttctgtagtttcatgaactaaacacttgtacaaaaagtatgaaagtggaagttcttaaacgaaaatagtaaccaccacctgggttaatctcaaaaaaaaaatgactgtcaaaccctgaaagtactaatataattttgaaatttgtatcttatattctgaactcatgccctaccttctacccccttgatgtatttgttcatggagccggttaccctaaactcatcatttttaggatggaagtttattctaaaattgacacaatgtaaaatatttatcttgtttttcctttgaatttactccagtgttagaatgaccattgcattgttatattttctttgggggctataatattttttaatagtaaaaatattaaggcaaaataagttaattgaagctagtaatagtagagttcttgttgtgttctttttattgtttttcacttgatcttgttgctcatctcatttacttataattgactgtccttatagttgatgtttttaatcttgttaaagggtttttaaacccaaattaaaatatcctttttggaacatgactgtaaagaatttattatcataggcatcactggaagttaatttattttagatcatccagacttgaaacatatcgacccagtggttttaaaacattgtcatgcagcagctgcaacttacatactagaggcaggaaagcaccgagctgacaagtcaactctaaggtacaggatttatttaaatatccatttattttcaaatactaccttaatgatttcaatttcagttttaaaaatggagacagaactttggctttttttttctttcttctagcacttatctagaagactgtaaatttgacagagagcgaatagaactgttttgcacggaatatcaggttacttactttaaaatttttaattaacagtactatttttcttttactttgtttgtaaagatgtttttttttctttctttcttgctttcttttttctctccagaataataagaattccctagaaatcctactgggaaggtaggtactgtataaggtgtcaagctgaggcacttttcacttgcaggtatgaatggagagtgttggtgtgaaacaagatcttcgggatcttgacccaaagaaaaggagccaaagggcatgtcaagcaattgaagttaagctcatgtttttaaagatcgtttattgagatgattttgaaatgctcctttaccattcataatttaaaaataaagtttaacaatggtttaaattcagaatggattaaaatggagttgggggtggaaagtagagccattcttagtaaatataaataactgaaaagttcttctgaggagactatgtacgaagttatcattgcatctttcagtataggcagatctctccctcatataacggatgtttcttggcgcttggaatatcagataaaggtaaagtttaagaaacttctctagcgggggatttagggaacttcttaaaacctagagttaaaagctgttgcgtgtttgttgtgttattttagaccaatcaacttcataggatgtacagacctgcatatttggtgaccttaagtgtacaggtatttatagataagtcttatccaataatgaaatttataatttcattgatttaaataaacagcgtttcttgttgcgtgttttttttcctgccctagaacactgattccccatcctatccagagattagttttagttgcagcatggaacaattacaggtacagtattaggatctataaatattcctgtctttttataaatgtttacttgagagttatactcttgggaagttcaaaagaaaattaatctaaccatttgtcagcagataatgaagattggttaaggatttaatgggaaaggggcatcaaaagtagtattttaagataggcttcacttgaaattaagatgttattaatagagaattggtctgtatttgctgttcttgctgattgaaataaacttctgtagtgtttagtgtaaatttcttctattcatgatgagtttggtccaataagataaacaaaattaagagcatggctttgaaaatgtctttgctttcagaaattgaattaaactgtcaaaattggattttgaaactttttaaatgactttataaagggggaagtatacataacattctaaaactgtttatattgcccatttaagactgggaaaattcaaaactacatttattagtggatatgacaacgaatttatttcatagtttttaaaaaatgaagctcattactggaaatttaagtgaaattgaatttttcaaaggcatcttctgcagagtcgttttaatgtaactatgaatcaaactttcaactttcagaaaatgtgtatacagcataacctttgttagataacttgagaaaattcagatgtatctgggcggttaaggatccggttagaaatcatgtttcagtgtgagggcaaataaccgatttgaacatgaggtatttccgaggaaacgctttttttgcccgatagtagtttgtcaaaagttaaaatcttgttgaattttaaacttgtttggaaggtgtgtcctgattttttttcttgcatctttcttgagcttggatacttctttccatgttttatcctaaaaacgtggtattgtatacacgtcttttaggacttggtggggaaacttaaagatgcttcgaaaagcctggaaagagcaactcagttgtaacttggggaagttaacgatccgcccgagtgcagaggaaaaccagaaacgccttgccttcagctgaaccaccgtttgtgcgagctggatgtccttttcagtagaaaagaattttccttttgaatttataccattcatcaattttgacactttaaaaacgtgtgaaagggttaagagggaaagatactgcccaagtatttgaatcgtttagtagtaactgtccatttatcctattttgatctttttcaagtcttctgaaaggaagtagacagtattacaccctgaataaataaggtgttgttttccacaaagagtgatgatattttgtttggatctgagttcgtgtgttattactttgtgtgaagctagataggagtagtgtgaacttttaacgatagccttttctcaggattaaagttaaacacggaggaaacgatgcgatctcctgggtttgtcgcagacccctgcttcggggctccgggggcgggcgcgggcggctgcccggcccgttacctgcgcccgagggctcgcccacagcccgaccctcggccgcccggtcccggcccggcgcggagcccctgcccggagccagccgtcgcccgcgcgcgccccgcctcggccgcccgcgggcggggaagaggccggcgcggccgcgggctggcgggcaggggcgggcgctgttgtttccgcgagcccaacttgggcgcaggttccgcgccgcggcgccggagcctgggccgcagcccgcggggccggccggggggcggcggccgcgggacgtatgcgccccgggaggaggcgggcggccgggagaaagaaagaacggggggcggggtgggctgcgcggcgtgcggggccggagcggcggccgcgcggagcagggcggcgcgtgtggcgctgtggagaaatgtctccgccgccgcggcgcggagcgagggagggggccgggcgcgcggcgcggaggggagggggcggccacgggcctgactacaccgacactaattcccaggccgcccttaaggaatgaggggagcacgtgacccgctgggggggcggcggggggagggggcgggcggactccgagccattttggagccggtgtcagtttccactctgccttcagcggtgcatttttttccaccctcccctccccctcctcccctccccccgctcgcacgcacacacacggcgccccccgcccgcccgcctcccccacagcaactatgaaataatcgtagtatgagaggcagagatcggggcgagacaatggggatgtgggcgcgggagccccgttccggcttagcagcacctcccagccccgcagaataaaaccgatcgcgccccctccgcgcgcgccctcccccgagtgcggagcgggaggaggcggcggcggccgaggaggaggaggaggaggccccggaggaggaggcgttggaggtcgaggcggaggcggaggaggaggaggccgaggcgccggaggaggccgaggcgccggagcaggaggaggccggccggaggcggcatgagacgagcgtggcggccgcggctgctcggggccgcgctggttgcccattgacagcggcgtctgcagctcgcttcaagatggccgcttggctcgcattcattttctgctgaacgacttttaactttcattgtcttttccgcccgcttcgatcgcctcgcgccggctgctctttccgggtacgtaggaggcgaggcgcccccgggacggggctgggggccggcgggggccgcgcggggctcggggcggccgcgggtggaaggggagccccccccgcgccccggccgcgccgccgggagggcgctgacagcgtgggcgcccggccccgcgccccgcgccgcccgccccgcgcctgccggccccgcgcgccgccctccccgcgcccgcgagcgcgcgcccgccgccgcccgccgactcccgcggcgccgggaccgacccgcagcccgcgccgcgccgccgccgccagcagggctcggcgccgctccagccgccgccgcccgctcagccccggcgcgccgcgcgcggccccacgttttagttccccgctcccccgggcgcccctccgcaccctcgcgacgcacatggcccccgagaggagtactggtatttccagcctcggcggctctcccggccgcagcgccctttgttgagaggtagatttggatgaaacggggacgggttcctgaaatcgggagctgcttgggtcaagtggcttccctcctctcccgaagaaagggctctggaggggctccagcagccagagaacgcccccattttatagggacgggttgcgtggggggcggccatcccgccaaggtgggtgttaggctggagagagccccgacgaaaatgttattaacttaagttggggggacacttgtctgagattggatggctggtaagatggcggttcccagttgtttccaaggtctcctgcatttgtgtttaaaatgctgaagttttcaaggtggtgtgtgttgggagtcttggataag

SEQ ID NO: 5063 - DNA, 6000 bp, Homo sapiens
attcatccttttttttttcttttgagtcagtctcactctgtcattcaagctaaagtacaatagtgcaatctcagttcactgctgtctcaaactcttgggctcaagtgatcctccctcttcagcctcctgagtttctaggattacatgtgtgagccatagcatccaggtcaagattcatccttgaaagacagagtgatgccaagccgggcgcggtggctcatgcctgtaatcccagcactttgggaggccaaggcgggtggatcacctgaggtcaggaattcgagatgagcctgaccaacatggtgaaacccctactctactaaatacaaaatattagccgggcatggtggtgcatgcctgtagtcccagctacttgggaggctgaggcaggagaattgcttgaacccgggaggcggaggttgcagtgagccgagattgtgccactgcactccagcctgggcaacaagagcgaaactctgtctaaaaaaaaaaaaaaaagaaaagaaagaaagacagagtggtgccaataactagttgaaggaatttcaagggtgagagaaatataagagaaaatatagaaggccaaggtcagcagagggagttggatgggagcggttctaggagttgggacaaacagggggcttacctctattggaatgagtctagccagttgcttctgctgtctgcctttttgtaaggctcctcttcccttcccctttcctaatcttaatctcttctcagtacctcctgcctgtgtccagagtccatcttgcactaatgactagtattgaaaaatactaaaagtggctgggcacggtggctcacccctgtaatcccagcactttgggaggctgaggcaggcggatcatgaggtcaagagatcgagatcatcctggccatcatggtgaaaccccgtctctactaaaatacaaaagatttggccaggtgtggtggctcatgcctataatcccagctactcaggaggctgaggcaggggaattgcttcaacccaggaggcggaggttgcagtgagttgagatagtgccactgcactccagcctggtgacagagcaagactctgtctcaaaaaaaaaaaaaaaaaaaattaactgggtgtggtggcacacacctgtagtaccagctacttgggaggctgaggcaggagaatcgcttgaactggggaggcagaggttgcagtgagctgagatcaagccactgcattcagcctggtgacagagcgagactctgtctcaaaaataaataaataaataaataatactagaggcttggtgtggtacgggcctgtagtcccagacattcagaaggctgaggcaagaggactgcttgagcccaggagtccgagtccagcctgggcaacacagcaagactataaaataaaaaacaaaaaacaagggccagggtcaggcagtggctcatgtctgtaatcccagcacattggaaggtcaaggcaggaggatcacttgaggccagccagaagttcaataccagcctggctaacagcaagaaacctgtctctacaaaaaataaaaaagttagttggacacagtggtgtgtacctatagtcctagctacttgggaggctgaggcaggagaactgcttaagcccagaagtttgaggctgcagttacctatgaccatatcactgcactccagcctgggtgacagagcaagattctgtctcaaaaaaaaaaaaaaaaaaatggccaggcacagtggctcacgcctgtaatcccaacactttgggaggccgaggcgggtgaatcacttggaggccaacatggtgaaaccccatctctactaaaaatacaaaattagccaagtgtggtggtgcgcgcctgtaatcccagctactccggaggctgaggcaagagaatcacttcaacccgggaggcggaggttaaagtgagctgagattgcaccactgcactccagcctgggcaacagagtgagactgtctcaacaagaaagaaaagaaagaaggccgggcgcggtggctcacatctgtaatcccagcactttgggaggccaaggcaggcagatcacaaggtcaggagttcgagaccagcctgactaacatggcgaaaccccatctctactaaaaatacaaaaattagccaggtgtggtggtggtgcctgtaatcctagctactcaggagactgaggcaggagaatcgcttgaacctgggaggcggcggttgcagtgaactgagatcgtgccactgcaatccagtctgggcgacaagagcgagactctgtctaaaaaaaaaaaagaataaagtttaaaaataaaaagctagaatgcctctgaattgatcatttaaaaatggttaatttttagccaggcatggtggtgcatgcctataatcccaggtactcagcaggctgaggcaggagaatcacttgaaaccgggaggcagaggttgcagtgagctgaaattgcgccattgcactccagcctgggcaacaagagcgaaactccatctcaaaaaaaaaaaaaaaaaaaaaaaaggccgggcgtggtggctcacgcctataatcccagcattttgggaggccaaggtgggcggatcacctgaggttgggagatccagaccagcctgaccaacatggagaaaccctgtctctactaaaaaaaatacaaaaattagccaggcgtggtggcaggtgcctgtaatcccagctactcaggaggctgaggcgtagggagaattgcttgaactggagaggtggaggttgcagtgagctgagattgcaccactgcactccagcttgggcgacagcgcaagactccgtctaaaaaaaaaaggttaattttatgttatgtgaattttaccacacacatacagagggagagagagagaatactgggcacttacacccatccatacaaatcagctaagcctccagtcctccaggacattgtcattaagttaaagaccccccctccacatagactccacccccttcctaccacatcccttctgtctgccaggtgtctgtgacctctcttcccatttttgcctataccacaattcccagagatgctccaaagatgttctcttctccctccccaggtctgatccacactagaagtaaggcaaggagtggagcaatgggtcaagtgcttgttagctctgttaccttggcaaagttaactaacttgcctaaatggagttcctgtaggagccccaatcacttattttaaccacccattcaacagtactgagatggtatttccttaccggtaactgggctatagtgtcagtgggagtgggaagggtaatcttcccagagaaggtgaagctagaactaaggtgttaaggaagcattaactagtaggtgaagaagagggagaacagtgttttacaggcaagttcaaatttattatcatctctgaacttcagttttcctacttgttcaatggaggtaatagcaccttcttccaaaggtcctcatgaaaggtaaatgagtcggcaagtgtaaaaggcctagggcagtgcctggcattagtgcatgctcaagtaaggcagttttttcttccttcctaagcttctaccttccacatgtgtaatctaggagagggaaatctcagattcacaggaggcaaagacctttatagggtgggttgtagtccccctgtccacccagatgatcaccattgtgttggtcagcatggaatctgaccaagctagttgtttggaatgagtggccttaggcgtaagtggtcacaggattggaggaaggcaaattcatggacagaaaagagagaaggaggtcaaggtaggtattccccctcctccaaaccatctcaaattgtcctgccaatccagccccctcctctcttggaattggataatcttaaaaaaaaaaaaaaaaaaagggcagaaagaacacgtatttacaggactgcctggctgacactgggctacgtgactgggtgtacattgtctagtttgatactcaccaagccataggttacagaggataaagctagtgtcccaggtggggtggtcagttgtctcaaatcactcaggtattgaggagcgaatcttgcgttcaaacctaggtatccacaatttcgggccagtgttctgttgccttatgttctctctactccctctagtgctgacctttgtctgggagaatgcagggagggggtgcactcaggcaggggatgctgccaaggaaatacttgtgtgagtgtggatggcttcagtcaggtcctctctgctcctggtgggggtggagatggggaaacctgggggtgggagactccacagtgtacaagctcccctatcccccatcctaagcacatggtggggagggtctccattcctaggcaggccttcttttcaatccctggactctgcaccgttccatcatttcatgctccctcagcaaaaacctaaggtggagagaagaggtctcataaacactttaagcctccgcatttgtaaccctcccccagccagtcaagccagctgtgcagactctgagccagagtgagggaaccaaacagccttctcaaccaacacccctctaagtaacaaagaggagaaccccctacccagtcagggccagacgccctagggaggagacactagtccaagtctccatcgtctatccctggagcccatactgaaacttaagaaagaaaagctagcagctggggaccccaggagggagggggtcaactctctactccaggcggctcccctcccttccctcctcctggctaataggtatttcctgtttatgaggcagctaaagctgagcttttgggaagggatggagatggagcccctcccctcctagggctgggttggggagtccttgaagtgtgactgaaggttgggaggctcctcccaggggaaggagtgttccttacattgaccatccacatcatctcccatccaaccccccacggcccacagcctctgcctctctgggttagggggcactggaggggcctgtttcctgttctcatctccgaagccctcaaaggacagcagcttccaggcaggggggtcggaggcggtggggttgggcggttggtacggaggtgaaggcaccaaggctggagaaaggggggaagggaagagagtgtcttgactgatgcgtcagtctgcaagaaggaaggatggcctcctatcgcccctccgtaatccaatctggtggtcattccgcagccccctccccccagcaaaacacagatcccaagcccttaggcggaggagggcggggaccccacttaattaacccttttagttctagtcccaactggtttcgcaggcaaaggaggagtggttaatttagggaaggggtgagttgaggggttgctacaagaattaagagaatgcttctttacccatccagcctagggtagggacgcgaaacaaggggcctccagaagaaggctggcgtctcagcagggagcacggacagggggtctgcagtcccttttccctcccggagcgcggcccggggtggagagagatacaccacactgcccaccccggctccgcctcccccagccgcggctcccgctccggctcagccagactccccatccggcggcacccggaggacggacaccgagcgcgcggctgcgcctccaagccctccccttcgccctccctctctggggtctctgcctccgtctccttttttaaaagctgcgtcacatgcatgccgttccccgagcgctcccagcccctcgccgcccgcccgccgcgcggcgcacgcacgtcgtcgcttgctgcgcgctctcccgggtcactttgacacggctctcccctcccactagcaggacaattagcatattaataaagcccggccctgcccggcttgggctggggagccggcgccggcgcgagggagcgcgagcgcgagggcggagaggggggcgctcggcgacggcggcgggagcgcacagacacgcacacgcacacgcgcacacacgcacacacggacacacac

SEQ ID NO: 5064 - DNA, 6000 bp, Homo sapiens
ttcttatgttactatcatgatgtggctctgtagaaagttttgaaattggcaagttcaagtcctccaatctattttctcaaggtcattggccattctatgtcccctgaatttccatatgaattttaggataaaagcttgtcaatttctgcaaaaaagccagctgggattttgacaggtactgcactaaatctgttggttaatttggtgagcactgccattttaatattaaaattttcaggatcatagcatgtgtctttccacttaatttcaataatgttttatagttttcagaatatgttttgcacctggtccatttatttctaagtatttgctttttgatgttattggtaatcaactgttttttgtaatttcatttttgtagtgttcattgcaactgtctagaaatatatttgatttatgtatattgaacttgtattctgcaacttgctgaactcgatcattagttttaacagatttttgtgatttcccttgtgattttctatagataagatcatgtcatttgtaaacagatagtttaacttctttctcaacttgaatgccatttaacgtacttgactaattgccctggccagacaatgctgaatataaatgagagtaaatatacttattttgttcctgatcttagggagaaggcattcagtctttcaccattaaattatgttagctttggatattctgtagatggcatttaacaggctgaagtcccttttatgtctagttttatttatttatttagagatagggtcttactctgttgcccaggctggagtgtagtggggtgttctcagctcactgcaacctttgtctccagggttcaagcgattctcgtgccttagcctctcaagcagctgggattacaggtaggcaccaccacgcctggctaatttttgtatttttagtagaaacagcgtttcgctatgttggccaggctggtctcaaactcctggcctcaagtgatctgcccacctcagcttcccagagtgctgggattacaggtgtgaatcactgcgcccagcctagtttgtttttataatcattaaagggggtgttggatgttgtcaaatgatttttgtgaatctattgagataagcatgtggtctttgtactatattctttccttgattgctttattataaattgatatggcacaatacattaattttcagatgttaaatcaaccttgcttttctaatatacccaagatatatttcctaatatatcttggattcaaaaagatactctttgaaacttttgatgcttagtcaaaaaaaccctgatattgtaaactgagctttaaaacacactttgcctgtaatcccagcactttgggagcctggccaacatggtgaaaccccgtctctattgaaaacacaagaattagccaggcgtggtggtgggcgcctgtagtcccagctacttgggaggctgaggcaggaggatggcctgaatttgggaagctgaggttgcagtgagcagagatcgcgctactgcactccagcctggaggacaaaagcaaaactctggctcaaaaacaaacaaacaaacaaacaaaaaaccccacacactttgtaactaggcatcccaatacttttattggggtgctttcaaaaattaattctgctctggttttaaaaaataagcttttgaagggagttaactggtttcagagagatgcaggccaagctcctggtgtttgtgaggaaaaaagggtgaatggagaccagagacttactgcctccaaaagtgtatgtcatagttcaagtcagcatagcacttggcgttttttttaaaatggtaaaataatgcaccaaactagtaaaatcttaatcttacctgcacgaggtatcgtggatccacatttaaataaggagacagagggttcataccagttactagagagaaaacaaaatgtcacattgcaacaaaattctttaagttaatccagttagagttaatccagctcctgattgttacatgtgtttgcaatttttataggctcactgaaggcggaaaattttttcccattttatcctccctatctgtcagtttgggggctgactcaccctgagaccctcaatcccaaaccaggtcttccactggtggctcaggcttttacaccaataagataattgcagtgtcatagatctgatttttgaacttacaggaagtgtagtccaggccatttacaaagctaatttctttcactttactccaagaatgcttggtgactatgtaaattacaaaataagactgaaaaaagactaatcaattccatgggaaaaacagtggttgggttgggttttctgactgtgtacatgttgtatctaactatttcaaggcagttccttcacatattactattaacgattgatttactgtggcaaggttgagaatccttgggtcattaccacaggtatgtgggtctgtgcaaaagaaaacacaaactttgagagggccagacctgaattcactaacattgaaaagagtaaaacctatcatctttggatccttctgtatctcagcagttatttacaaacctatgcatcacccatgcctctatcttttcatcaattaggagtcctgcttgttctatttttaatatctattttgaattgtgttacttatcttctctattgctaccatcctagtccaaccatcatatctcacagcaacaatttcctaactccttgctttctcttaccccttcaattcactgtctacatagcaactacagtgatttgtcttaagaaaatcgaaactccttaccataacttacaaaatcctacattagctgtcattccctacctctctgatttcacaaacttcaattgatccaactcccttgtaactacgaagacagactggcctaagagctgttccttaaacctgccaaatttgttttgtttcaggacatttgcactagctattttcctggatacttgcctcccaagcatttgtactgtatttgggtcacagctcaaatgtcaactcccttgagatgttttccctaaccggctctaaaatggcatcctgcttccatcacaatctcaagactctgctttattccctttacagcacttatcactaacggcaatgttttaatttatgtttgttggtttacctcagtattatgtaagctctgtgagcgcaagagtcctcttttcaaaaaaaaacaaaaaaaaaaccccacaaaaaccactatagtcctgcccccagaaaagtagctagcacactgtaaaagctcagtaaatggtgttcattccctggtcccccaatttaccttcaaatcttaatcaaattaatttaacaatattgtcacattaaggaagtgtatatgccctttgtgctctgaaactcagagatactaagattaatatgaaactgtgttctaaacaggtaaagtagtagctcaggcctaggaatcccagcattttgggaggccgagacaggaggatggcctgagttcgagagtttgagaccagcttggacaacacagggagaccccatctccacaataagtcaaaaaaaaaaaaaaattagccaggcgtggtggtacgtacctagagtcccagctacttaggaggcttagaggggaggattgtttgagctcaggagtgcgaggcttcagtgaactataatcatgccaccgcaccccaatatgggtgacagaacgaggtcctgactctaaaaacaaacaaacaaaaaaacgaaacaaaacaccatgtgttgtagattcagttttttgacaaaggtgacaccagggaaatgaaaggtcttttatatttttttgcactacagtctgaacatatttcgttgttgttgttccttagtataaaatacctagagaaatattacaaggattctctaaaaagaaagtactttcgtaaaggctttatccacgaccaactgcctatctttaggtccaagttgtatttatctagttgaacaaccacagttacaaagtaccaaagttctggaaaacattttcacaagaccgaggagaggcaaaggcaagatatttatgcctctgtataccttgatgttgcctatttccgtttctataattcttacctggcttctttcttcatgtctatatatcacctttaaagttcagcttacttcctagctcctaaagaaggtttcctagcctgtcccaagtcatatttatttctcacttacaaacaatattactgaatattctgccctgacggctacttggaggctcagaatatgtcgctgtgtactaaaaagttaactacgggcttgctatttggaatacatttactcccaaagctcggctctactcttaatcaagggtcaatcacacggcccaccacacacaaaacgtaggaggcttggatataaacctaagaaaacatgcatcatctcgcgagtccaggtcaatcacggacagcttccccaggagatccgtggcccttttttaggcctttctatcttgaaagagcagccatgcagatacactaaccccaccactggtacttaagcttgtaaatgccagcaaggaaaaaaaaaacaacaacataaaacatgggacgcgcaacttagtgtagacgcaagaaccagtcagaaataatcgcaagctaggccccatacttacgcgggacgccagccaaatccgcgtgcgagtaacctgctccgccggctccgaaaaagccggccaatccccctgtggttttgttgccgcttcccccgcctccttccatggtatcgcagcaaaccgagtggttcccgccgctgcctcaagcctgggtggtccgctgggccgttactcctcaataacagcgggtaaccccgcgttgccagcgcctacttcacacgctgaccttccgggcgccggttcccgttaagcgccacacttccgctttgcggcaatgtgcgccccggaagctggaagcgcctgacggcagctttccggtggtgggaaagtgaacgaatcccgaatcaaagcggcgcattgaggcaggtggggtgccagtggaagagagaaagcaggcgagtgtttacggcctgacttgggaggccggcggatcagcaattgcagaagcaggcagcggcagagagggaatggtgcaggcaggcgctgagaaggacgcgcagtccatctctctcaggttagtgaaatgaggctctccgcccggggccggcccggggacagtgcgctgctggtcccagcatgaatgcgggccccggctgtgaaccctgcaccaagcgaccccgctggggcgccgctacaacttcgccggctgcttcggacgcccggagctttcccagcaggcagaggcgcgtcctcgaccccaaggacgctcacgtgcagttcagggtcccaccgtcctcgccagcctgcgtcccagggcaggcgggacagcacagaggcagcgccacctcgcttggtacgtgggaaaataaaaatctttgtccttcgcctcggcccgaaccttctggtctcagggactccagtcactcctttctggtcttgtgtgcatcatcactctgaggtccacttgctgagctaccaaagccactagtgggtgaatggggccgcatttttcccagtgcgattgatgtgagaaactctgatgagcagtcactcacagggcggaaaatggcaggagactccaccacctgtttgcttcttcaggtttgattgagaaattgccttagtcgtcaaggagatctaattgtgtatgtaaaacagtagggcgcttcagcctctagataggaagaaaacaacttcacttgtgcagattctgggtcccagggtgcagagctattagtctaagctggcattgtacccgtccctggtatacagtgttgaatgagagaaacttggcctctgccttcataccttaaaatctatctggagagatagacgatagcaaaagttaatataataaaaggtaatggatgttctgatagatgaaagacagattgttttacctaactgaatttatggaatcg

SEQ ID NO: 5065 - DNA, 6000 bp, Homo sapiens
ttgggaggctgaggcaggagaatcgcttgaactggggaggcagaggttgcagtgagctgagatcaagccactgcattcagcctggtgacagagcgagactctgtctcaaaaataaataaataaataaataatactagaggcttggtgtggtacgggcctgtagtcccagacattcagaaggctgaggcaagaggactgcttgagcccaggagtccgagtccagcctgggcaacacagcaagactataaaataaaaaacaaaaaacaagggccagggtcaggcagtggctcatgtctgtaatcccagcacattggaaggtcaaggcaggaggatcacttgaggccagccagaagttcaataccagcctggctaacagcaagaaacctgtctctacaaaaaataaaaaagttagttggacacagtggtgtgtacctatagtcctagctacttgggaggctgaggcaggagaactgcttaagcccagaagtttgaggctgcagttacctatgaccatatcactgcactccagcctgggtgacagagcaagattctgtctcaaaaaaaaaaaaaaaaaaatggccaggcacagtggctcacgcctgtaatcccaacactttgggaggccgaggcgggtgaatcacttggaggccaacatggtgaaaccccatctctactaaaaatacaaaattagccaagtgtggtggtgcgcgcctgtaatcccagctactccggaggctgaggcaagagaatcacttcaacccgggaggcggaggttaaagtgagctgagattgcaccactgcactccagcctgggcaacagagtgagactgtctcaacaagaaagaaaagaaagaaggccgggcgcggtggctcacatctgtaatcccagcactttgggaggccaaggcaggcagatcacaaggtcaggagttcgagaccagcctgactaacatggcgaaaccccatctctactaaaaatacaaaaattagccaggtgtggtggtggtgcctgtaatcctagctactcaggagactgaggcaggagaatcgcttgaacctgggaggcggcggttgcagtgaactgagatcgtgccactgcaatccagtctgggcgacaagagcgagactctgtctaaaaaaaaaaaagaataaagtttaaaaataaaaagctagaatgcctctgaattgatcatttaaaaatggttaatttttagccaggcatggtggtgcatgcctataatcccaggtactcagcaggctgaggcaggagaatcacttgaaaccgggaggcagaggttgcagtgagctgaaattgcgccattgcactccagcctgggcaacaagagcgaaactccatctcaaaaaaaaaaaaaaaaaaaaaaaaggccgggcgtggtggctcacgcctataatcccagcattttgggaggccaaggtgggcggatcacctgaggttgggagatccagaccagcctgaccaacatggagaaaccctgtctctactaaaaaaaatacaaaaattagccaggcgtggtggcaggtgcctgtaatcccagctactcaggaggctgaggcgtagggagaattgcttgaactggagaggtggaggttgcagtgagctgagattgcaccactgcactccagcttgggcgacagcgcaagactccgtctaaaaaaaaaaggttaattttatgttatgtgaattttaccacacacatacagagggagagagagagaatactgggcacttacacccatccatacaaatcagctaagcctccagtcctccaggacattgtcattaagttaaagaccccccctccacatagactccacccccttcctaccacatcccttctgtctgccaggtgtctgtgacctctcttcccatttttgcctataccacaattcccagagatgctccaaagatgttctcttctccctccccaggtctgatccacactagaagtaaggcaaggagtggagcaatgggtcaagtgcttgttagctctgttaccttggcaaagttaactaacttgcctaaatggagttcctgtaggagccccaatcacttattttaaccacccattcaacagtactgagatggtatttccttaccggtaactgggctatagtgtcagtgggagtgggaagggtaatcttcccagagaaggtgaagctagaactaaggtgttaaggaagcattaactagtaggtgaagaagagggagaacagtgttttacaggcaagttcaaatttattatcatctctgaacttcagttttcctacttgttcaatggaggtaatagcaccttcttccaaaggtcctcatgaaaggtaaatgagtcggcaagtgtaaaaggcctagggcagtgcctggcattagtgcatgctcaagtaaggcagttttttcttccttcctaagcttctaccttccacatgtgtaatctaggagagggaaatctcagattcacaggaggcaaagacctttatagggtgggttgtagtccccctgtccacccagatgatcaccattgtgttggtcagcatggaatctgaccaagctagttgtttggaatgagtggccttaggcgtaagtggtcacaggattggaggaaggcaaattcatggacagaaaagagagaaggaggtcaaggtaggtattccccctcctccaaaccatctcaaattgtcctgccaatccagccccctcctctcttggaattggataatcttaaaaaaaaaaaaaaaaaaagggcagaaagaacacgtatttacaggactgcctggctgacactgggctacgtgactgggtgtacattgtctagtttgatactcaccaagccataggttacagaggataaagctagtgtcccaggtggggtggtcagttgtctcaaatcactcaggtattgaggagcgaatcttgcgttcaaacctaggtatccacaatttcgggccagtgttctgttgccttatgttctctctactccctctagtgctgacctttgtctgggagaatgcagggagggggtgcactcaggcaggggatgctgccaaggaaatacttgtgtgagtgtggatggcttcagtcaggtcctctctgctcctggtgggggtggagatggggaaacctgggggtgggagactccacagtgtacaagctcccctatcccccatcctaagcacatggtggggagggtctccattcctaggcaggccttcttttcaatccctggactctgcaccgttccatcatttcatgctccctcagcaaaaacctaaggtggagagaagaggtctcataaacactttaagcctccgcatttgtaaccctcccccagccagtcaagccagctgtgcagactctgagccagagtgagggaaccaaacagccttctcaaccaacacccctctaagtaacaaagaggagaaccccctacccagtcagggccagacgccctagggaggagacactagtccaagtctccatcgtctatccctggagcccatactgaaacttaagaaagaaaagctagcagctggggaccccaggagggagggggtcaactctctactccaggcggctcccctcccttccctcctcctggctaataggtatttcctgtttatgaggcagctaaagctgagcttttgggaagggatggagatggagcccctcccctcctagggctgggttggggagtccttgaagtgtgactgaaggttgggaggctcctcccaggggaaggagtgttccttacattgaccatccacatcatctcccatccaaccccccacggcccacagcctctgcctctctgggttagggggcactggaggggcctgtttcctgttctcatctccgaagccctcaaaggacagcagcttccaggcaggggggtcggaggcggtggggttgggcggttggtacggaggtgaaggcaccaaggctggagaaaggggggaagggaagagagtgtcttgactgatgcgtcagtctgcaagaaggaaggatggcctcctatcgcccctccgtaatccaatctggtggtcattccgcagccccctccccccagcaaaacacagatcccaagcccttaggcggaggagggcggggaccccacttaattaacccttttagttctagtcccaactggtttcgcaggcaaaggaggagtggttaatttagggaaggggtgagttgaggggttgctacaagaattaagagaatgcttctttacccatccagcctagggtagggacgcgaaacaaggggcctccagaagaaggctggcgtctcagcagggagcacggacagggggtctgcagtcccttttccctcccggagcgcggcccggggtggagagagatacaccacactgcccaccccggctccgcctcccccagccgcggctcccgctccggctcagccagactccccatccggcggcacccggaggacggacaccgagcgcgcggctgcgcctccaagccctccccttcgccctccctctctggggtctctgcctccgtctccttttttaaaagctgcgtcacatgcatgccgttccccgagcgctcccagcccctcgccgcccgcccgccgcgcggcgcacgcacgtcgtcgcttgctgcgcgctctcccgggtcactttgacacggctctcccctcccactagcaggacaattagcatattaataaagcccggccctgcccggcttgggctggggagccggcgccggcgcgagggagcgcgagcgcgagggcggagaggggggcgctcggcgacggcggcgggagcgcacagacacgcacacgcacacgcgcacacacgcacacacggacacacactccgcggactcacacccgcgcgcacacacgcagaggccgctcgccttcctgcctggcttccttcctgtctgctccgcgcctgacaggcccctcgccgcagccaggggccgcccgcaccgggccgaggccgggccgggccggcggcgagcgcagcgggggccgcgggcggcggcggcggctcatgcccggcctgtccccgcgaggggcgggcaccgtgactcggctgggcccccagaggcgggcgatgtgaagatgtcagtgggctgtgcctgtcctggtgagtggggcgtgcggccactcggccccttcctgcccagccgtccctgcggacccctcaccccgtgtttggcgagaacttgtgtggggggcgtcgatggcatgggggaagccgggggctggaagggctacgcggggcctcaggctggcgggtagcgttttccccaactgtgtaaatgcgcagcagcccagaaacacggggaggagacgctgggggtggcttatgtgtatgtttttttgggggtaggctaattggggagaggtttggggggggctgaaattctcagaattccaggttgttagccaatcagaagtgactctggacttttgaccccccccctcaggtcaccatagagttgtgattggctggtttgggctgcccccccttccctgctgcccattgcctcttacctatcctgtgacatcccccccatgctgtttctgaggaccctgtttgcagggaggtattgattgcggcccatcttgccccccaccttcaacttttcctgcctgttgccagggaaggttggccctcctgaggcaccggaggtactcctaagaggtgccagataattggacccttgggtctggcatctccgccctagtgggagggcaggctaggaaatagagtgatttgtggagaggtaagctgggggagcaatacttgacccaaaactgagaacttgagagaggacccaggctcagatccctgcctccccaaaacatatcagctcttgccagggatagcctaggtctgagtttttttcctggggggcaggtggggggggcggagggcgtctacctcactgccaggaggaaagagagaagccatgcgactggagaggtagtctacagagggcctcacggca

SEQ ID NO: 5066 - DNA, 6000 bp, Homo sapiens
ccagcctgaccaacacagtgaaaccccatctctaccaaaaaatacaacaattagatgggtgtgatggtgtgcgcctgtagtctcagctacttgggaggctgtggtagaagaattgcttgatctcaggaggcggaagttgcagtgagctgtgatcatgccactgcactctagccagggcaacagggtgagacctgtctctcaaaaaaaaaaaaaaaaaaaaaaaaagaaactaccacagaatgaaatacatccaacatttaaaaaaaaaaaaatagtaagtaggccgggaatggtggctcatgcctgtaatcccagcactttgggaggccaaggcaggtagatacctgaggtcaggagttcgagaccagcctggccaacgtggtgaaatcccatcgccactaaaaatacaaaaaaattggccaggaatggtgttgggcgcctgtaatcccagatacttgggaggcagaggcaggagaatcactcgaacctgggaggcggaggttgcagtgagccaagatcatgccattgcattccagcctgggtgacaagagcaaaactccatctcaaaataaataaataaataaaaatgaaaacaaaaaaaacacttgagcccaggaagttgaagctgcagtgagctatcatgccaccacactccagcctgaatgacatggcaagaccctgtctcaagaaaaaaaaaaatttacttaataaatatttgttgagtaaatgaatacattaaatgggttcttattatataccaggtttagtactacaggctttacttctatcatcccatttaatcctcaaacagctataataatgagtaacaattatacttcttgttacagttctgtcagagacttttgaaccagagtgactccatctggagtaggggcaaaatgagggtaaatgaggctgagacctactgggttgcattcccaggaggttaggcattctaagttacaggatgagatagggtgtgggcacaagatacaggtcataaagaccgtgatgataaaacaggttgtagtaaggaagccagccaaatcccaccaaaactaagatggagaggagagtgacttctgctagtcctcactgctcattatgtgctaattataatgcattagcatgctaaaagacactcccaccagaccatgacagtttaaaaatgccatggcaacatcaagaagttaccctatgtggtctaaaaaggggaggaaccttaggggtccccctttccctgaaaacttatgaataatcacacattgtttagcataaaatcaagaaataactaactgtaggtatccttcgtggacaagcccaagcagctcctctgcctatggagtaccccattctttactcctttaccttcttaataaacttgctttcactttatagactctctcgcctttttttttttttttttttttttgagatggaatctcgctttgtcgcccagactggagtgcagtgatgcaatctcggctcactgcaaccaccgcctcctgggttcgagtgattctcctgcctcagcctcccgagtagctgggactacaggcgcaggccaccacacccagctatttttttgtatttttagtagagatggagtttcaccatgttagccaggatcttgatctcctgacctcgtgatccgctcgcctctgcctcccaaagtgctgggattacatgcgtgagtccccgcgcctggcgactctctcgaattcttgtgcgagatccaacaaccctctcttggggtctggatcagggcccacttccagtaaaaattccagtgtttatctccttcaaaactcaagtttgagttgagaacaatggcaaacttagttgccactgtaatcctgttaagaggtgggacctttaagaggcatttagttcaggagggctctgccctcatcaatggactaacgccattattgtgggtacagaccatttaatagatgaagacaacaaagatttagaatctgactcaaaattccagacttctcatcccatggatattgatacacaaataaattcgtgacatactaaggaataaagctgaccgtaaaactaccttaagtatgcatacccgtgggggcgcggtggctcacgcctgtaatcccagcactctgggaggccgaggcggacggatcacaaggtcaggggatggagaccatcctggctaacacggtgaaaccccatctctactaaaaatacaaaaaattagccgggcgtggtggcgggcgcctgtggtcccagctacttgggaggctgaggcaggagaatggcgtgaacctgggaggcggagcttgcagtgagcggagatcgcgccactgcactccagcctgggcgacagagcgagactccatcttaaaaaaaaaaaaaaattaaaataaaaaaaagtatgcatacccgtgtttgtttatagaaaaaaatgtgtgaaagaatttagtctaagatacgtatccctgagtaatgagattatgggcgatcttatttatactttcagcatttttagcaaaaaaacatggatttgttttaaggctagtcaagtgaagcaatgtatcatttttagagtcagaaagaaacagtaagttccttacagcctgggggcagtaaaaagaaaaaaaaataaacagtaacttcttttgaaactttaaaaataatcaaatcatttcaagatacatattttctacctctttgaaaagatttatttgaattagttatatctcttttatttgaattagttatatctcttttctttcacaaaaggatttagagttgagctcttctcaatgaaaaagttcattttctgtgtcttcctttttaccatttaatttcaagtgtattcaaccaattaagcaacaaggaattccaaatgtgttaccatccttcaaagcaagaaatgcctgagagtcctcactatatttgagccctgttaagactgcctagggtacataaaaatccctttatcatctctaccaacatcacatactactaactgtccattcagttgatggtaaattctcctaaaatcaggcctcttgatgtgaactaaggcaaagagttgagtttcaaaaacttcaataccatattcaataggccatgtcagacttctttttcaaacaattactaggacttctccagacactgtcatcttggtaaatagcaccttcaatgcattcatctgatcaaacccagaaacacctctccccatcatctctctgatctctcatgcaattccactttcttcaaaatatatctcattctcttctttccataaccactgcaacagctttaattggggggtgggtgggtatttttagctgataacatcttccactcttgccctctcctattctccatatagcaaaagccagtcatctcttaaaaatgaaaatctaatcatgttttaaaactttcaatggttcccaatacacttaaaatgaaatcagccataatatatcctttactccctgtatgatctgcctcaagtcttttctccaacctcttctgtcactaccccctttaactactatgttctagccacactagccttatttttgttccttcaacctgctaaaccctttcctaactcaggacctccaggtatttttctgtatgcctgtgatacctgttcactcttcaccttgctaagtcctactcatatttacttcatatcaatattaagagaagattccacatttgctttgctcacctggtacataactgatgcccaataacaagcagctgcttcagtttgttagccagtactagcacaaaaaattaaaaattcttaaaatgagggggagtaaaagttacacaaaggaacacaatcatatgcttaaatcaagaacctaagagtgtcgattttcttaaaaattatgttttaaaaaaactcaatgttttaaaaactatttctttgcaaaactgtaggaactctcaaaaaatctattaaaatgttaccatcaaaaaaagagactggaatgaagcaagaataaaacattgtcacaagtgattgcccaagagcgtaatgaaaacccttgaaatcatttttctcttcactaccttttgttttacaaaacgatgaggatgaggctgaatcaaaattttaactgcaaacagtttacgactcggaaatacacattttagttacttctggtcaaaatgagaaaaaaacttgcatggctggccatccgaaatattataccatgtttgggttaaatttaaattccatttaaaaggaaataaagagcaggggataggggctgtgaacactaaagccactggaaagtcggaaaaaagggaacattacctgctccctttaatgtatggtacagacattttcccaccccagaacgccggacactgaacaatgccggacggattctctagcagaaattccacgcaatcagttcgataagccagggtctctctctatcactgagctcacatcccgcctctgccctcaacagcttcatcgtcagcactgaagtctccggcccactctcagcgtcgtcccctgatccactcctcaatcctgggattcgcattgagtacatcacttcatttctagagtcccttctgagaaatcgcttccacgagcgcaatttgcaaacagccacgggcagggcgggaggaaaaaaaatgggctgaatgcctggcttacctggggttgcaccgtgctcgacaaggaaaacatctccggcgggccctcagcgacctcacccgcctgccgaaactgtgcccctctgtccacggcccggcggggaggcgctgagcccttcttttttcctttttctccgacccgttgcccctcactcctcccagaaacggaaaatggcctccccttcctacagctactgcaacgacagacaatccgccccggaaggcgaggcgctaactcaacagtacttccggggcaagtgagcgcccacaaggccaagtgcctgcgcgttctttcccgcggaagtagttgacatttacaaggagcagcgcccccaaaggtctttagctgttttttaaggggagaacagcctttaccctctttggactttttcttcgttttttttttttttggagacggagtttcgttctttcgcccaggctggcgtacagtggcgcgatctcggctcactgcaacctctgctccccgggttcaagcgattctcctgcctcagcctcccgagtagctgggattacaggtgcccgccaccacgcccggctgatttcctcttaagactttctacagcttccttatgaaatcttctgactgggccttgagcaataaggtcttttgctacaatttagtgctcttttcctcacactaaatcgaaaactctccctgttggtcctgatctgtttcagtcaggcaaattacatcctgggaaaacgtcagatgacaggggaggccactcgcttcctgctcatccagtttcgacactttctgtgctttcattagcttccagacctcagccctggccctcgctttactgtacagtcagaactggtttctacgcctcgcgagggtgggaggtcgtgtatgggaggaggaccgcttcccaccagcctcgttgggaagccaggagaaatctcttcaaatcctgcgattcagagtcaagtcccagtcgtcctttttctggtcggcccagaactgtttgtgcctcctccctcatgaggaatgatgtcagtggggccgcggtcgccgcccacgaagagtgtaaggctgcgaagtcggggctttcccgacgccccctccgtccgcgtctgcgtaggggaggtgacgagggcggggcgcggcggcggggtgacgtcacggccgcgcgcggcgtgggcggagcctcactttgaacccagttggcgggagtggctgctcgcggaggggcagtgtctgcggggccgctgtatgctgtccagcgatggatcccaccgcgggaagcaagaaggagcctggaggaggcgcggcgactgaggagggcgtgaataggatcgcagtgccaaaac

SEQ ID NO: 5067 - DNA, 6000 bp, Homo sapiens
gttgtggtgaaccgagatcgcgccactgccctccagcagcctgggcaacaagagcgaaattccatgaaaaaaaaaaaaattccatatatatatgtatgtatgtatatatatacgtatgtatatgtattctttccacctacaaatattacagtaatcaaagttaccaatataaacaaataatagctaaactaaagtgagttatttgcaaaggacaagggaattcaacttcagctattaagaagttgccacaggccaggcacggtggctcacgcctgtaatcccagcactgtgggaggtcaattccggcagattacgacgtcaggagatcgagaccatcctggctaacacggtgaaaccccgtctctactaaaaatacaaaaaaattagctggccttagtggcgggtgcctgtagtcccagccactcgggaggctgaggcaggagaatggcgtgaacccaagaggcacagtttgcagcgagccaagattgcgccactgcactccagcctgggcgactgagcgagactctgtctcaaaaaaaaaaataaaaaataaataaataaataaataaaagaagttgtcaccagttggcccaagtgacagagtgagacttcgcctcaaaaaaaaaaaaaaaaaaaaaaaaagaaaagttgcctctagtttaaaaaccctgaaagattaaatggtataaattgaacataccattcatattacaattaaaatagtcttcactttgacagtttagacaacacaaacacccctggaattgaagctccataagggcatttttgttatgttcaattcaccactatataccaagggcctagaatagtactgggcatatgaagacactcagtatttgttaaataaattcaataagtgtaaatgtttaataattgatttactgaaaaataacatttttttttaagacagggtcttgctctgttacctgggctgtagtacccaggggcacaaacacagctcactacagccacgacccccaaggaatccttccacctcagcttcctgaatatttgggaccacaggcatgtgccaccaggcctggcctaatttttaacatttttgtaaagactgagtcttgccatgttgcccacactggtgtctaactcctgggctcaagcaatcctctcatctcggcctcccaaagtgctgggattacaggcatgagctactgtgcctggcctaaataaaatacgtaacttaacctaaaagcaacagaacaatatgtaacacacagttccttagtcttcacgaagataaaacctgcattaaagaaataaacaaatgaacagttatctgagctaaattctgtccctcaaaaattgccaccaaaaaccaggttggggagaagccaaattcatgaaaagaattctgggtcctaataggctgacatattttagtctcttggccctgttggtattcctcaagtgaaccatgttgagtatctttgtgttcaacttgcagtagggccagcccaggtgaagaaagctgtaaacataaagtagatgggggaaaaatggccaaactggtttacattagtcttaagtgccttctatttggctaacatagagtgttttgctgttttatagagatgtatgtttcatttgctgtagccctgtgaagtagggttctcattttataaatgataatatacatagtgtcagaatctaagttcaaagtcacatagctagtaagtggcaaaattcgaatttcatactttctatctctgagcccaagctttactcactataccctactatctcttatcatgaaagatatcactgacttaggacttagggcagtaggtttctgccatatctaaaacatttaaaaagctttaaaatatagatgcccaggctctaccctacagaaatttttgatcttattggtcttacagtccagcatccatgcatattctgaaatgctccccaggtaattctaacatggaagtaggttgccaactactaatctagacaataacggtctttgaaagtcatgttaaaaatctaccttaaggtatgtcaaaagagtacaaagatgagagtagtacaaagatgagagtaagccagtgtcatagtcacctacttcagtaaatggcagccagaatcttcgcatttctgttaataagttttaaatgcctcactagcttttttttttgagatggagttccactctgtcactcaggctggagtacaatggtgcgatctcagctcactgcaacctccgtctcccaggttcaagcaattctcatgcctcagcctcccgagagttggaactacaggcccacgccactacgcctgcctaatttttgtatttttttttttttttttagtagagacagggtttcaccatgttggctaggctggtctcaaaggcctgagctctagtgatctgcctgccttggcctcccaaagtgctgggattacaagggtgagccaccgtgcccaggctcactctttggcttcttacttttatggaaatatccaaagagcatatgaaaagttaggtcagcttttggacataagaacttttctaggctgggcacgatggctcatgcctgacaatccagcactttgggaggctaggcgggaggatcacttgagcccaggagtttgagaccagcacaggcaacatggcaaaactctggctctataaaaatacaaaaaattagctgggcatggtggtatgtgttgtggtcccagctactagggaggctgaggtaggaggatcacctgagcctgggaggcgggggttgcagtgagttgagatcatgccaatgccactgccactgccactgcattccagtctgggcaacagagaccctgtctcaaaaaaagaagaaaaaaagtcactatgtaaaaatgaaaagcaggaggccctcaaaggaaaaaaattaactacaaaataccccacatcagaacagggtctcaacagaatagaactggcagtggcaggtggtttcctctgggcatattttaatttgccacaatttgccaatttacaatgaaaggaaaacctggtaaattatcagaccccctagacaactggggaaactgacaaataagtttgtgcattagttcatacaacaaatacttactgattacctactgagtaccaggctctgttctgggattcaagataaacaatagtaagtttctgcttccaagagcttataaaccacacacatatcacacacatatatatataaagcagtcaatacaattgtcaggatgttgacctgaaacaagggctggatgaatcaccagttatctcaactgaaaaaaatcagtgacataattcctattaactgagatggctcaaaattctaagctccaaaaaaatgtctgtcactctggaaggatgtgtacccttgggtcatttgtgttctgggtgtggcaggcccaaaagcatttaactgggtataaactcaattaagggagggccttcatttaacaccttacagttggaattttactgagtacaaagagttggtaccacctgctgaaatgggtggcaagtggtgtctattgagaattgtaagcaaccacaaacatcatgaattagcttgtacaacttgctatgccaggaagtaagacttggctcgggggaaatgtggatctagagtctccaaaaactcatggtaggacccacggaccagaatttcaacagcagagggcggtgcacccgacttcacaaagagttttaccgactggggccccccaagaatgggcaactggactcctgtacgagctgaaacgtcttcaatgaactcaacgatcgtcaagtacactaaatgttcagcgttggactcatttggctgttttccataacctctactctggtctgaccgttaaatctcccttgcggatactctgaccttacagttcggaggtggggacgggatggggcgggggggacggggggtgcgggttcagggaaagtgggagaatgaaatcagcctatcaggctttccaaaagaatgcttatcattggttctcagacagagacttaaaattataagggggtcattcccctgaaagataacccggttcttgccagtgacatcgctgacaaacacttcacaagttggggagggggaagggggaggggaagagggtaaggaaaactaattttgtggattaacaggagtccctctcaggtcaaaacggggttccaaggaaaccagacgccactccttagctaagtttcacccaaagtctacgacccaggccgctcgctctgtcctcccccaggtctagactccaaactttttgcccctctcacggccccctggccgtggaactcctcccggcacgccgggttctgctcaccaagagcctcgagggcgggcgcgggcagggccagagcgagggtcggcggctcccggtcccccccacagctgcccgtacctgtccagcatctgctgtagggcttggtccggcatcttccgcggagccggcgcacacggccttccccagtggacccgctcaaggccaggcccagggacaatagcactgagaggcggcggagtaggccgcagtccggcggcagccgcgaacccgtcacccagcttcccggggcagctccgctagcctggcggcggcggtgcagggcctgcgggagtccggcggaggcggcggagagcgaggaggaggagcctgaggcggggaggcggcgatcgcggcccgggttcccgtccgtcggcccgaggttccggtccatggaccgcgggcgccgagttgctgccggcggaggagctacctttgtgaggtaagagtcgccgcctccgtgcgcgccagggttacgacgcagggcggcccagagcagcctgggagatgtagtcttcggaccgtctccactagaggctgcacagcccgcccggaccaacgcctccgcgcctgccgccgtctggccggcgccctcccgtttccttcctccagggggaaaaaatgtctttcgggccgctttccaggaagcagcaggatgcgccgctccactgtcggtagcaacaaggtcagccctccctgcctgtttgtttttgcctccgctcttgccctcaggtgggaccgagccaggtgaggggagggggctgaagggccatttcttatcagggtccccggccccggccgtggcgtcggggcggtcagtggcggcagtgggggtggcagaaactccttccgaagcccccggcgctggagccagcctctcctgcggcagagcccattttgggggaattacaccacctccgcgaggggtcggttggtttggtgcgtgaggttcttcttgagggggcgggcaaatagggactgcctggaccagacagcttccacccgagtctctctgtgtgtttggggctggggagttgggggaaggaaagatgattctctccctctccaggaaccttctcaaatgtgcctgggctttccagggctcgccgacagtctccaaatggaacacgttggtgaataaacagctcttgcttactcagctgtgggttgtcagggatgtttgtttctctctctgctgctggtcactgttaaccgtttctagtcgcgttgacaccttcaagcaggtggattgggagtggcgggggtggggaatcaaaaaggagaaatcatcagtcactccttgggtcagcttctgacgttcgagggatagctttggcgggaggaaagagctgtcggctcaaacgaatgcgttttttggacgacctgtggcgttttctctagggctgtgattggtaggacgctggtagttttcccttgattatgtctaatatctgctacaaggtgtttgattttttaaaaaatgaaaatgtgtttttaaagctctttttatatgtagaattttacaatcaacttttcattatctgttcaaaatttgcgaagtatatttgaactagagtgttcattgctgggaaaaaacaacaaacccaaaaaatgtgaccagaagcttacttggcctccaatttttgaaatatg

SEQ ID NO: 5068 - DNA, 6000 bp, Homo sapiens
agctgactaaacataactgaaccgaagttcatgaaataatctaaccattctgaagggtttaagtccaaaagatcaaatgggcctactgggatgtttacctaattttctctaatacttacattttaaattctggaaattgctggtatctttggaattctgcttcccattcctcttggcttgtaggtggcttcatctcctttattaaatgccaatctaccatcgagaggccagactctgtcaaccttaggataggaaagaaattttggggtgtatgcgtgaggctggattactcacaaaaggtttatagcaacaagtggatctgaacttaaccttgttaaaggtaaacacattgtttccttgtttcctcttttgagacatttctctgttactgcttggaattttgtcagaaacagctgccatcaggtacaaatttatttacccttatattctctcaatccttttattcaactctccccaattcttttttttttcccaattcttcctttcactagcattcctcaacaggtaaaatcaacccctacagccaaagaaatgtgttctaaatgcataaccaacattccttacccagggaaaagagacctgttacatgtatacaggtttagattcttgggtgaatttaaagacaataaaattcaaatttgtttcacttgctcataacaacctatataacacataaggtattttgaaataagggacgtggaatgtgaagagaatttgaggaagacacatttgattaaaactagaaacttttttaccaaaaggaattaggattcctagagtaaaagcctgattttaggcctgaggcaagaaatgcacaagatgagctcggaacatcttgtcatactagaaagtaaggaaactatcaaaggtaattagggccctgccaaaaagtcactagagccaatttcaggagatgcccactgactaaagatgggacaatctgagcaaatcactaacaccatcatcacaacggaccgaaacattatcgagtgtgtttgaacctatgatctcataatgagccttaaaaattcaaatcctttatttgttgcctttggaggatttgggggaccaatttattattttgaaaattggtaaataaagggaaagaagaatcaagtatgtatcctgcctttcctatacaaactataccttgggatatccaaactgatgatgagggaaagctttttagagttgagctaataaaatattataattttgctacgctaatgaaataatggatctaggcaatggtaattaatggctgttaacatctataatagacaccagatattcacgaatgttctattcacctactgaagtattttgctccctcatccctaatttgaatctgatcaaccaactactcattcacaggaaatagacgggacaaaggaacatgttaaatatcacacagttatgcagtcagcaaaatctaaactgtgcataaccataggacaaatgactagagtttcctcagcaactagaagagggggaaagggaggagtgtctaaatctatagtctcttgatagatttaaacaaacctaagaaacatgaaccaattgtgatgtacagaacttctttgggtttaattcaaacaaactgtaaaaaaagttttgagacaaacttggactctgattgaaagagaaaagatacataaacaatgcacaggtaccagttaagacataaaccagtctttatagaaggctcctactaataaaacactcaactgttctatggcagggcaagccatcagacatgttccttctttaaggcctcggtttctccatctatacaatgagggagctagactagatgctctgtaaaattcctttctccagctgggcatggtggctcatgcctgtaatcctggcactttgggaggccgaggtgggcagatcacctgaggtgaggagtttggatcagcctggccaacatggtgaaaccctgtctctactaaaaatacaaaaaattagccagatatggtggcacgcgcctagtcccagctacttgggaggctgaggcaggagaatcgcttgaactcaggagacggaggttgcagtcagccgagatcacaccactgcactccagcctggccaacagagcaagactctgtctcaaaaaaaaaaaaaaaaaaaatcctttctcctcagtcaacctgtgcttctactgatgatccaaatacctgactcactacgagcaaattacttacctagttactccaccaagaataactgctccagccactgttccactgcagaccaggagccatcggcccaccacccgctcagcagcctttgagggaagggacactgtaccccttccagattgcaaagctacttcagagatggtgctgtattgccctggcctcaaagggcgcctgatgcaatcacactaaagatcaagatagacaaattacaactggagaaacagggaatggctgctacccacactcaaccccattctgattagcgcgaagtaccatagcatccccacagccatgtcttgttaagtcatcatctcttatctggattactgcatcagccttccaactggttttccaattggttttcaaatctagcctcactcaaacctatccccaactacatgaatcttctcatctctgaatacttccctcagacttcactctacttacagatatggaatattttctttcacctctaggtctttcaacatttctctctggcttgtacacttcctttcccctgattaataatacctactgcagatctccgcttacatgtcacctcctctgggatgtattcccaggctcttcaaggtctgcaataggtcactcccacagcacactggaaagcccttaatacactgtaatgtacagtcaagcatcacttaacaacaggggcacatgttctgtgaaatgcattcttaagcaatttcatcattgtgtgaacctcatagaatgtacttacacaaatctaaaggctgggtgtagtgattcacacctgtaatcccagcactttgggaggcagaggcagggagatcacttgggtcaggaattcaagaccagcctggccaaaatggtgaaaccccatctttaccaaaaatacaaaaattagctgggcatggtggtgtatgcttgtaatcccagctatttgagaggctgaggtggcaggatcacttgaacctgggaggcagaggttgcagtgagccaaggtctcaccactgcactccagcctaggcgatgaagtgagactccatctctcaaaaaaaaaagtacttacagaaatctagatggtatcgcctactacacccctgagctatatggtatgacttattgctcttaggctataaatctgtatggcatattatgtaccgaatactgtaacacaatggtatttgtttatctaaacatagaaaaattacagtaaaaatatggtataaaagatttaaaaatggggccaggtgcaacggctcaagcctataatcccaaggctttgggaggccaaggtgagaggatcacttgaggccagtagttcgagaccagcctgggcaatgtagcgagaccccctatctctattttttcaaaaattaggcacagtggcacacacttgtagtcttagctacttaagtgactgaggtaagaggatgcttgaggccaggatttccaagctggaggctgcagtgagttataatcatgccacagcactccagcctgggtgacaaagtaaaacgctgtctctaaaaaagaaatttagagaaaaagatttttttttaaaaaaaaggtacacttggaaaggcagctccattataatcttatgggaccatgactgtatctgtggcctgttgttgaccaaaatgttgttatgcagcacatcactctaccttcaggttcatctgtttgtatctcccactaaactatgagctttggggtggcagtgtccggtcagtcttgctctctcccttctgctagctttgtttctaacactgttcctttatataatgagaccatgataaggatttcgcaaatgaataaactgacttcctccagggcaggagtcttgtaatatttatctttctttttccagttcctaatatataataaccactcaataattactagttaagcaaatgcatgccctcttcttactatatccctgtgagtccaaagatccatgctcggtttcctatttctgattaactgagtcacctttagaaaagtaactttaagcctcaatttccttctctgtaggatgcagtaatacttcctcatctgactacttggaactttttaagcaaaaataaactatatgggtaaaaattactcagcttttaccatgtgctaaaggcctgatgtatattaaagaatgtaatcctcataacaaaccttaaagtaggtattgttatccccattttacagataaggaaactgaagaacagaaagtttaattaacttggccaataccacacagcaggtcaatgttccagatctgaacctaggggctctgatctgaacctatgcgttgtgagtgcactgtaaggagctccggaaacgtgatgtggggctctacattatctttatcccggccctttcactccatccccgctcccgcgactcggagtccgctgcagtgcggtacctgtgctctaggcgctgccctaggagccaggagcggcagatactgcctccccttcaaggccctcaacggcggaaagagcaatcgctgcatactgatgacagggaacagccacctcttccacaacccagggctctgtggtctccctcctccgccaaggaaaagagaagcacttccgggtcgggcagcgggagccccgccttctctggggaccggagcgaacagaagtgcgcctgcgttgcgactccgctttcgcgggggctgctggggcgtaggtgtcggggacgcgcgcacgggcgcgcgcagctgttgacgcgcttcttagctggtgcgcgccggagcccaaattccaagtggaaactgcaggcgcacgagggaggaacgcgtggagcatgaaaaggcagggggcctcctctgagcgaaaacgagcgcggataccgtccgggaaggccggtgcggaaggtggcgggggaggggacggtcggccgaaggctccccggggcgggccggcgggagtcgtagtcagtggtgatttcttctggagtcgtttcctcagctccttccagccccttgggcggcaccttctatctttgaggcgttaaaggtgtggaaacggagggcgtgacgaggggcaggtagcgagaatggctcagctgtggagccaaggttcgagtcccggggtcccctcataacggccctgcgaccttgtgcaagttggttaacttcagcttcacgttttttccgtcgccacacgaggatgccagtaccgcccgcaccagcagccagtactccgctgggatagttaattgtcgagcgcggagcccagttcctaacctgcagttacctgtagctgccacggcggggacggggcttggtccccaaagtcacgcagctaccaagtggccgagcttgtggctgctccaagacccgagttcttcctgagtgccagggtagcatggcatggcaggtgccagagaatttggcaagtccctcttcctccgtgaagaggaaccttcctaaaagttatcaagaatcctcaaagattttttctttatgtggattacatctatctattttgactgtattagaaattaaaacaaatttttttttgggaggccgagggggacagatcatctgagctcaggagttcgagaccagcctggccagcatggtgaaaccccgtctctactaaaaatacaaaaattagctgggcatggtggcaggcgcctgtaataccagttactcgggaggctgaggcaggagaatcacttgaacccgggaggcggaggttgcagtaagccgagatcgcgccactgcactccaccctgggcgacagagcgagactccgtctcaaaaaaataaaaa

SEQ ID NO: 5069 - DNA, 6000 bp, Homo sapiens
tgagctcaagtgatctggcagcctcagcctctccaattactgggattacaggtgtaagccactgcacccggctgatgtttacattttcaaaagatttaaaaataaaataagtgataaagatcaaatgtgtccagcaaggctgaaaatatatatactatgcagctcttcacagaaaaagtttattgacccctgaaataaatgaaaaactggccatgtgttgaaaatgggtgaagatgagtgatgcatacatggggcttcattatcctatttgctctacttttgtatatgtttatttttccataataaaatttttttttaatttttctgaacctgagatgatggaaatgtctgtgcttcccattaaaacaggttcagagtacaacagaaactttgagggaaaaatagataatgttcaaaagtaaaaaagataaaattcctcatgatgaagtctctgaagtcatctttaagttaatggtttaaaaaaattaaaattttgctaagttcaataaaaaatcaagtcattgagtaagtactattgtcgacacttgacttaaaatgtgacccacttggggagagggagagactagatcataattttccagtagggtttctaattggttgtttctgaaagcattatgagggatgcttagagatcacaagggcttctgagataagcacacaggattaattttcagactcttaaaagggtagccaacggtcattcactatctgatttctcttacctcctctttctgcattcacagctgattccactgaatcaacacaaacttccatgagaaatccatttgctgctcctaaaatacatggagaatggtaagagttcataaaggttctatccatccagaccaatttaccacaaagggtttacattctgctgccaaaatgcaaatgtccaataacaggtaatagataagtacactagggcccatgaatgcaataaaatatcacattaattattgaattgatgcctatagactgaaataggtacacagacagatgtataaaaaattatactgaggaaaatgtctatcgaatgccaaattaatcttcctaaaacatagacctcatcatcacattccagctgagattcttacaatgcttctcaatgcctgcagaatatatttaaacttctttataaggaatataggtttaaaagcaggacagacttcaaatccatgtcccaccaactatttagtgtgagatcctagattagttacttaagttttctataaaacaaggtagattttagtatgtacctcagagtagtgaggattaaattagataattcatgtaaagtatatagtctcaagaatcaaaaagtattagttatctggccgggtgtgatggctcatgcctgtaatcccagcactttgggaggccgaggtgggtggatcacatgaggtcaggaattggagatcagcctggccaacatggtaaaaccctgtctctactaaaaatacaaaaattagccaggcatcgtggcatgcgcctgtaatcccagctacttgggaggctgaggcatgagaatcgcttgaacccaggaggtggaggttgcagtgagccaagattgtgctactgcactccagcctgggtgacagagtgatactctgtctcattccttcttatgcttccagatctctccagtccctaccgctggctccccaatgccttctcctcaacccagagttccttctggcttcatctctgaataaaatttttcaaggaacatttccatgattttttctgtctcccaaagtagaaaattttatgtccctcttttgaactcatttaactcttcatgagttatgaaaccccaattgttccttcttaaaatatgaattactttctaccttttattatttatgcagataaatatctgatcacttctacttgacttagagttcctaagtttgtttttttttttttttttttttttttgatacagagtcttgctctgtcgcccaggctagagtgcagtggcatgatctcggctcactgcaacctccgcctcccaggctcaagcaattcttgtgcctcagcctcctcagtagctgggactacaggtatgtgccacaacacctggttaattttgtattttttgtagagatggggtttcgccatgttgcccatgctggtctcaaactcctgcactcaagcgatctgccagcctcggcctcccaaagtgctgggattataggcatgagccaccacgtctggcctcctaagtaaggtctttatgtgagaaatctttatcatcacccacaccaagcacagtatctaccatggtacacaataatcaaatatttactaaaagctgaataattacaacaaaattaatgtatttatattacaaagtgtgatgtaaacagagttttgagtttttttccgggagcacataatttaaaaaaatgaacgaaacaatgcacacttcatgtaatgacacttactagaatgttcctcacatactggtaatggtcacttctggtggggtgtgatttgaaattatttttattttcttctttttacttttctttattgctttattttttctacccaatattgcttttataatttaaaaaagcaatttttactttgaaaaacaaataaaacaaaaacctatcatctgctaacatcaaactgcaattgccttacttatttaagactatcagtccctgtccggcgcggtggctcacgcctgtaatcccagtactttgggaggccaaggtgggcggatctgaggtcaggattttgagaccagcctggccaacatggcgaaaccccatctctactaaaagtatataaattagccgggcgtggtggcgggcgcctgtaatcccagctattcaggaggctgaggcaggagaattgcttgaacctgggaggtggaggttgcagtgagctgagatcaggccactgcactccagcctgggcgacaagagccagactccgtctcaaaaaaaaaaaaaaaaaaaaaatactatcagtcccaaactgtgaaagggttaagtgtcaatctatgctcttaaccaacagctctgcattattaactccatgagtttcctggtagctaccagaccagctgtcagatcagtggcactggccgatgctgatgctgccgggggactatttgcctcacacaagaaaggaccctaggcaggagaagatggagagatgtataaaaaaggctatgacagaaggcagagcaaggcagttgtcccaagcaacaaagttataggatcaaaggagaagcagcagcagttctcaaagtgtagtagtccagagagctttgggagcctctgagacttttcagagtctgcagggctacaaccgttttcttaataattctaacactttatttgactttttcactttaattctctcacaagtgagaggcgttttcttttttgaggcagagtctcactctgtcacccaagatggagtgcattggcgcgatctcggcttactgcaacctccgtgaagaggcgttttcaagaggctacttgacatgttagactgaatgaagcagcgggcatgagaatccagctgtcttccattaagatatactgaagaaacttgcaaaaatatatttccactcttttgctttttttgttgttgttgtttaggaatatttctttttcaaaaaaatattatgtcaatatgtaatgggtttactatggttattttctaatcaatattttaaaattttgttttaattttatttttatttttttgagacggagtctcgctctgtcgcccagggtggagtgcagtggcgcgatctcggcttactgcaacctccgcctcccgggttcaagtgattctcctgcctcagcctcccgagtaactggtattacaggcgcctgccaccatgcccagctaatttttgtatttttagtagagacggggtttcaccatgctggccaggctggtctcgaactcctgagctcagatgatctgtccccctcggcctcccaaaaaaaaatttgttttaatttctaatacagtcaaaatagatagatgtaatccacataaagaaaaaatctttgaggattcttgataacttttaggaaggttcctcttcacggaggaagagggacttgccaaattctctggcacctgccatgccatgctaccctggcactcaggaagaactcgggtcttggagcagccacaagctcggccacttggtagctgcgtgactttggggaccaagccccgtccccgccgtggcagctacaggtaactgcaggttaggaactgggctccgcgctcgacaattaactatcccagcggagtactggctgctggtgcgggcggtactggcatcctcgtgtggcgacggaaaaaacgtgaagctgaagttaaccaacttgcacaaggtcgcagggccgttatgaggggaccccgggactcgaaccttggctccacagctgagccattctcgctacctgcccctcgtcacgccctccgtttccacacctttaacgcctcaaagatagaaggtgccgcccaaggggctggaaggagctgaggaaacgactccagaagaaatcaccactgactacgactcccgccggcccgccccggggagccttcggccgaccgtcccctcccccgccaccttccgcaccggccttcccggacggtatccgcgctcgttttcgctcagaggaggccccctgccttttcatgctccacgcgttcctccctcgtgcgcctgcagtttccacttggaatttgggctccggcgcgcaccagctaagaagcgcgtcaacagctgcgcgcgcccgtgcgcgcgtccccgacacctacgccccagcagcccccgcgaaagcggagtcgcaacgcaggcgcacttctgttcgctccggtccccagagaaggcggggctcccgctgcccgacccggaagtgcttctcttttccttggcggaggagggagaccacagagccctgggttgtggaagaggtggctgttccctgtcatcagtatgcagcgattgctctttccgccgttgagggccttgaaggggaggcagtatctgccgctcctggctcctagggcagcgcctagagcacaggtaccgcactgcagcggactccgagtcgcgggagcggggatggagtgaaagggccgggataaagataatgtagagccccacatcacgtttccggagctccttacagtgcactcacaacgcataggttcagatcagagcccctaggttcagatctggaacattgacctgctgtgtggtattggccaagttaattaaactttctgttcttcagtttccttatctgtaaaatggggataacaatacctactttaaggtttgttatgaggattacattctttaatatacatcaggcctttagcacatggtaaaagctgagtaatttttacccatatagtttatttttgcttaaaaagttccaagtagtcagatgaggaagtattactgcatcctacagagaaggaaattgaggcttaaagttacttttctaaaggtgactcagttaatcagaaataggaaaccgagcatggatctttggactcacagggatatagtaagaagagggcatgcatttgcttaactagtaattattgagtggttattatatattaggaactggaaaaagaaagataaatattacaagactcctgccctggaggaagtcagtttattcatttgcgaaatccttatcatggtctcattatataaaggaacagtgttagaaacaaagctagcagaagggagagagcaagactgaccggacactgccaccccaaagctcatagtttagtgggagatacaaacagatgaacctgaaggtagagtgatgtgctgcataacaacattttggtcaacaacaggccacagatacagtcatggtcccataagattataatggagctgcctttccaagtgtaccttttttttaaaaaaaaatctttttctctaaatttcttttttag

SEQ ID NO: 5070 - DNA, 6000 bp, Homo sapiens
cactttaagaacttacagtaaattcttcagtcgatgggaatataataccagactgaaacttggacctacataaagaaataaaagctccagaaatgccaaggggcagtgtaggggaaaggaaacagagagggaaagagaaggtaaatatatttttcccaaaacaccctataccttacatcagacttgatgaaagactgaatactttccccctaagctcaggaacaggacaagagtatcctctcactactctcccattcattgtagtagaggtcctagccaatgcaacatggcaagaaaaatagaagacacacagattatcaatgaaaacattaaactgcagtcacttgcagtgacatgactgtctacttaaaaaaaatttacccaaaattactattaaatagatctactaagtgaagttagctagattacaggatatgatcaataaacaaaaattaatagtatttttccctatttcacatcatatataaaaattaactcaaaatggattaaaagctaaagctctaaaattctaagaaaaaaacaaaggtatatatcttcttgatattggagaaagcaatggtttcttggatatggcacaaaaagtacaagcaacaacaatacaaaataataaattggactacatcaaaatgaaaaagttttgttcttcaaaagacaccaccaagaaagtaaaaagacaacccacaaattgagagaaaatatttgcaaatcatgtatcaatccaaacatatgacacaaaaaagtctaaaaataaacaattcataaattatgcgcttttctgaatagcatgatgaaatctcccactgtcctgttccatcctgccttaatcataaatcatccctttgtccagaacatccatgctgtatacaccacctgccctcagtagccatactgattatcagatcaactgttgtgatatctcagtgctatgttcaagtaacccttattttactttataatgcccccaaagtgcaagagtagtaatgctgatgtattgttataattgttctcctttattattattagttattgttgttaatctcttattatgcctaatttataaacttgatcataggtaagtatgtatgagacaaaacagtatatacagggtttggtttataaactttatcataagtaagtatgtatgagaaaaagcacaatatatatagggttcagtactatccagggtttcaggcttccactggggtcttggaacatttcccttctggataagggaggactactgtatacaaagaaatcttacgactcaattataaaaagataaataatacaattttaaaatgggcaaaggacctgcatagacatttctccaaagaagatatacaaatggccaataagcacatgaaaagatactccacacctttagccatcagggaaatgcaaaccaaagccacaatgagaatcaattcatacccattaggatggttataatcaaaagaacagagaacagcaagcgttggtgaggatttggacaaattagactcctcatacactactaatgagaatgttaatttggaaaacagtccagcagttcctcaaaaagttaaacagagttaccatatgagtcagtaattccacccctagaaacatactcaagggaaatgaaaacacaggttcacacaaaacttgcacatgaatgtgcaaagcagcattattcgtaacaggcaaaaagtacaaaatatccaaatgtccatcaataaaataaatgtgatacatccttacagtggaatattattcatcagtaacagagtattgatatatgctacaacgcagatgaaccatgaaaacattatcctaagtgaaagaagtcatgcacaaaagaccacaaattatatgattcaatttatataaaatccccagaatgggccagtctacagacacagaaagtaggtcagtggttgccaaaggatgagggaaatgggggaaatggaatatgactgctagtggatatagggtttctttttgaggtaaaaaagttcattgtaattgtggctgcattaactgtggatatactaaaagccacagaattgtgcattttaagtcagtacattttatggtatgagtatctcaataaagctattatttaaaaaagaaaaagactccaaatctctatctctaatcctgacctatctcctaaagcccggatcactataatgcaatatattacaggcatctcagattttgcatgttgaaaacttaaaaattcactgacttcacagatgcttacctctgataactggaaacactgtcattcaattacaccaaaagaaaccttggagtcactctattctcttactctcctttatactgatcactataaaggctatcaggtttacctctttgctgctcttaaacatgacttctccatgccccagctttattttaggcccttagaatttcccaccaaaattactgcagaaatctcctaaatgatcttactgcctccagtcttgcatttcttcagcagatcctccactgctgccagagtttttctaagacgcgaatatggtcacatcaatctcctactcaaaaatccaaattcctgctgggcgcggtgactcacacctgtaatcccagcactttgggaggccaaggcgggtggatcacgaggtcaggagctcgagaccatcctggctaacatggtgaaacccggtctctactaaaaatacaaaaaattagctgggcatggtggtgggtgcctgtagtcccagctactcaggaggctgaggcaggagaatggcgtgaacccaggatgtggagcttacagtgagccgagatcatgccactgcactccagcctgggcgacagagtgagattctgtctaaaaaaaaaaaaaatccaaactccttcgtaatcttacaaaacttcaggacagacagctgaatctctctggctgcctcttatttcatcactcctacaagtgtcccatctttagccatctttatggcacgctacttacttctgtgtatattcttgcttttccctgcaatgctccttgtcaattttttacttggctaactactgtctactagtcttgaaactgtagacttctgtgactctcctcacaaccaggcaatatgcagctcctctgttttctcacagcgtgttacgcaagtctcacttatcacactatcacgctgtgagtcttccttataagatggagaattatctgagggctttcatctccatatccatagcatatggtaagtgctcaaaactaaggaatgactgagtggtcttgtaaatggtagaactttcatctgccttaaaatgatctaacaactagcatttaataactcaccctgtattgacattaagtcatatatatgaaaattctaggctaccccaaataggttgttatatttaaaagctattcaacacttacacgtaagacttaatgagagcttagtgatacacagtattaaactttagactagacaacatgttagcgtcaaagtgggattttacttacctttacaacatcagctttatgcttttctaaaacttgaagagtttgggcagtaatggaatcaatcactaccacaagtgaatgacatccataagcaattaaaccttgccagcccctagcaaaacagtaatgttaaagtttaagtacagaacaaagcaggacgacttctttcttgccaagcctaaataaatgataagtctaattcatatgtaccaccattaataaaatcatttaaacccaaaggccagtatttatcattatcccacttaaataaaagatctggctaagcttaaaatgcttgttgaaattcacttttcattcggataaaaaaagttctaaaagatatgaaaatagagacccgaggacataaaaaggaacttgtgccctctgactgttcttgtaggcatacgtctttcgcttatccgatttctaatccttagtatccacaatgtgcctggggatactgcgactaatcctagtccttccaactaaataaaacgacaaacactgcacaagacgtttcagtcctcctaacaacatcccacagccacagaattttgctttacatttgtctaatgagtagttttcagagctgcagtagtaatttatagtgaaaggagagagtaataaagacgacctgttgaaggcaggaatgttctacacaggaggagcccgaaaagaggtgaaaaggacaggtgaaagaacaggcgcctagcacagggtctggcacattgttgaaagacaacaggaatacaagacaacgaaaaagaaaagacaggatgggaaagagaaagtgcacagggaattaatggtggagagagagaagcctggaagctggaggagaggaaaagagagaggaatggaacggcaaaagggcgaggtgcagagaaaacagcagagaaatacgcgagaaagaggggaaatgtatttgcatgggggaatttcccacacggggctattatcacttttgtaacaacaaaaatccaccaactgaaagcaagctcattgcgtgagggcggctccctgccttagcgaggccaaactaaccagggggtgaaacctcttgtccttcccccttccccctcacacattcctggccgatcctggcgacctggaagctcggcgtcctcaccagtccaccgccgccttgttgtgggcgttgagggcccccgtgagggtgcgcgccgacaccttgaagttcactgtgtagggcaacatcccggcggccagcccaggacctgggcgctgacccgcaaccaggaagcggcggacactgtgcttccgttccaaacagagtccgggtggccccctcggcgccgctgtcaggttcctctagattcaagttctacaggctccgggttccaccgctcccggattccatcgcccccaggttccgttgccttcagtttcctaggatcctaggttccgcactctccagagttccgccgcttaggcggttgtgctaatctgcgtcagctggggctgtatttggaagaagaggcgctgcctccagtcaagtctgtttttttcaggtggggactgtaggcctttgtgccctgctggaaatcgtgaaaagcaagagagaagagtcccagttattcttgctgcctttgataagtgaatttagggcaactactagtgccagtaggcatgggggatctaccgatgaagaagacacaaagtctccgctctcgtggagtttacagagaataatgaatgagattaattaagaaatgaatgagattaattgaatgaaattgccagactgaatgaagtgaatggcctgaatataaacaatttccaaatacagataacactgcatatctggtgtttgcaatactcccttcgcacttgaggaagaagcactatgtctggggccaagtgtgaccctttgtctgttgctgggtacctttcatttcgcactttctcctctgctgctctccaggtcagacccagtccttccctcctttgtgttcagtgttgggtttatacgctttaactatagcacttaatgcaatgatttcttttcagcaatgatatttgcagatgtgtgtttctctccccaatacattgttagtttcatgcgcgtccgtgtgaagagaccaccaaacaggctttatgtgagcaataaagctgtttatttcacatgggtgcaggtgggctaagtccgaaaagagtcagcgaagggagataggggtggggctgttttataggatttgggaaggtaatggaaaattagtcaaagggggttgttctctggtgggcaggggtggatctcacaaagtacattctcaagggtggggagaattacaaagaaccttcttaagggtgggggagattacaaagtacattgatcagttagggtggggcaggaacaaatcacagtggttgaatgtcatcagttaaggctgtttgtacttcttttgtggatcttcagttactttaggccatctggatgtatacatgcaagtcacgggatgcgatggcctggc

SEQ ID NO: 5071 - DNA, 6000 bp, Homo sapiens; identical to SEQ ID NO: 534

SEQ ID NO: 5072 - DNA, 6000 bp, Homo sapiens
gaatgtaaaatagtacacagccacttgggaagatgttctggtagctttttacaaacctaaacctagtcttaacttacccaactgagatgaaatgttatgtccacataaaacctacacaagagcatgtaaagcagcttcattcatgatgccaaaagttggaagcaacccagatgtccttcaatacatgaatggataatctaactctgatacatccatacaatggactattattcaccaaaaccacaaaggagctattaagttataaaaaggcatggagaaaccttaagtgcatactgctaagggagagaaggccatctgaaaaaaagcaaatactgtatgattctggctatgtgacatgccagaaaagccgaggatctagcaatagttgagagaagtggttgtcagggttttggggagagtagaggagggatttttagggcagtgaagctctttggcatgatattgtaatggtggatacatgtcattatgcatttgtccaaatccgtggaactgtataacaaaaagagtggatctttgttttttgcggtttgaagacagggtctcactcccctcacccaggctatagtgcagtggtgtgatcatggcttcctgcagtctcaacttcctgggctcaggtgattctcccactacagcacgaaaaatattaggtttggttttaagaatgaatctactaaaggaaaagataaaagctggcaaatcctgacaagctctgttatttcagagcacaaactacctgccatgactgttctactacaacagcttttcataatcacacttgaaaagtaataccagtttttggtcaaccttccttttttggtgtagtaatgacttttctccctgaacacaaaatttattggttataacaagtcactcttggatattattgttttaggcagacacttcaactgacacaagtttctagtcagagaataccatatggtataaatttgaattgaataccatatttggacaaacacagaatgttttggtttccttaagtactccaagtcagaggtatgaagaggtagcatcttttgtgataatgctacgcatttgccctaatttcatgtgttttaaagcactctcatgtttagctttcatttaattctgaagacgtctatgttactactttaattgttaggtacaatttgagtaagaacagtgatgagctaattgaactctctttagggatagcttcctttattaaatataaaagttttgcaaatgaggagataaagctctgaatcattgcacgtcctgagatcctcgggagactaagaaacacagtggagggagaatcaaatggaccgtggattaccactatctaccatgattccacagcgctgttataacagctgacgaaggcagtggaggagggagtcaggaatgacacccttccaagaaactattgtttgagagatttttaaggagtatattaagatacataaaaacttaaaaagcaagcaatattggctaattctcaacgaaaattatgaagtgactctaattctgatattaagcgtgtaaaagtccattacctgccaccagcaaaaactgactccttcacacttacctaacccacacccatgactgcatcatctttttttttttgtttttgagatggagtctcactgtgtcgccaggctgaaatgcagtggcacgatctcagctcactgcaacctccgcctcccgggttcaagcaattctcctgcctcagcctcccgagtagctgggactacaggtgcgtaccaccacgtctgggtaatttttgtatttttagtacagacagggtttcaccatgttggccagtatggtcttgatctcctgaccttgtgatccgcccgcctcggcctctcaaaatgctgggattacagacgtgagccactgcgcctagcccgactgcatcttcttttcctcttttcgcaagtccaagcaatcttcttacattacatttgatgtagaaactgtacttaaaaactcttcatttctctactgatatacagcatttggatccctatcagcatttcccccattgtcctacatgctttgcaaatactctaatcctcacactaacccactgaattgtgcacttttattgcatatatttgacagatgaggaactggtgggacagacactgagtaacctgcccaaggtcacagagctgctaagtggcaatcagaattcaatccctgccgtctgaatgcagcccttcagggctggctacagagtctctctcttcatacagtactacactctgctgcctcacattttttacatttattagtaaatatctgccctcatggtctcagatgacaatttgtcttttctctcctgaaatgccatctccttatcggtatctgtagtttatgactactgacacgttattaaaaaacagttccattttagagactactgaactctaagaaatagaaatgtttttcccaaatttgaagacagtaaaatccgggattctttctctcaaatttttaatttccattttcttatatgctgctttaaaaaaaaggtttaattttcaaaacgttagagtattttgccgataccctaacaactattaaaataaccactgtgaatttaagtaagcctaatgtttttatgttagcatggtagcctctctgaaaacaaaaactaaaataacaaattgtactttaaaaaacttccagtaatcaagacagaagcatggaaatatgcctcttcatggttcgttaagacaaaggtcttttcttccccttccaaattaattctgtggagtggttttaatttctgaattcaaaaggcaattataattcatggaaagagaaatggcagaagaggaaggaaagacattaagcaccagcagtgaaggaatacatgaaaagaagaagacagaatatgctttcatagtggaacactgttgattgatgatttataaaaccaatattccaaagggattaaggtcaggattaggacctttatatgctgattgtggttccgatttaagctcctaacagtagttgtcttgaactgagagctcttatttaaaacaatccttcactaaaagagcttcaaattatcttacaggtgctttaaaaaaagatatttctaaaattttttgtaaaatattgtctttgtttcagaaactatttccacttttttaaagatcaacttagaaactaaggttgtaaaaatactgacagataacattaatgcgtggcaagaaggtaaggccaggagagctgatgttcgcagagcaccactgcatgccaggcactgtcccaggaaactgactgagaccttatctatttgctcaccatcacatttgggcactttccaagtaccaccgggtggagtggaagcactcagctaatgtctgctgagtggttaacaagtgggacaatctatacaactgagaattcaactacagtgaccttttaattcccatgaatgttctttttccatattagagaaaaaaaaatctgacttccaaggccaagccaccaaaaattttatgtggctaattcacatcagatatcattctgaaaatctcgtatattactatcagttatttgcttaatgaaaaacctatttatttcaactaatgctttatggtcccttcatataaattaggatacgaaaatctagtttagcactgtagcgccttagaaatcctccacactgttaagagcagggaattgctacgacacagcctagaatccccttagcagcgtgtctggaattcttccagattccgtcaagcttcaaaactgaacagcaccacccacaaaccaacttttacctgcccattcccgggccttctaatatgcacttcccccagcccaggtccccctacccggaactaatgtttaaaattctcgaggctcgtggcaccctttagttgcatgtcagttaacaaatgccacttaaaagcccaccgaactcctcccccaggacctgggggcaatttcatgaccttgcagggttacggtttcagcaagtggtttcaaggtagtgctaggtgtccttcccttccccgccctcagacagatctgtacggtcccttctgcaccaaaaccaccctcagaggcatctaggatgttcgcctttgctgttgcagcacccagcaaagcgtctgcaacacgggaggtgctcgacggccgcgctctctgactcgatcgaatcttaaagggtcactctgtccagcactacagggtttcaaagggcgtcaaggacaaaaagcacgacttaaccttcccctgggctattgctcaggctcccgtcaccttgcaggccctgagactgggggcctggcttgcagtggaagtggaagctcaggaagtgctgattagctgagggaactcaagaccgcccagacgtcaatttggactcaggccgcagtcccgaggtcccaggtggccctccgacctcagggaaccgggcgggaccttgctccgccggagcccggccctgcgcacaccttgcccgacctcagagccgcttcctgcagcccccgctacccggcgcctccgacgggccaggggcccagctaggccctgcgaccccacatctgcccccgcgcccatctcctcctccctgccccgtgcccaagctcttccatcccttgcggtcctgccgatcttcccgcaagctgccataccattgcggctgcaaggtccaggccgacagcccagcgacacccgcgcgagagaacatggtagccacagccctgctgaaggtcggtcaggcaggcctcagcgcgcatgcgccgaagctccccagcgcgcccctcccaccttgctctcttcttcagtctcgtttcttcgcgctacggcgaggggagtctcgcgaccgttgcaacccagtcttcccaggccccacctccttccgcctctcagctgggatttgtcccgcccaccgccgccagcccggttccgtttccggctggctgagtactggggtccagaaagtgatcgctgccgtggtcgccatggggaagtcggattttcttactcccaaggctatcgccaacaggatcaagtccaaggggctgcagaagctacgctggtattgccagatgtgccagaagcagtgccgggacgaggtgagtgggcccggagtggccccgtcttcccaggagggcccctggcaatccaggatcaggtcctggacgcggggctgagggcgcggggctggggctcccggggtccgggtcgtgaggcttctgaggtctgcagtgggcgagtcaactactcagcgcacgagagccgtccctccccgcagcccccgggcccagcgggcagcctgtgttctgcgacccctcattcctccccagtccgatccccaccaccaaagaaatgaaatcagaaaaggttttgcacccctcacaggggcggggatactgcaatactagacgcccgggcaatgccagtaacagtcatcagctcttacttgacttgactcttaagagaaacagggtggttaggattcactcctcttttgggatcaggtgaaaaaggagagctaagctcttccacactactcatctagcaagcatttattgagcacctacactgtaccgggcacagaataatattgtggttaaaattatggatttatctggtttatggatatatcagactgtcaaaatttaaagtcaagcagggccacttaccaaccgtgtggtcttgggcaagttatttacttatattcccctttacttatctgtaaagagggaataataatttcacctacttgtaggattgtcgctgagttttaaatgagtgaagtatatatagagtggctcaaggagtctgggcagatctcgaaaagccttatatggctacactatggaatttacacttttccccattaaagaggtggttgattgaatgctgtgcaggctagtgatgtgatcatatttttctccggagattggactggattgggtaagggtggaagaacactgaggcaattggaataatcta

SEQ ID NO: 5073 - DNA, 6000 bp, Homo sapiens
atgggggtaaagaggtccttgccctggaaagatgaggcattcctatctagggtggacacacggtgtgtaatttcctttctcctcattggcccatggggcacggctccggcccgcagaagccctccctcacctgggctgcccaccatgggtgtctgcaccatgccacgggaagggtgcaaaggggcataacagtgggtcttgccctggtggctgaggcaagctggtgctggaattttccttctccctaacctcgggaaaaccaaggaatgaatcaatagaagtctcgaattaatagaatgagcaatgcaaaagattgctggcctgggaaatttaaagtaacaacccacgaggctaccaagagtaaaagtaaactaaaaaatacagtaatataaaagaacatcacataaaataaatacaagctgagaaacagtaaaaataagatgaaagaggttggcaagaaagggtagtaaggaagacaaagtagagacagagaattcacattcaactgaagagccaacacagcgctgggagaacagacgaaataagcaataaacaagggtgttttaaaaaaaaaccaaaaaacaaatctggcgtggtggctcacacctgtaatctcagcactttgggaggcgaggcaggaggattgcttgagtccaggagttcaagacagcctgggaaacatggtgaaaccccatctctacaaaaaatgaagaaaattatctgggcatggtaccatgtgcctgtggtctcagctactcaggaggctgaggtgggaggattgcttgagcccaggaggtctaggctacagtgagccatgatcacatcagtgtcctccggcttgggtgacagaacaagaccctgtctccaagaaaaaattgaaaacaggaaaaacccaatgggttaagagaggaaggcagcagtgagattttctgagcttggatcttggcagaaagtgggttccctggagcctgtagtgacggatgaggctggcagcaagaccccttcccagatgcctacagactcttccctgggggcttgaccttaagacctgggttggcctccaccctgtgtacacgggacagctgggttccatgccaaagcctgcagagaattccccaggcttggacttgatctttctttgcaggcagggcctgggccgaattgtcttccatatcactggtgggctctgtgctgaggagggaatgaggaagatagagtttttgggccctccctggagacgcatggttcaggaggggcacttctgcaggggttgggcactggtggttccacatcaggcaggcagctcctcaggattgtgcccaggaggcaggtcacttggagggccaggactccagctggcttttccttagtccagcttttggatggggtgagaaagaaggcaatggagaaaggaaaggtctgcatttctggaatgacaaagctttaagtcacaatgattgtagcttccaagtagaccactgaggcctctctctgccttgacatttcatctacagcttctgtggccaactactagcgtccagtgttgtttcagttgagattcctgatgagcccagttttatctttttgcaccctccttcaatttccttgtgtgtaaaatgggatgaccatctcctcggtaagatgtcaggtggtgagcacagtgcctgcatgtggtaagtgctaaagaaaagtaattagaatcagtaaaactgaagaactctttagaaaaagcagtcacctgtgctggctgagcttgtgtaaaagaaagatttactgactcagttttaatttctgtgaatacacctttgtgtagtgaggagcaaaccaagaggactgagccttgggcctgccagcaactcacctgatgcctttctctgggcctcagtttttctctctctgaagtggatgtgtgtcatatgacccagagatttctaatctatcttctccagctagattcttgcattaggggtgaacttgttcattgggtagagttgcttcccctggtttggagaggcagcatttgcagccccagaggctatcagggataagggtgttgggccaagaatagctgggccaggagcaataaactgttaagggcttgatgagtctgagcaactgaccaataacatccaatgcccctggaacctggcaactccaactttaggtggcagaggattaaacacattttgcctcaaggtgagtctgtacaggtccccagtggtctctgggcctgccttccagctctgtgaggaacaggagctgagcaagtgcctacagtcaccacgctgcctacagtgtccaggggattctagcctggataggaaaactggcttggctgagtggactgtcccagggtgaggatctgggaatgagcatatggggatggcagactaccacacgccctggaagctggagaggaaggaggcacccaggacagaaggtgaggttgccccaggtcaacaacttccagatgagatccaccttgagtcatgatcctcagatgccaagccacaggaacctcatcacccacctcatcatccaaactggaacttgatggaaatcattccacaactatgtgttggtgggttgtcttcttaatacttggaaggaggtcttaatacttatcccactgaaatcatgctacctacacctagcaaaacatacatcaaagaaaaacttctaactgggtatatcacatgcccactgtactaacacactggagaacccccaacaacaggaggcccggggagagtccctgacccacagggacttcaggtcaagaccacacccaccatcctttcaaggtggagacagtccccgtaggaaccaaactgatgtataataaaactcatcatttatttctcttctccctacagcatttcagccagtgaatggtagaattttgcaggaataagaattagaggtgtagagggttttgagatgcggggtgggtcaggtttcactactcaaggaccctaagacaggtttttggaagaagtgtgtgtgtgtgtgtgtgtgtgtgtgtgtgtgtgtgtaggaccacattcagccactcccatgggcaagtatgacatatgaccactcctctcttcttgccccctggcctccttaacctagaagtcaccttgctggctcatgggattccttgatacttctgcaatccagcttctccgctccaacaggctgtccctgcccagctgagctggcccacccagggttccctcacagtgctatgggcctccactggccccctctgcacagcccatcctctccaatctttctttccaaagtgaaatctaccaatgcttactctttggctctggccacatgagagacagacagacatacagacacacacttctttctttttgccttggctcaccactattcaatgcctggaagccttattttctcccttgggaacctccactcagtctttacaactgtcatctcctccaggaagtcatccctgctcttcttcccaggctggttcagagcccaggcatctgagcatacacagctcattcatagccccccccaacatttaaaagatgacttggttgggtgtctgcctcgcccactgcgctgggagctctgggcaagggctgtggtgggagcctctccccctggtgcgtggcgggagtcctggggcccctccgcggacaacagggcccggggacgttcccaggcttgctggaggagcagcttttgaacgaggctctgccaggtcccagaccccaggaagctcagctgtctcctcgaaatcttgggggtgccacatggagcccagtccctttcaggcacgagcccacaacagcttaacgctctctttggtggtggccggcccgaggcaggcaccggaggcggagggagccctgttccgctgtggccgcgaggagcgggctcttcgcccgggctcgcacatgaaagctccgtgcagggtcggagtctgagcccgccggccgcttggaaggctcctcacgtccaggcgccgcggtcacggctgcgctggtttccggccatgaattgggcttcagagtccgagcctcttgcccgactcccggctgagcgcgctgcccatggagcgggggatgggcgcccgccgaggtccgcgcggccagccagggttcgagcccacggcccgggctctactctgagatgcttgcggcggccggccccctctggctccccagctgtcctggggcctggcccggcgccccgccccggtctctcttcttgctccccaggtcccactccacgaggaacggtctgtttcggccggggacatgacccgagacgcgcggctgctgaggtcgccagggcgcttcgggagcccctcgagggcagttagcggccggccctcctccattctcccgcccctggcgaaccggagaaggaggcccgaaccgtcagagctcggcgcgccgcagcccaggccggtccccgccgctgtgccggtctccgagcgtcccccgagccgggagcgtggagcacccggcgccccctccgagccgcgagcgggcgagagccgcgcggcgaggctgaggctccgcagtcacgtggtagagaggcgggcggaggggagggaggcgggcagggaggggagggggagcggagctgagggggagggggaggggagggggcgtcctccgcagttcgctcctcgccggggctcagacacacagccagcccagagccgccacgccggcccggccgccgccgccaccgcctcagcctcccccgaagccgctctagccgcgggaagcgccgctgccacagccgcgggccgcccccgccgcgccggcctgggctcaagctgccagcaccgccgcagccgccaccggagccggagcgggagcccgaccgcgctgggctgggctgggctgggctggggcgggcgcagggcgcaggggcgggcgcgcgggggaagacgcacgggcgggctcggctctcccggggagcggcccgggactgcaccgggaccagcgcctccccgcttcgcgctgccctcggcctcgccccgggcccgggtggatgagccgcgcgcccgggggacatggaagcgctgacgctgtggcttctcccctggatatgccagtgcgtgtcggtgcgggccgactccatcatccacatcggtaagcgcggctggaggccgggccgaggctgggcgggggccccaacggggcagggggtgcgcggcgtccaaacttggcgtttccctgggccgaggggctcggcgggcggtgctcccccgaagggccgcgccgcgccgcccggcggaggagctgtgcaccggccgcgccgcgctcccgctggctgcttgccgctccccggggctccgatctccgcgcggggccccgcggcctctaccgacacttagggccgacgcttcggggaacaccgggatggacgcgcgtcgagacccgcgcccttagcggggccgtcggcgggtcgggagggcccttctgcgcagctcagagcagcggggggcagggggaggtacagcggggggctcgccaagttggcagggcaagatcaaagaggccggaccggaaccgtgtgtgaatgtgtgtgggtgcgtgttgtcagcgtgtgtcgctgtgtgcgcctggcacggtgtcggtgttactgtgagagggtgttggggtgtgtggggccatctgagcgtgtgttggtgcgtgcacgactgtctgtcagcctgttagagtggacacagtgtctgcctgcttctccggtgtgtgtctgtgtagcccttggtgtatgtgtgagtgcgtgtgtatctggttgtggcgactgcatccccatcctggacagtcctagagttttgcgtggtccaagtcttgggggcccagacggtctgggtggtgggagccgagggaagaagcgtgggcagcggggggtagggggatgctgagcgggaagagatggatagagagagagaaccgggagagaagatgaaagcgcagaggaggagggggcgcgccgagggggagtgggcgc

SEQ ID NO: 5074 - DNA, 6000 bp, Homo sapiens
ggcaaccttgtgcaagagcatcatgtttagtccctggggaactgctgatgggagcggacgggcatcattcagaggcaaaatgaatgagcttggatactcaacactgcagaggggagccaacagaggtgtgtcaccagacatggaacacaggcagggtccccaccacactgtgagctcctgggtccaggaaatatgtgcttccaaactgtggcttcagctcccaagcacaaagaatgaatgtcaacagagatggggtttgtggaaccagtgtcaagggaacaggtggcactgtgaaagttgtagcttgtcaccccaggtccccaccccatttagggttccttccgctaagaaggccctgccctcccctggctggagcccaccccaagcacctgcaaggagctgtgataagggcacactgaaaagaagtccagaggcagggggtgtctggagatagagactgctggtgggacacgaccagacaccaaagaagggcaggaattcctcttccctgtacctcaacagacatctgacaatggacatctgtcacagctggaagcagcagctcccataataggcagtgttagcctcaccccccctaaaagaaaacacttgggactcccggtttgtaaaaccacctcaagaaatccttggaccttcagtccccagaagtagtccccggtccctgcccccagagctggcccctttccttcctctgctgcacccaagaataggagacccccagaattcctccttccaacacaacgacctccccaacaccagctctgaccccccagacccaggccagagccatcatcgaggcatcctgtccttgcaggcaccggggagactagcaacccatgtgtaccaaagcagcaggaggactctcggctcaacgggcttgaggagaaaacaccagccaggagctcttagccagcccacctcccactacacccactgccccctctacacttctctaccagttcctccagcaaggaatccctgcatcctgcgccactaacttgccccagcactgaggggcgctggccccagagtccccatggttgcggggagcaaggcagagggaaggagaagggacttaagccgggtaagtgtcagaggcggagccttaggccttaaccaggaatctggaggcttggagaaggaaccagggttcccgagctgaaaggttgaaggggagggactagcagagaggagggaaagcagagggggttgctgtcgtgaacgccctcgcctcgcacctgtggcgcctgccgcggggcccgaccggaggcagtggctgtggacaagggcggccccggcgtaggccaggatttccccgcagccggaccggcccagctccgctcctttcctgggcgaacagcgcccacctccggcccaggcggcggcgcctccgcccgcggcgcggacagcgagagagaaaccggctcctccaaacctggtggaggagcgctgcagagaagcgccgggctgaggctctgggggccgcggggcgcgaaacgccgcgcctaccaggttatgcccgggagaaggagacaggtcgggctccagccgctgggcgctcctcacctcgaagcgaggaaaacaccgggccactgagatcaggggaggtgcgcccgatacaggtacccggcacgcagacacgcccacccccaaacaccgagaaacaaagactgccccgagccacgcacgcctgcgcggccagcgctgggcgcacacccgcgcccacacagcccgaagggcgccacgcaacccgcaagaacaccagctccccgcgctcgcaggctctccgtgccggcccgcagcgcagagcagtcccggcgccgctgcctaggtgggccggggaaggcgcgccaccgcgcatggcaccgcggctgccgaggaacagagggtgccctgcgcagcccagctcgtcccaacccctccggtgcccactgctgcgacgcctcgcaggccgtgtcccagtgggccctgggcacagcggtcactcaccttcctgcacagcctggaatgggttgttggcctcgatgaccttgatggagtaggtgatcttctcgctctgcaggatgtcatcgttgaggctcaggtcggataccgccaactggaacaccctgtcgtccttggccgcgttctcctcgaagatggcacctggaggagagaagggatcaagaccggacctggacaagaaccctctccccgcttcccttggcccgagggtcaaggcactcgcagaccgatgattgccgggtggtgggaagtctgaactgggatttcagcttggcggggtagattaaggctctccgatctccacctgcacaggaatatgttcccctccccccaccagccctcagcgcacacgtgcacacagttgacatgagttacacatgcacatcccacaggctgccaccaggtcacacacgtgtctcacaaccaaggcaccacatgtcctagccatgctccacacaagggactaagccaagctggggtggccccaggcagcgcccaaatgccttgacatggttccataaatcccatcccaggagccaggaagttccccgggagggtggtgtcccccacccaaatcccaggacagaatgatgggtccttctccatgcacgtcccctgctgagtggagctgagcgaagcaggtctacagttggctttcctgcgcagaggggtcttccttaggcaggggcttcggatggcctgcagcttggatgactgtgacgctgcccggcctggcgccctgagctcagcctcctactctccatccttccccactcccatttcctgtacgtctgtcgaggggagtgggggaaggggacttgtgtcctaggcgcctccacgttcagatctagcggagctgggggtcccagaaggagctgctcttgaagggctttctagaaccgcggacagctcctccagggcgccctccggctggcgctttgtgcgcctagcacagcttccacggaccctgcgcttccagccgagatcagtgcgaccagcccgagcctagtcctgcaacctggacagctctggagtcagccacccacatcccgcctcaccaagcctcgagggtccctgaggtcccggagctaggcccagtgatccctcgagctgggggctgggtaggaggagggaggcccggattcctcactacacccggagccggcgccgcaatgctgaccgcgagacccgcacccctccagggcgggaagcaggtttggtcacgggcccctgaggaggaatcgtagctctccgagcccaggcctagtcctcaccaccccactccaccacccaccctcccgccttgtcccgtcctcctcgccttcaacacctcccaacccccagtttccctgtgctcgctggtctttcccaacttccggaaagacgactgcggagggactcccccaaagcgaccgctgtcagccccccaactcggcccaacttcccgagattcctcccgtgttgctcccaactcccacccactccccctcggcgcgcccactccccctcggcgcgccccctcctcctctgcgctttcatcttctctcccggttctctctctctatccatctcttcccgctcagcatccccctaccccccgctgcccacgcttcttccctcggctcccaccacccagaccgtctgggcccccaagacttggaccacgcaaaactctaggactgtccaggatggggatgcagtcgccacaaccagatacacacgcactcacacatacaccaagggctacacagacacacaccggagaagcaggcagacactgtgtccactctaacaggctgacagacagtcgtgcacgcaccaacacacgctcagatggccccacacaccccaacaccctctcacagtaacaccgacaccgtgccaggcgcacacagcgacacacgctgacaacacgcacccacacacattcacacacggttccggtccggcctctttgatcttgccctgccaacttggcgagccccccgctgtacctccccctgccccccgctgctctgagctgcgcagaagggccctcccgacccgccgacggccccgctaagggcgcgggtctcgacgcgcgtccatcccggtgttccccgaagcgtcggccctaagtgtcggtagaggccgcggggccccgcgcggagatcggagccccggggagcggcaagcagccagcgggagcgcggcgcggccggtgcacagctcctccgccgggcggcgcggcgcggcccttcgggggagcaccgcccgccgagcccctcggcccagggaaacgccaagtttggacgccgcgcaccccctgccccgttggggcccccgcccagcctcggcccggcctccagccgcgcttaccgatgtggatgatggagtcggcccgcaccgacacgcactggcatatccaggggagaagccacagcgtcagcgcttccatgtcccccgggcgcgcggctcatccacccgggcccggggcgaggccgagggcagcgcgaagcggggaggcgctggtcccggtgcagtcccgggccgctccccgggagagccgagcccgcccgtgcgtcttcccccgcgcgcccgcccctgcgccctgcgcccgccccagcccagcccagcccagcccagcgcggtcgggctcccgctccggctccggtggcggctgcggcggtgctggcagcttgagcccaggccggcgcggcgggggcggcccgcggctgtggcagcggcgcttcccgcggctagagcggcttcgggggaggctgaggcggtggcggcggcggccgggccggcgtggcggctctgggctggctgtgtgtctgagccccggcgaggagcgaactgcggaggacgccccctcccctccccctccccctcagctccgctccccctcccctccctgcccgcctccctcccctccgcccgcctctctaccacgtgactgcggagcctcagcctcgccgcgcggctctcgcccgctcgcggctcggagggggcgccgggtgctccacgctcccggctcgggggacgctcggagaccggcacagcggcggggaccggcctgggctgcggcgcgccgagctctgacggttcgggcctccttctccggttcgccaggggcgggagaatggaggagggccggccgctaactgccctcgaggggctcccgaagcgccctggcgacctcagcagccgcgcgtctcgggtcatgtccccggccgaaacagaccgttcctcgtggagtgggacctggggagcaagaagagagaccggggcggggcgccgggccaggccccaggacagctggggagccagagggggccggccgccgcaagcatctcagagtagagcccgggccgtgggctcgaaccctggctggccgcgcggacctcggcgggcgcccatcccccgctccatgggcagcgcgctcagccgggagtcgggcaagaggctcggactctgaagcccaattcatggccggaaaccagcgcagccgtgaccgcggcgcctggacgtgaggagccttccaagcggccggcgggctcagactccgaccctgcacggagctttcatgtgcgagcccgggcgaagagcccgctcctcgcggccacagcggaacagggctccctccgcctccggtgcctgcctcgggccggccaccaccaaagagagcgttaagctgttgtgggctcgtgcctgaaagggactgggctccatgtggcacccccaagatttcgaggagacagctgagcttcctggggtctgggacctggcagagcctcgttcaaaagctgctcctccagcaagcctgggaacgtccccgggccctgttgtccgcggaggggccccaggactcccgccacgcaccagggggagaggctcccaccacagcccttgcccagagctcccagcgcagtgggcgaggcagacacccaaccaagtcatcttttaaatgttggggggggctatgaatgagct

SEQ ID NO: 5075 - DNA, 6000 bp, Homo sapiens; identical to SEQ ID NO: 552

SEQ ID NO: 5076 - DNA, 6000 bp, Homo sapiens
attgcttgagcctgggaggcagaggttgcagtcagccgagattgcaccaccacactccagcctgagtaacagagtgagacccatctcaataacaacaacaacaacaacaacaaaaagatcacacctggaagtagaaagggggccttctcttctttttcggtcattatataaatttttttaaaaaagaaatgggctcttgctatattgcccaggctggagtgcggtggctactgataggcacaatcataacatgcatccagaggaaactgcaaatataattgtaaggcaagcctttaaagagcagttaaaaacttgttttgaaatacgggtttctagaatttgtttcaacatgttgagttacagcaaatgaaatggagaaatagtctcaatgctttttaactcgccctgctgactggaaaccttagaactcagccttatgagctgttaatcagataagcactgcaggtttttgcaaagaatcatgcttgacaaatgcttgagggcatacggatttattgaaggaagtattgtccaaacaagactgacaaaattttacaaagaaaatagaattttaaaatgttgggattaaaatgtagatcttatcggagtatggcggtgtgcgcctgtaatcccagctactcaggaggctgaggcaggagaatcacttgaacccaggaggcagaggtggcagtgagccaagataacaccactgcattccagcctgggggacaaagcaagaccccttctcaaaaaaaaaggtagtttcttttctgttttgagatgtagttatgaaatgtaaattagaggatgtttcaatgaacttttgaattataagttaatatagtttaaaaaccatatgaattaagtactatttaaaaaataggtaggaattatacttccactcaaaaacaccttgaactcctggcctcaagggatcctcctacctcagctttctaagtaactgggattacagctgcatgccaccacgcccagccccattatgaaaagttttcattgacttatacctgtatcgtttttttctttcaataattttggtatgaatgtatctctttttaagatgaagaaaactttccctagaaatgtcttccctcctccctgggcattcttctcaacagctgacttccctttcatattattagctaaaattgtaccatatgcccatttaaaccaatattttgtgagggtatgggcccaccatgattgacttagacaatcacaatttatctcctgggactgaggttggagcctagcacccttcaagcacatggccaagcatattcagtgtggttacttgtcaagctaacaaggtagaagagagagcctacttctagaataggctatcagcgggatctcccacgccatgctaaggaatttggaccatatctcattggaataagaaactactatgggatcacaggatgggctaaaaaaataataaggaacttctggaagaaggtacttctggaataggctgtcagtgggatctgccacaccatgcttaggaatttggactatatctcgtcagaataagaaactactatgggaccacaagatgggctaaaaaaaaataaggaactagtgaaggattttagatcaggaagtagcatgatgaggtttcccaatggtaacagaatcaaggggcactcaggaggggcatgggtctgggggcagggccaccagttggaaggcttcattagaagatcttggagaggattttaggcagttgaattaagcacccctagtgactcattggatggaaagggagaaagaaagttagaaggaagatattctaggatgactcccatacaggttcctgctctggtgaatcacagggtattttgtcaagatggagaatatggatggaggaggtttgggtggatatgatgagagtggagagataatgagtttatttgggacaatggggtgcctgaaagacaggtgaagagagatgggtaaacttggaagggagagtgtagaccacatgacactcctccaaattcctttagagggtagggtgggatggagtgtggagggaaggagaatccacaaggggaaatgaagcaaagcaaacaactagcacctaatatgggacctgttgggctgattttgctcagggctgggcatcaagcacatctggagaaaaattgcaaatgtaattgtaaggcaagcctttaaagagcagttaaaaacctgttttgaaacataggtttctataacttgttgcaacatgttgagttacagcaaatgaaatagagaaatactctcagtgctttttaatttgccctgctgactggaaacctcggaactcagccctatgagctgttaaccagataagcattgctggtttttgtaaagaattatgcttgacaaatgcttgagggcatatggatttattgaaggaagtattgtccaaaccagactgacaaagaaagttttacaaagaaaatataatgaaaaaatgttgggattaaaatgtaggtcttttctgttttatgatgtagttatgaaatgtaaattagaggatgtttcaatgaacttttgaattataagttaatatagttcataaaccataggaattaagtactattttaaaaataggaattatacttccactcaaaaacacctattttgtggaacactaaagtttgaaatatatatgtatagagattagacttagaactcacagaaggtaaattcaagaaatttttaaaaattactccaaaacattattttagttctttccatatctattttgttctaggaactgaactgggttctgaaataataaaaataactggtatctgtataatgttgtggttaatcccaactttatgcaactattctattcaatgtggtttctgggggtccagataaaatataacacttgaagcagagtggggattgagggacagagaaaaaaaaactgagaactgagaattgaagaagaaaggcaaattaggaagttcaacaaggttaggagagtagtggagccaaaaaaacaatagtcatgagaactgaatatagaaactggacaatggctagatcttatatgacaattagaactctgacccacaacctctacagcaaccagccgagaataatcaggacttggtcaatgactcagtttccctgttttttgccgcctcctttcttcaactcagaacccactaaagacagccaaatatgctacctaccccaaaccaatcacctaagagacactacttttgttagcccacctccagctttcccatgctaataccctcaagtcagagtatacatgaaaccttccctttttgttcactactaagctttcctggccaggtgcagctgctcatccctgtaatcccagcactttgggaggctgagacaggaagactgcttgagcccaggagttcaagaccagcctggacaacatagtgagactccatctctacaaagaattaaaaaaaaataagctgggcatggtggcacgtgcctgtagagccagctactcaggaggttgaggtgggaggatcgcttgctcaggaggtcgaggctgcagtgaaccacgatcgcaccactgcactccagcctggatgacaacagagtgagaccctgtaggtaattaagtaagtaagtagttttcctaatgtcctgacaggctttgagtcggccaaatgcaagtgatggtgactgactcccttgtcatagtaagctttgaataaataaagcatttgggtggtcttcctccccgatcccccccattcattcatttgcttattaattatacattagttgtgttttatctgccaggcagtggccagtattgggaatatgtggaagcaaatagtccctgccttcaaggatattctgtctagtgggacagacagacagacatatacgtataatagtaattcaacgtgctaagtgaaacaataggcatgtataaaaaaggtgtagtaggtcaagtagggcttttaggggaaggcgacccttaagatgggtggtaagggatgagtaggaggtgatttggctaagaggctgggacggttattcaaggcaggtggaggggcagaatgagcaaaacaggacgcgttgctggagcgtggtaaggaaggcaagtagcggcagaggacggcggtagggcggatcgtggggcgcaatggatgtgccacgttggaaagagcttggactttatgccgtcctcctggaaatgagataacggctggtgtaagcaagaaagaaacacacacacacccacgcgcgcgcgtcgtttcctttgtgttactgtaaggtcaaggagggcggcgacacagaaattcatgatgactggcataagcagacattcaatgaatgaatgaatggacataagcactttggtgtaaacgtcattgtcttcgatttctgttttctcacggggcaagacagtgaggtcggggcatcagtttgggaggtgatagggaaggtttaaggtgagagaactgccattctggtagggagggtcagtgggcacaaaaccaacaataggttatgggcaagggatgcgcttcggtcgcgaacaccctgaacccacctaccggagctactctgtcccaggagcggccgtggagaaagcaaccagccgagagttcgcgccccagggagggaagcgggcacagggccgcccagcgccactcacctgtgagctctccgcgggccctgcaggcggagcctcggtacgacgcctttccgattgggcgcggctcaaagtcccggggcgggcatcagaggccgagcgctctaggggattggccaccctggcggacggacgtgctgctgaccgagctggttcgcccccggttcggctcgtggagagccggcccctccgtgagtcttctgtcagtcattggctccctgcggtttccttggggacgtggcgccgccgccggccgggccctccttccggctgggcaaggggccgcggggagcagctcgggactgaaccgagaggtgccgaaggaaccggcgggccgcttgatcccgtgagtgtgggcgcgagagggctgtgggacccggagggacggggagaggaagcgggacccacaccccgccacctggggacgaccggttcctagaggacagagctggcccacgagaacgccccgctcccaggatgcccgggtagggtcccctgggcctgaggaaccagagcagacggagcgggagcctggggaggaggtgggagccgtggaattcccgtgcaggtttgtctcgtgggctcagtcggacagaagcctgaaatcaaatctttctaggctgcagacgtaggagatgcctgggacaaggaggccaccttctcagggcaaaagaaaaagaaggtgacaggcgttgagaccaccgaagggaacccatggctaggtaaggctgcacactttccctccggctgggagcacggcagaggatggcaggcaggttggggggccctgggaggctgtcccaagtgaggtttgccctggagctgcacttggactttgtattctggttagttggatgcagagacgatcaaagttgtattatttcgagggctgataaataatagtttctagcccatagaccaggagtggtagagtgagtcggcttgctcagctctgtaaagtgcaaggttgtaacattgattcagattcgcatctgagcaaggctaggtgccacttgaggaggttaaacaaagaagtttttttgttttttgtttgcagtgaactttaaaagcagacagaccgaggtccttttgaatcaatatacaaagtgaacttcacagatgaatacacttatccatacattataataacctgaagcttttaaaaaatattaatgtggatctacatgcaccaataagggaaagttataaaataaagtgggggaaagatgcagaacagcaggtatggtggactaccatttgtgtaaaaccgagggaatggatacgcacacacacacacacacacacacacacacacacacagagat

SEQ ID NO: 5077 - DNA, 6000 bp, Homo sapiens
agactctgtctcaaaaaaaaagaagctgaggccgggcacggtggctcatgcctgtaaccccagtgctttggaaggctgaggcgggcggatcacgaggtcaggagtttgagaccagcctggctaacatggtgaaaccctgtctctactaaaaatacaaaaaattagccgggcgtggtggcaggcgcctgtaatcccagctacttgggaggctgaggcaggagaatcacttgaacccgggaggtgaaggttgcagcgagccgagatggcgccactgcactccatcttggcaacatagcaagaccctgtctcaaaaaaaaaaaaaaaaaaaaaaaagaagccgagaaaaggaagcccccaaagatgggaagaaccaccagaaagaagagagaaaggaggtggagacaggcacaggcctgtaatcccagcactttgggaggccaggagttcaagttcaagaaaggaggcagaagggacagtgttggggaaggaagagcagtggtcaatttttagatttttcgttaaggcggaagagacatcaggaagctgatatgctggaggtacgccatttcctaagaggaaagaccaggaacaagaggagaggctcaatatggagtatccacagcgccctggcctggccccgatgcttctctgaagcggcaatctccagagaagtcagaaggcagacagaaagagtccactgccaaaacagacttcccctctccctgccacctggcctcctgcaggctgcttcaaagaccaaaggcatttatctcagtcccagctgaagcaagagtgggaggaggggaaagagttcactttcccatgctctacatgaacctaaaaggagtcagcttggctggctgaacacacgctgccttggcttacagagccccaggctcatacatgctggagacagcctgactgagcaaaatgctatgcctccccctcagcacacacatacacacagagccagaccttctctgacatctctgttcaccttaacacaacattgcaaagtcctctgcttctcagaatggagggactatcatcaaggggtaatctaaacatttgctaattatgcaagagcctttgccttcttaattgaagtcaggatagaaactgcagagtccctgtcttaaataaaacataaagccaaaacaaaaacaaaacaaaaaaaacactaaacgatctgtctggaacatttccccccacacacccactgtcccccaatgggcactcttccccgactccttcaggacaaactcaaatccttctgtgatatatactcctacagcatcctgtcctttgcagcatgctgggcgtttgtgattgtcaccttcttgtcattgactgtgatttgtgtaaagtctgcctcccctgacagactgtaaggctcacaagcatcgggatcatgtctgtgatgtttactgctacatgtttcacatgccctcgaagaatatttactgcttacctgaaatgcattccaacttcttcttgggtctcttggcatcaaggatgtcacctcttttaagtcaaacttagaacctgcctaggttacagaattaagagcacgctttctttcatgaagttgcaaaactgtctaccttgcctgtactaagtcatactggtctctaaattttcttctacagttactgtccctcctcccacacaagccacatctagtcttccctaaaaaggtcatcatcatgtccagggtagccccacttctgtatggtcccactactaggaacaaagtaggagtaaaaatcagaccagtgatttaatgatatctccctcctaggattagagaatgtcacagcttgaggccgggcgcagtggctcacgcctgtaatcccagcaatttaggaggccgaggcggacggatcacgaggtcagatcgagaccatcctggctaaccctgtgaaactctgtctctactaaaaatacaaaaaattagccaggcgtggtggcacgcacctgtaatcctagctactcaggaagctgaggaaggaggatcgcttgaacccgggaggcggaggttgtagtgagccaagatcgcaccactgcactccagtctgggtgacagagcgagactccgtctccacaaaaaaaaaaaaaaaaaaaaaagagagagagaatgtcatagcctgaagacatgtgatctaagatctcagtttacagaagaggaaactgaagcctagaaaggtgcacatggattgggccaccacagtgggcatttttgatacacttggccctgcactaagcgcttgcagcagatataaacacgaacaatcaacagatccagtcctcaaagattggacaacagctaaggccttacttccccaaggtcctctatccactatagcctacttgccaactccgaggcctggcacggtggctcacacctgtaatcccaacactttgagagcccaaagcagagagatcacctgaggttgagagttcaagaccagcctgaccaacatggagaaacccccgtctctactaaaaataaaaaattagccaggcgtggtggtgcatacctgtaatcccagctacttgggaggctaaggcaggagaatcgtttgaacccgagaggtggaggttgtgatgagccgagatcgcaccgttgcactccagcctgggcaataagagtgaaactccatctcaaaaaaaaaaaaaaaaaaaaaaaggaaagaaagagagggaaacaaagagaaaaaaaaagtaatagactactgccacctctgacgtaatgctcatccttcccagaaagagcagattttctctggcaaatggtatcagagatcagaaaacaagcttccaaattccttctgaggtatcctcttacaagcagaagtgcacaagattactgtttgtagccccaggtagggagaaaaacgaaacatcatcgctggtactcacatcagaggaagatcaaggtagccaaagaccccagaaggtcagacacaaagaccactgagacaggcaaggattaaggtcaaggctgcctagagcaagctggaaaatgagggtaataattacaagagcaggcccaggtataggcttatgggtactcgtctgactccaaggcaagtgggctgttaggcaccagacaacttagaaagagcaacctcccttgcctttttcacaaaagggccaacagtctggagatgagtagattataggggtttgtgctcctgtatcacctccattcatcacctccttagtcaaggctctgaactgctttttctctccaaggatctgaagcaggtatgcaagcagcagatgttgatttttgttttcatttttttttttttttttgaggcagggtcttgctctttcacccaggctggagtacagtgatgtgataatagctcctgggctcaagcaatcctccagcctcaacctcccgagtagctaggactacaagtgcgccacggaacctggctaattaaaaaaaatttttttttgtagaggcagggtcctactgtgttgcccgggctggtctccaactcctgggctcaagccttcctccccttccacctctcaaagtgctgggattataggcatgagccactgcgcctggccgcaattaccaatttctaggggttgtgaaaatgaaatttggtatgaaatgtatttcattaggaaggatgtaatttccatacgggctgattttgtccactgctgtgtctccagcgtctagaacagggcctagcacgtttgtgtaaactcttcttatagtcctctgcatcgggaaagggatgggaggtagcacttcccaacccaccccagtgtcccacttgctcttccttggctaaaaatgcaggctcatttttgcctcctccaggactacagatggtacgcggtcctgtccaaagcagcttagcaaaaccggccagaggctgggcacagtggctcaccactttggaacacctgtagtctcagcactttgggaggcctaggcgggcggatggcttgaccccaggagttcgagcccagcctgggcaacatggcgaaactccgtctctacaaaaacaaaatacaaaaaattatccaggcgtggtggcgcccgcctgcaatcccagctactcgagagtctgaggcgggagaatcgcttaagcctgtgaggcaaaggctgcagtgagccgagatcgcgccaccgcactccggcccgggcgacagagcgacaccctgtgtcaaaacaaaaaccgggccgatccccaaaacgcctttcacctgtgctttcagctcacctcagggctcagggccagcccccaggctgcttcttgccctccgacagacggcctccccccatcggtactcccccatcccggacagctcgtaacgccccagccgctcggcctggcactcctaggcaatgggggtcagagcagaggggcccatctgcagccccagggcgcacttcgcgccacgtggcttctgcaggtggaagtccagcccgcgctgcagccccgcctgggcagtcaggacagcaatctcagcacccacccgagatgtggggattggaggtagacagggcgagcgccattgtcccaaggccccttacctggtcccgggacaaatgccaccagttacagcccgccttgaaaactggcccgggtgagaggaggacctgggctggggaactgcccccacgcccgccccacgcccctccttttcgaccaatcccaggccgggaggctcccgccagccacgtgggcaggctttctccactccctggtccaggcgagccggcggcggcctctgcagctcccgtagcccgcccactgcgtgggcgggcgccttagcgcacttgcgcactctggggaaagcggagctgcaccccgccccgtattgctgctcagctcctcagctgtgcgtgcgagggacgtcgggggcggcgccgcagcagttgcccctggtaacgggggaggcagcaggaggaggaggaggaggagggactcggcgggaggatggtgagtgtgggggcctgggcccccttggagccggccggttatccccctcccgtccccaggcccagggcggagcactgcgcttaaagccaaggagggaatgggacgtcgctcagcctgctatctgggttgtggactgatttcgggggtcggcggggagacccgagggtgggccctggagggaggcctgggcctggagaggaaggcggggcttgcagcgggtccgaggcttggggaaggggctggcagagtgcgcggctggccgggtgcggagcccgggctccatcattactctggggacaggggtgagggcggatcccaggaactgcggagagcagctttcgctagcaggcttagacttcccgggcaatcggtctcgcggctttgcagtaaagtggggttcgtctggagcccggccagaagcggagagaaggccggccccattggctctgaggtcgccctggcggtagcaggggagatggtagcctagctctcctccttctcgcgctgtgcgggcccctggggggtagggaagtaagtcccacgacacaaaggggtgccgcttggaagggatgcctggtggattttacgccgtcttggtgtctgcgtggcgggtgcgcttcctcagtcccgaattatttagttatttgctgagagttttgcaggatctgattgttggtgatgaccgatttttcattcaatacataatccatgttgatgaagacatattagctgctccgtctctagaatttccttcgaaaccttttgcagtctcctcttgcgtgtgaccataccaggaccaaaagatcttaatcctagcttgagttctccaaactgaaaagaacgagaagttaaaaatggagatcgaacttcaatccggggcaaggcttttctctgtcagtcccaattaaagctttcccaaattctaaattatggttgtgacagatctgaccgttgacactctgtttcttgttaatgtctgtacagttagttggagggagttaaaatggaattgagtaatttt

SEQ ID NO: 5078 - DNA, 6000 bp, Homo sapiens
agcatgattttggtaaccacaacagttgttgatccaaggacagtgatggtccatcttcatcacacatctaacaagaaaaatttacataaaacatgaggcagaaaatcctgtctactttaaataactttggtcttcaaaagatcaagcaaataggaatccagcatgtccatgagctacgagagaattatacttcatggaacagaaagaaaaatctttatgagcttttaaacaattaagtgactccttttaaattctaaacagcacaggaaagggcaggctttctaacagcttctgaggaaaagatgtcagctacaagtatttgtttaaagaagtcaggagacccactgaaagagggtctctttataatgctcattataaagaaatgagcatggttcctggttttcttctagtttgtaagtgcagtgacccaagtgacctacaatagagactcaacaaatcccttatagacctccagtggggttaatgggctcaaatagacacatgtaacttccttcctgttctcatagtatcctttagttaatggatctctgagctaagcaagctaactccagaatataagatatggtataataaacaaagtcttgccgtgtactgttgatagaagacaatgttttggcctgaaacaaaactttatttgctttcaacggttctctaaatttcttactaatcagtgattatagctgttcattaaaaaaggtcacaggttatttcatatttttaatagtcagttttcttctaagtttttgatattaaaacatttgtgataataggcacctggattattagatgtgtataaagtgtaaatgtttgtcaataagtaatgggaaaagcagatctcccttataatttagactcagaacaattctaaagttagtccagatggcagctgactaacacaattaatcttgatatatggaaacaaacttaaggtttatacctttttcccttgttcttgtaggacaagaggcaaagtaaatctgtatttttctggaaaatcttttcacttgtaacaaggaagaattaaatctatttattatctagataatttaagtataaaatggcgattatggacacaagtattctgacaatattgtttataatatggtaaccttgcagtgaatagaagtagcactaatgtagtataagcaacaatgaaaacatcagtaattagttgatcagtcctcgctgaacagcaagaaagacaggtacctgttacactttctgcagtgatgtgaacgtggtgccttgtatgcttggcagactttacaatactggagatacatggtatcctgagaaatttccttggcagcaaaacagaaacaaaaatgcatcatcggatacttgaatataagtatgattcctacggtatgattttcttttatgggcgataggggaaggagagaatcttaacttgcatttccagtcctcttatttgagctaaaatatttttaaataagttttctggtaagagcagcatcactttcccaattacccagaagtccttttaaatttttcttccttgtgctccacctaaattcagtgtcactagttggttctacttaccccaaatcttagtggattcaggagttcagaaaaaggtagctgacaacttagcaggtattttagagtgaggagttaatcgtgagttgatagtcctactgaaatctgctccctccttgacattacccgtcaccacccctttcttgggccattttaatcacttcctaactagtttcctttactgtagtttttcttcagcacaaaccgtgtattgtcaaaataatattcctataatacacctctgactgtgtcagactctgcctgaaaacccctacaactttctatggtctacaatttctcatgtatttaagactgtcacaatctgcctttgtttcagctgtctctgccctacatgatcttttccccagtcacacagggctgtctactgtttctgaatacgtggtcccaccattctttcaacctgaaatgccctcttccccatctcctttggaaattcccactcctccctcaggtccccaactaacaatgctcaattcttctaactttaacagcacccatcacgttctactttatagtttagtgatttgcacaagtgcgtttgtttcttgcttaggttataagctctttcagagttcaaattacatcttaccctcctctgtacgcattttgaatagtacatagcacatgatatacaccagtgcttcccgaactttaatatacctaagcatcacctgggcactttattaaaataaagattctgcttcagtatgtctgaagtggagcccaagattctgcctttctgacaagccatcaggtgtggtcccttagcaggaaacatggacattcataagcataaatttcccagtagtttttaagctataaatggatttggactatacttcccaatgttatattttcagtgcaatgattttaaaactttatgatttaaaccagcagtttctaaagcgtttttctcagttctaagggatgttaatgtattacatgaaaaaaggtactacagccaaacctcactgtgtatgacatgtgatgtttcctaaacttttgaccatgaacctatcccacctccaccccacctccatcttttttttaatgcagagcaaatattcaataaaattgctttggaaaatgctattttggatcaatgtgttcaaacagatatgaaataaagtctccgagcctaaatgatcagtgattagagtaatatacttagtctctgtgaggacaaacagtaggctgtgtttggtattattggttagtagataaggcaaaaaccaaatatacgattatcattaaagttcattgtcttacagaatctttcttaccggtttccaccccagagggacaaagcccggaccgacaaacatggcattgaagtaattataaagaatcatgacagtccaatttatcaacatgatgaaattcacacttcctccagttgtatgtaagggccaataccacaacacagagtcaatcatggccatggtagaacatattgctataacaccaagggctatgatgggaccccagtgacacagtctctttaattcttgtagattttcaaacttgataaccgaacagaatgtacccattttggcaaggaagaatgccttcctactttaaaagaattatagatttcctttttctgtgcgcacatttccatgtgccacaagtccatgtgtgttctttaattgtcatgccttcaagctgtgaactgttaacgcagattacaccattttcactgtcaggcacccaaagctctttatcttaactaggagaatccagtgtcttggtctgaaacccaacctaaagaaaacaaaatgggaaagttcagttaaaacaaaacaaaacaaaacctttattgcataccatacttgttaactacaataaacacctacacaacagcatctcacaagtgcactacactttgggatgcatatcttgtcaaatgtcaaaaagaactacttttgacttatccaaaatatggtacaagtttgaatggcatgcaaactggatacacgattccaaaatagttttttttattccttctccgcttgtcaggggactgtcaccatccaacgcttagtgaatagtttgagaagacaaagaattttaggaccttagagttgatctaattcagtttccttcttcatagaacagaaattgtcttagagaggctgagtgattagaccaaggtcacaagtaacaggtgaaccagaatagaaggcaagtcaacgacctccctttatgaaattctaagctgcctcttatgaagtcttgaattaagccaagtatgagtcagacatggtctatgccatttgcctgcagtctcctccaccccgccacccaaacatcaagagaacagtcaatttggcccaaaagtaaaggagcgacagtgaaagcaaagagagcatgcaaggaaaggaagggaggagatagagcgagagtgtgtgtggtgtgtgtgaaattatgaccagaagagtatatgagaagaacctgaattagaagattcgagggaagaaagaagaggaagtgcctccaggagcgagggaaatggaaggcagggcggcgagctccggagagatttgtggaagggcatctctgcctggactggatctgaagatctggaagaggatctgagctacatggataatacagactaccacgcagcagacgctgttgacttgtgcctcagtttcccgcccgagtcatggagcagagggcttagaaataaatcctcacccaaggaagaaatatcctggtaagccaggttggtctcaacattcaggagagcctgctcccactctggtgggacaaagaccaccaaaatcgtgcttatattccctgccttgactcccacctcagtgtggtccctggtgtctgctcctcagccatcgcatatccggggcggcctgggctcacccggaacagattttttcctccttggatgactccgtcatggacacctcagcccaggacaagcagagagcaaaccctggcagcgagaggctggagtgcgggacctgctacaagccgagcacctctcggccagcgccctcgccaggactctcccgctcaggccccctgcgcagtctctgttactgtcacttccggaggttcgccgcctcaaacctccctccggaagcaagctgctgtgccttgtagcgtgtggatccggagccgattcccagaacacgaaggggggaaaaaacgcttctaatgatccctcagaacttgcatattttcatacgcttttctggggggaggcactaattggggcgcttttcctttgcgaacttacttatcttaaagtcggagcggaaaataaagcacgcacgcaacccaatttccggagaaccgagattgcgacgaacaaccaggaagcggctgggttgagagctgtccccggttctccgttctgctctcgggggcaccttccggggttcctaagccgcggggcccctcgctgcccctcgaggccctttccctgacctaggctttggcctgggctactcgttccggagccgccatgtcgtccgacttcgaaggttacgagcaggacttcgcggtgctcactgcagagatcaccagcaagattgcgagggtcccacgactcccgcctggtgagagccttgcccggctggacgagggtgctggggagagctgggagggtgcgggcggtggaacgccgcccgagtaagtgtgtctatgaggcgcgaggctggagtgggtggtgccggctgttcccaggagggatacggcttggcttggttgagggtaaggagtcaagttcgggtgtggggtgccgtgaaaagagccttcggaatctgagccatctgagttcgaatcccggctctaccttcttgtaacttgcataacctggaaacgtttcttaacgtcttaagagtcttaatgttttcatttgtaaattatagacatgtgagtattcaaagaaaatgaatgaaagtatgtagcctatggatctacaatctacagcggcgttgttgtgttagtaataatattgttataattatatgcggcaaaatagaggtaagaatcagggtgcctagattcaaatcctacctctgtcacttagaagttgtgcctcttaacccgggaggcggaggttgcagtgagccaagatctcgccattgcactccagcctaggcaacaagagtgaaactccgtctcaaataaataaataaaataaaagttgtgcctcttaaacagacttcttagtctctttcaactttccttcttagtaaatgggggaaaattgtacttctctcatggggttgttaggtagattaaatttatataacatatttaaagtcacttttggtgttgttagttgctgtattagcattagtatttttcataccccccacccccatttcttgtttctcatccttcttggggatttattgtataacccagttt

SEQ ID NO: 5079 - DNA, 6000 bp, Homo sapiens
caatattcatgaacaaaagccaacttttctgaattatctcactgcaaccaccttgcaaaggcaagagagaatcacagaagtatgtttatgccttcatctacacgtggctaagtctagatggtctagacaatcctccagggcttggcataaccaatccactagactcaggcatttccttccagaaaggacacctgccttgtccgacaccactttcacttctctcctccgactgccccccttgggatcctgagttcaaagcccagttccaaattcatatccaaaaggccctaatcacttacctcctttcaaatgtgttcatcaagagaaatttacctaattctagtctaggaacagaaaggaagcaagaattgaagtgtaagatttaagagttcaattaacatgacaaagtctgaagagcggggtcctagctaatcttaccaactgttgtcttcagcagcagcagtaatatcattaatggctagtatatcacgtgttttctctgtgtaagaagggtgctagtgtgttacatgttttatttcactgatttttacattataaggttgaaattattactctctcacccccattctaccgatggaggagacaggcctagaaaggccaagcaattgtccatgactgcacatctagtaagtagcagaactagggttctaaacagatctgatgtcatgtctgaatctgaatcattttgctgtaatactttcttggtacaattctgaggacagccataaagtgacaggattcacaacagatcattccctctctgtgaatggtaaagtaagcaactaattgcaaaaagactactttaaaattcttcaggaagcctatttcgtgtaacagaatctttgcaccagaggaaaacattccccacttaagaattcactcccatcactagaggaaaaggaacttcacaataaagtactaactgtatagtttctgctcatcccttttccttactttcccacagaaccataataattaaaaaaacaatgttcaaatatagtgccatagggtattaagaaagaactcacccatctcagttcaattactaaaattagttaagattcaaacactttaagagcaaaatctctttattgtttaaaaaatatcacagagtaatcagatttctttcttaaaataaaatttttaaatgttcactcttctgttctctttggaagcaatactttaatacattgtaacatgcacagcagagtaaagttcatttcaatagatctacccactctacttgaatttaagtaagttactatgttgggggaattaactgctttggctggaaagtttgctccaatttttatccttcttaactcaagtaaattatagttcacctcctctgggtcacttttagctcaacactgcactcgccaatgatggccagagagagagattataattacttgtcatcaaactatttttgccatggttatatatattaatgtctgttcatctacagacatacatctgaaattcataactacatggatatatttttcatctttttctatacatcaattggaaatagatttaaaaaggggcaagcacaagtcattattaagagggcaactactgcgtttttaagaattatgatcaggccaggtgcggtggctcacgcctgtaatcccagcactttgggaggcccaagtgggtggattgcgtgagcccaggagtttgagacaagcctgggcaacatggcaaaaccccatctctacaaaaaaaaaaaatcagccgggcacagtggcttgagtagtcccagctactcgggaggctgaggtgggagtagacttgagccgtgagggagaggttgcaatgagctgagattgcgccattacactccaacgtgggcgatacagcaagaccccatctcataaagaaaaaagaattatgattattcaataatacaagtcagtaagcattcttccagagccagcaatgcagtctcctttcaattgtaatgaagctcctgtgtttgggccttatataatactacagctaaggaaagacatagtttttttttaatttatttatttattgagacagtttcgctcttgtcgcccaggctggagtgcaatggcgcaatctcagctcatcgcaacctccacctcccaggttcaagcgattctcctgcctcagcctcctgagcagctggagttacaggcatgtgccaccacgcccagctagttttgtatttttagtagagacagggtttctccatgttggccaggctggtctcaaactcccgacctcaggtgatccgtctgcctcggcctcccaaagttttgggattataggcatgagccaccgggctctgcccagttttatttttaaggtactgaattcaaaaagtttccttctatgtgttaagaattgtcacattaaaatataaaggcaagaaaaaaattgtaacacgatctgttttcttggaaatttacaactttgcatccaaggatgattttgttaccttgtaaaacagcttcccaatacaaaaactaataacccaaagaaatgtttctactgctaaaacaattacaattaaaaatgagtaaaactctaactggaaccacaagtcctgatactctgaggctctgggactcaattcaaaggaagtagtctccaacaataacaaaaatcaagacgatctccggcagtggagaaaagcagaactgaagagaagaggcgaggtgatgtatcatgaagagatgaggccatcagccactttcgacacaaaaatctctgaggcagcagagcttggtggtatatactaccttggttctctcctcttgttcccttacttggactcataaacctctttaagacatcatccatctcctccagaactaactggggacttcaggagatgagtggggtataagttcagagatcctggcttcaagcaaatatccctattaacagaaaataggtgaggggaagaaaaacaaagaaataagggaagaaaattacttataaacacataagttttgggggaagtagggaaagggaaagaggaatgacaacttaggtccgggagaaattattgctagtaccaggacaagtgggcaagtgaagtgcccaccaatccgcagattaatgagcacatccacctttctacactttatatcctggagctagggtagggacaagtctagcagccagatgatggttcaatttccctaacaaaactaaacaaaaatgtaaaacccttttctgtaactaactactctaatctgtagagaaagatagtccccgaatcaacattgtacaaaccatagttacaaaagatcatatttatattcacctgctcattcacttattttcctgagcccctaataagtaaacgccaaggaaatcagacacagctcccaccttcacatagttgacagtctagcatagaaaataagatgtgctaaaacacaaaaggaaacacaaaaacaaaaacatttccagatgggagatgtgaaatttttaagtgtgaaaaattatcttgtaccaagttttacatgaaactgggttatacaataaatccccaagaaggatgagaaacaagaaatgggggtggggggtatgaaaaatactaatgctaatacagcaactaacaacaccaaaagtgactttaaatatgttatataaatttaatctacctaacaaccccatgagagaagtacaattttcccccatttactaagaaggaaagttgaaagagactaagaagtctgtttaagaggcacaacttttattttatttatttatttgagacggagtttcactcttgttgcctaggctggagtgcaatggcgagatcttggctcactgcaacctccgcctcccgggttaagaggcacaacttctaagtgacagaggtaggatttgaatctaggcaccctgattcttacctctattttgccgcatataattataacaatattattactaacacaacaacgccgctgtagattgtagatccataggctacatactttcattcattttctttgaatactcacatgtctataatttacaaatgaaaacattaagactcttaagacgttaagaaacgtttccaggttatgcaagttacaagaaggtagagccgggattcgaactcagatggctcagattccgaaggctcttttcacggcaccccacacccgaacttgactccttaccctcaaccaagccaagccgtatccctcctgggaacagccggcaccacccactccagcctcgcgcctcatagacacacttactcgggcggcgttccaccgcccgcaccctcccagctctccccagcaccctcgtccagccgggcaaggctctcaccaggcgggagtcgtgggaccctcgcaatcttgctggtgatctctgcagtgagcaccgcgaagtcctgctcgtaaccttcgaagtcggacgacatggcggctccggaacgagtagcccaggccaaagcctaggtcagggaaagggcctcgaggggcagcgaggggccccgcggcttaggaaccccggaaggtgcccccgagagcagaacggagaaccggggacagctctcaacccagccgcttcctggttgttcgtcgcaatctcggttctccggaaattgggttgcgtgcgtgctttattttccgctccgactttaagataagtaagttcgcaaaggaaaagcgccccaattagtgcctccccccagaaaagcgtatgaaaatatgcaagttctgagggatcattagaagcgttttttccccccttcgtgttctgggaatcggctccggatccacacgctacaaggcacagcagcttgcttccggagggaggtttgaggcggcgaacctccggaagtgacagtaacagagactgcgcagggggcctgagcgggagagtcctggcgagggcgctggccgagaggtgctcggcttgtagcaggtcccgcactccagcctctcgctgccagggtttgctctctgcttgtcctgggctgaggtgtccatgacggagtcatccaaggaggaaaaaatctgttccgggtgagcccaggccgccccggatatgcgatggctgaggagcagacaccagggaccacactgaggtgggagtcaaggcagggaatataagcacgattttggtggtctttgtcccaccagagtgggagcaggctctcctgaatgttgagaccaacctggcttaccaggatatttcttccttgggtgaggatttatttctaagccctctgctccatgactcgggcgggaaactgaggcacaagtcaacagcgtctgctgcgtggtagtctgtattatccatgtagctcagatcctcttccagatcttcagatccagtccaggcagagatgcccttccacaaatctctccggagctcgccgccctgccttccatttccctcgctcctggaggcacttcctcttctttcttccctcgaatcttctaattcaggttcttctcatatactcttctggtcataatttcacacacaccacacacactctcgctctatctcctcccttcctttccttgcatgctctctttgctttcactgtcgctcctttacttttgggccaaattgactgttctcttgatgtttgggtggcggggtggaggagactgcaggcaaatggcatagaccatgtctgactcatacttggcttaattcaagacttcataagaggcagcttagaatttcataaagggaggtcgttgacttgccttctattctggttcacctgttacttgtgaccttggtctaatcactcagcctctctaagacaatttctgttctatgaagaaggaaactgaattagatcaactctaaggtcctaaaattctttgtcttctcaaactattcactaagcgttggatggtgacagtcccctgacaagcggagaaggaataaaaaaaactattttggaatcgtgtatccagtttgcatgccattcaaacttgtaccatattttggata

SEQ ID NO: 5080 - DNA, 6000 bp, Homo sapiens
tctgaattattaacagcggtaaacctaatttcttcccactatatgccaaaagttcaggctcaatttttatttcttgtacttaaacactacaagttgtactgaactttaatatatattggtgcttaggatccaatttttgatgccctaattcttacaaagtatactttggataatgagtgagcagctgtttgtcttcctgcacgtggggctttactgccaaaagcaaacttgctaaatggattcatacacgcaagtgacagaaagactgaaatctgatgtacagatcactaccattaccaagcgtcttcattttctagtatactttgggagaaaagacgcatttggcttccatgaaataaaaaggcataagggcaacacatttccgtatttaaataagatgtattaaaaacaacaacctcggggctaagtgcttttaaaagacacacaaattacctatcctctgactgaactttcagaaaagtcctaaattaaattcacctacaaaggttatattttatctgtggcagcagatgcagacacacagccacttaaaaatattagaaactgtgagtttattaaaagttacctaagttttgatggttgtcaattgagcacagcaaaataagtcagaaacattttttcccccagtgaaggcagagaaatatctcattttaaatcagtatcagtgctttctatagtcttcccttaagcgctaaacaatgacatcccagaggctgagggcgtctttaacactgcattgactccggtcttcccttgcattatgtcatcaagattccactgtttccttctggcattttgacttttaaaaactagttactggattaatatagggtacacttttttgggtactaatatttgtaattaaaagacttagggtcaatgtatgagagaactccatctacggtccatcaactatatgtaaattatgataattttagaaaattttatgatagtagcatcagtgatagggaattttaatagttttaatatcaagacaactgggggggggcagactggaagagaaagttaattgactcctaccatcaataaattgctattatcaatctgtactttccctccaaactgactttaaaacaataaacttccttctaaaaaggtagactggtctcaggcagaaccatagcaaatgaaatacagataatttactctgggaaagttaatagaacaatctttgataatatttccaaacccaccagaacttttgaaccagtcttctcaaatcagtcgcatattctcacactatgcccctttgctggaaatatttttaaggcctcacttaaacttcccttcagatcctttagcttaccctttcaaatccttaacacagacaaatctaacggcctcaggtacatgtagtaactgggaaaagaaaagcacaaaaacagtgtgtattattaaatatttacttggaaaaagtacacatcagccaccaagtcttataaccatctgtttcccttagagattattgctagattgttgctttgcttcaacctcaagaattttaatttagaaaactcagggataaggttgttcttgagggaaaatgagatacagaaagctgaaggttggtaaaagggtggagagaggcagatgaggtttttttttttggcaaagaaccaatgggagagaagacaggttagtggggagaggtaagaagaacgtgttaaaatatgtttaagagggaaagacagaatttcatagggattatccaaagcatttaaaaaaatctcaatcacctaatatattctgtgtttctaagactagagtgggactacaaaggttaacaatttcttagacgttaaaaaagctttaagaaagaagacctgtctctcttacaatgcacattctctgcaaacaagggtgataaatgggtagatagatctggggatgtcttgaacacaaagcatggaaggctatagtacccaaattttgctgatcatctgtttagtatactgtttattaagcaaactaaaatatttaagggctttcatagctatgtaatcttccccaatccagaaagcctttcaaattcctgaagataataaatttgtcactttgtagaggccaattttctttgatgttctatcaatgcttgcaacagtttactagtaacaattcagtttctccctgtttatatgctgggggttaatagcatgtttttttgtaaatgggataaacggaacagaaaattgtatcttacactctagtacaagcaagtgctacagtaacagtgctttggtatggctgacccaatttgttgctaggttcaatattttggcattaaaactgctgtggcaacaagagaaagaggactcacaaactatggtaaacgagttgcttcagtgagtttgcggagctgcgacttataaaaacaggagagagctgggcatctgaagaatcgaagaaaaaggatttcagagaccaaatcatcctgcagaaaaccacatacactgatttatctgtacaccttttaaaggactggcaaatgctgccagcaagatagtaaaaaataaacttgatgtccgttttaagaaaacgatgcaactcaatatttgctaaacattgcctgaacttcctccaacatccttatttgcctttctttggagtctgaacttgttttcctggtttggataataagggagtggtaggaagaaggcaggcaaatgtaggagactgacggtgtgtacattttatacaattttgaagctagaaaggaaatcagaggtcaaagtggttcaaacattggttttggctgaggcaaccagagctaggggataattaagctccaaagttaagtcctagaagtgggcggggtcaatgcaaatttagtaaatctttaaaaacaacctttgtcccccctgctgggaacaccagcaccgctcaagttttttccggtacagagaggatttctaaaaatcctcataagtcagcgggcataactgaaagaccacagaaccaggtttactgagacatgggtctagcccaacatcctctgtgcttctcagccaatccacctccaacaagactcctcgcctccctgggctctttattccatataatttttcttttttacagtagacaaaagtggtttgtcctttccattttatgttactaaagaggtatgatgcaatgtattggggggaaaaaagctcttatttgctcgaagaaagcaatctgactacagaggccaaatctacagacattaaatgatttaaaccacaggataacccagtgactaccaaacattatctgacccctttcttcacgtactatatttttcctgaagctcaaattcagggctagccaggaccagtacacacccccagagctatttcattccattggctggctggccatccgcagcctacaacctgtaaatttactgtcaggacgccaggtgtttatttgtcagagatattacattgcttgtgatttttttgtgtttttccttttttttggtataaaacagaacttgtcagaatgggaaaattacttaattgaaacgattaacgcgtgattagtaaattcctttggttaataaaactgtctagatttcaaacttagaagccaagtcattttctatgttcggatatcatctgtcactattggaacaggagtgaacaaataccagaaaataatttgacagcttgcatttaggggagactcacaaaagcccaagaacactgacgaggcattatcacacgggcaggtcattccctttcctagaagtgcatttcggcaggacccgccgtgtgtgacacagacaccgggaccaaaaggagaccggtgcagcgtctactctgcatgcaagatcagcatatacagaggcccggggtgacggcgcgggggagggggcaggccaatcgcatgatgattttaaggcggaaaaatcaccatccacagagccggccacatccgaggcggggtgacccgggcggggacccggcccgctccagctgggctgggctgggctgagcagcggccccgcaccggcaggaggccggaggggagggccgcaggggaggcagggagggcgggacggggcccggccgacgctcacctcccttgcagggcgtgcggtgctggctgtgctgggcccggtagccttcgatgacctcccaggagccgtcgtcgcgccggatggggaaggagagactcagcacatggttgcagggcttgatgatccgcaggatgccgcgcacccggttccgcttctgctcctcgctctcccgggtcctcaggtcctccaccagcttgtcctccacgatgctggcgccgcgatcgaagaagccctccaccatcttgaagaagttggggtcgtcctcgcggtcggccaccgcctcgctgtagtggcgccgggcggccaatgccagccccggctgcggggcggcggcgggctgtccccgggcccagcccagcaacgcggccgagtcggcggacgccgagcccagggcagcgggcccggcccgggacagcaacagcgcttcgcccaggtagcggtacatggccacaagcggaggggaggtgcgtgatggtcgcgaaacaggcgcgctttctcagactccccgcgactagggaggaagggtcccgcgcgggttgcccttttaagccgcagcttcctgcttgcccggctgtcccctcccctcgggcgctcgccacctaacggggaggacggacttcggggacagggcgccgcccagggcgccgggcctccgcctccgccgcggcctccccgggcctcgctggcggcagcgcgcgccggcggggcgtcgggggcgcgcaggcgcgggcgggctcggcgcgcacgctcgcgcgccagtggggaagggaggggaggggagaggaagggcggggaggagagtggaggggaacggacgggaggggcagggaggggaaggtcggggcgggtcggggcgggtcggggcgggcccacgggcggccggatttgcccggaggccgcacccgcctccggcggggctctcaggtatgtgcgccgcgggggtccctcaggggggttgggggtagcccagggaggtcggggtcgggggctggcctctgtagggcgctcagaggccgagtccccccgagcgccgcgtgggtgaggcttggcggtctggtcggggaccgggtcatgtgagtcacgggcgcccctcctttccgcccgcgcgccctcggaacgggcggcccaccctggcctgtcctctggcggcctcaggccggggccgggcgtgcaggggctgacacgtgggcaggaaagcgaggcagagccgccgccgcgtaaggccgggctgagggctcggcgtcaccagccagggctgcagagagcggcgtggcacccggagttggattatgcgtggctggcgtgagctggaagggagtcactcgcccacaagctctcaccacgcgagcttttattgtcccgttcaactgctccgcagtgtggagatcgcatagttacgcacgtcgtggttgtgtcgccccacagtactgactgcttcacctttgcagacagaggctccggcccggcgcggtggctcacgcctttagtcctagcactttgggaggtcgaggctggaggatggcttgagcccaggagttcgaggctgcagtgagctacgatagctccactgcaccccagcctgggcaacagagggagaccctatctccctctgaaatagtctaaaataaggaaactagaaatgcgataatgcccccaggaaattctttctcaggaatatatgtatttgttaaatggttcagtatatgatttattttttattttatttatttatttgagatggaatcttgctctgtcgcccaggcgggagtgtagtggcaccatctcggctcactgcagcttccacctccctgggttcgttctagcgattctcctgcctcagcctcggggtagctgggattacaggcccgcgccaccacgcccggctaatttttgcattt

SEQ ID NO: 5081 - DNA, 6000 bp, Homo sapiens
agatacagtctcactctatcacccaggctggggtgcagtggcatgatctggactcactgcaacttctgcctcccaggttcaagtgattctcctacctcagcctcccgagtagctggaattacaggtgtgcgccaccatgcccaactaatttttgtatttttagtagagacgaggtttcaccatgttggcgaggctggtcttgaactcctgacctcaagtgatctgcccaccttggcctcccaaagtgctgggattacaggcatgagccaccgcgcctggccttccctgctttttttctgtagcactttgaatcatctgacaacttaaatcgtttactttgtttaccgtttctcctcctttagaactctggctcaccactttatccccaacacttaaaattcaatgaatattgtacctgtaggaaaaggcggggggggggggaagaaagggaggagggggataaaaaggaaggattaaatgtctttcaaatttccccgttttcataaaacagcactgctgagacccctgacaaccttggacatctccacatagccacagagccaaggcctgactgcggtctaccctgagtcctcgccgaatgcctgtgatttccctgggagcaaggcaaggcttcccttttttttttttttttttttttgattgagtgcaggaaactttattgatggtacacgacaaggtgaggctcccatggtgtctccctcttcagggcgtctgcgtggaaactgtgaggaggggagattctcagtgggggcgggggctgagtggggcagggactccgcagcagtgagagcctctctcgtcctctcgtgctctcactggggctggtggtccgggggtcttactccttggaggccatgtgggctccgccaccctgttgctgtagccaaactcactgtcatatcaggaaatgtgcttgacaaagtggtcgtcgagggcaatgccagctccagcatcgaaggtgaaagagtgggtgtcactgttgaagttggaggagatgacctggtgctcggtgtagcccgggatgcccttgaagagccctctgaagcctgcttcaccaccttcctgatgtcatcctatttggcaggtttttccagatggcagttcaggcccacaactgacacgttggcagtggggacacaaaaggccatgccagggaggttcccattcagctcagggatgaccttgcccacagggcttccctatcttgtgggagagtctcacaaggctgtttctcatccatgtccctagtttagttgagactagggctttccatcttccccttctttctccgcaccccctacaacctgctccactttaggatggagccgcaggcttctgtgtaaatctgtagaactgcttgctgaagtttagtttgttcctcgacagagtgacccaccactcataagacctgtcatctgacctctgagattgggaatgctgtcccatgggattagagatgcagggagctgacatcatgttggtcttgattttgctgttttgtgagacctgcgaattgctcaactgcttgaaactcctcaccttcacttgtctctatggacacagatattctttggagtactataccgttccaattagtaaagctttcagtattcattttgcatctcatcattaaagtttattcttagtaactgatttaaaataatgaattgtttacataacaactactgttacataacacacacacacacacacacacacacacacacacaaacacacacacacagctaaggtcagaataccatggaggaaaagaagaatctggtggtcaattcccttacattcttctattgacaaattttcttgttgggaccttcacttatttcatcaaaggattgtggctaatgatctaatttattactcagaatctttttatttatttgttttggagacagggtctcactctgttgcccaggctagagtgcagtggtgtgatcatagctcactgtagcctccaccttctatgctcaagcaatcctcctgcctcagcctcaggagtggctgggactacaggcacacaccaccatgcccagctaattttttttttttttttttctgtagagacggggtttcgtcatgttgcctaggctggtcttgaactcccgggctcaagcaatcctcctgcctcagcctcccaaagtgctgggattacaggtgtgagccaccacagccggccatcactcagaatcttaagtcattgtcaaataatggaaagcatacaaatcaaacagtagtccaattctagaattaatataaaaagaaagctctaatatacaaagaccaaacagattttacaggataaaacaactgtcattaaaaagtaaaactggcaggtgtggtggtgcacatctgtaatcccagcactctgggaggccaaggtaggagcattacttgagcccaggagtttgagaccagcctgagcaacatggcaagaccccgtctctacaaaaagtacaaaaattagccaggcatggtggcatgctcctgtagtcccagctactcaggaggctgaggtgggaggatcacttgagcttgggaggaggttgcagtgagctgagatggtgccactgcactttagcctgggcaacagagcaagaccctgtctccaaaaaaaaaaaaccgtttcttcagaataggatatcaaatatgtaaagtaataatttgagaaacatgaaaaagcgttatgtgtaaagaaaatcagaagacttaatctgtattagtttaatgtaaaagcatgcacatatgtgaaacaaagtagaagggaacactaaagaaaaaaatgggtgtgattgggtcatgggagaatgttttttactttttggttgtaatgtttgtgtgatacaagagggacagaaattactttcgaaatgtacttgttaattttagcaaaatcctcgtggaaattatactgctagttttaaaataaaacacaagcactaaaataataaaggttatgtttcatttttattaacttagttttgccacggttgagactggatttgccatagttcaatttatcaagcacttaactatgtgttccgcacataataatcatcttagcatagaggaacatgtcttctaatccgcacaagagatactatttttatcacgtcatagaggaggttaataaacttgcctaggtcataagatcttcagttgatgaagttaggatttcaacccagagccaagtaatgtaatggctgatgttttccacagagaaaatgtaagccgagatgatgctcaaactataaatctggaaccttagggggacaaaaacgtatggatgtctccttcccattactttagcattttaattagattcctgtgtctctatttgtctttggaaatgcaagctgcttgcagttcatcatagctaactcacacaattcattttatgaaacacaaacctgttctcacaaactcactgtcatctctttttaatctttctaattgtgataaaaatcatactgcactttaccctgtgtaacctccaatgatctttgaccaaaagccaaatcttttttttgttgtgtttacttatggacagttaggttctacataggtacttaaacatgaaaattgaaatcatagaggctgggcacagtagctcatgcctgtaatcccagcactttggaaggccgaggtgggcggatcacctgaggtcaggagttcgagaccagcctgactaacatggtgaaacaccgtctgtactaaaaatacaaaaattagctgggctggtggcccgtgcctgtaaccccagctactccggaggctgaggcaggagaatcacctgaacctgtgaggcgctggctggagtgagccaggttcgcgccattgcactccagcctgggcaacaagggcaaaactctgtctcaacaacaataataataataaataaaagaaagaaatcacagaaactataccagaaaataggatacaaaaccaacagtgaggagattgagaaaaggaggcagatacgtaaagaggaaaaggaagggggcccaagtaaggccggaaaaagcggggagaaggaggaggctcattaggtcagaagcaacctgccgtcttctaagttctggccaagggtagatcaacagatccagattcctgagctttaaaatgttattcggccgcttcatcacttgtccccgactttgcagcgactccgatggtagcctgagtctccattgcttggagcagccacagtggacactggacgggatattctgtgcagctgttgctgaactcaaggcaactcttactgcctttctcttttcgggctcaagattccctgcattattgcccataggcatgtgttttaccccatactccttctcccttttatcttgattttcgcggtgctggggagtctgcagggattccatggcgacgggctcactgggacaggggctggggttgtgcgtccctgaggcaaggcaaatacagaaaagcgaatagagacagagggctaagattccaaagcactgaaaggtagaaactgggttagaagagagaggggagcacaaacgcccggagagagcgagccctcgggataccattggctataggctggcctccgaacaactggacggtccaagtcctgagcgtctggttacccgggcaaccgcatggtctcgcgatacatacctcgcgcctgcgcactgcccctgtagcgggggtggggggacccggtccggagactccaccccggggcctaaactcgagtctaaaagattgggcctcgttgtgtcgtttccgggtcgcgcgacgctgtgggccgctttcccctctccggagtgacctaacacaggataacgaaacctgcactgctccgagcgcttcctccccggcccgtcgcgtctgcgaggcgaggccgggaggcgagggctctgcgcacgcgcggcgcaggcgcactgggcgccggtgctgttgccttcaggtgaccacggattcgccatcgtgagttccaggtgggcgcgcggggcccacgtagggcaggaggccagccccggggggatcgggcccgggactctgcggaatctggaggccgaagcccgcgcgcacgcagggtctctgctgcttccccaacgcctgttgcgtggccgcaggacccgccgccctcccggttgggccgcccagtcccgggccgggcgcgtgcacccagagcttccgcgtttctagtccggctcctctgctggattgcagcgccggctgggcaccaggagtacaaagcgaaaacccccgccggcccttctgttctccacggtctccaaggagacacggacaacagaacaacacttccgtgtgctaaatagtaaagcaccaaggtactcgatccaggggcggcgtgcagtggggaggtgagctttgggtcggccgtcgcccctcggctaccggcgggatccagaaaccgggagtcaccaccaataccgttctcaactttacttccagctggtcactactgtgtcgggagattctaccttcttttccgactaacatgtatttttctccagtcctttctgcggcgtctctagtgcaggccaccgtcatttctaacctggacgactccaggagcgtctttgctgctcggggactcttcctttgcccagatccacaaagatctataacgtctttctaatcacgacacctctgctttagatgttaaagttgcttcacactggaacgcttgcaaaggtcttcattatctggtccttacccacctttcctagtttctcaccgctttctctagcatctctgccccagccacattgaacttatttgaacgtgtttttttttttttttttttttttgagacatagcagtcgcccaggctggagtgcagtggcgcgattccggctcactgcaacctccgcctgccgggttcaagcgattctcctgcctcagcctcccgagtagctgggactacaggcgcctgccaccacgcccggctaattttcgtat

SEQ ID NO: 5082 - DNA, 6000 bp, Homo sapiens
gacttttgagtttggatactctgaattactctgagggactcgtgcttcttgtccaaggtgagggcaaccttagattagaaagcaaggtgagctggagaactggctctggggagctcttagaaacccaggtattgctcaagatggctcctgatggaatatggagcttcttcaaactgtaaaagagtctgcccttcttttttccataaaaggattatcagataaaatatagtaaaagctaggctgggtgtggtggctcatgcctgtaatccgagcactttgggaggatcgcttgagcccaggagtttgagaccaccctgaccaacatagtgagaccggcctcttcaaaaataaaactaaaaaaaattagccaggcgtgatgatgcatgcctgtagtctcagctactcggaggctgaggcagaaggatcacttatgcccaggagtttgaggctacagtgagctgcaatcacaccactgcactccagcctgggcaacagaggaagacccggtttcaagaaaaataattttaaaagtattaaaagctaaaaggaaaaaccaaaaaccaaaaccgtttccactttgtgcacctgtgagcatgaagccctctgctccaggaacatacaagccgttccttggattggttttcctttcttccttctgctgtgcatatcagcattctcaagaagccattttattccctagaggtgactacttttcagaaacaggaaaaagctggactgcccagcctgggttgcaaggtaaagaactgcttttggctgggcgcagtggctcacacctgtaatcccagcactttgggaggccgaggcaggtggatcatctgaggtcaggagttcgagaccagcctgaccaacatggtgaaaccccatctctactaaaaatacataattagccggacatggtgacatgtgcctgtaatcccagctacttgggaggctgagtcaggagaatgcttgaatccaagaggcagaatttgcagtgagcccagatcacaccattgcactccagcctgggcaagagcaaaaaactgctttcccagggagcgcttctcctgctggtcttttcctctcccagtgtctttatcttaggtctatgtgaccgaccacgtgacacacccgagaaccctggcacttccccagggccaagttgccagctggtgttaatgtgtttgatttaatggcagcagactcctggcttcctgcgtcccagagtttaacctaaagttacctttaggacagcagggcaggttaatggggtatgagtcaaccattgtaacttctacttcttttatactcttaaaggtacagacatagatatgagccagagacaaatcccaagactttgaatcacagccaaaagaaactcccagacccagtgcaatcagattcacttcacttttattatgaacaaacacaatctcagattagtacaattagcttcagagttgatattaatagaaattattccaaaattattcttgtcacaagtaactactatatcccacataaaaagggaaaaaatcccacccaatcacagaaaaggcatcctctgtatgtttccgtggcaatgcgttgtttatgtattctcaaattttgtctggctagttatccaccgcttctccaatggattcattcagtttcttggagaaccatatagactaatgacagcatctgggacacacggacgtatcaagttcatggtggacattcctattataaaaaatactcaggtcttgagaattcctgtgctgaaggatcccaaaatgctttctaaaaagcattagtcatgcctcaaaactgccctttgaggtaggtcagtattattatccccattttaacagaaggaaaactgaggcaccttatagttaagtgacttgcccagggtcacacagcaagtcagtggcacagtggttggagaggccctggccttaaccaccagcataacatggccacctcgcttttttaacctttcatgatgacctatttgagctacacttacagagaatacacccaagatactagcaaaccaaggagaaaattttccattttaaatgctacaaccatcttttaacccaaaaaaaaaaaaaaaacttataaatcaaatacattcaaattatttccaccctccatcaaatgtgggcacttaagaaaagcagccctaacaaaagtttccagaatgaagcccagaagggaatcctgcaaatcgtgatactgataatcctccactcaggcccctttttctaccagccacttcagtagggtctcaggtgcaaagggattctgcagagggagtgagggcaggctcatatgcaacactgtgattagaaaagatgtaaggcacctgagctaagttgtcagcacaccccccaaagcaaggactgttagaaatccggactcttgatcagatctgagtttatcattaatgtgtcacttgaattgagctttagaatcttgaaaatcgtgttccttactcagcagacacactcccacccacacccacagccacacatacattggggccctcagcctgaggtgccatccagccttatgtagggtcatggtacagatcagatccatggcacacgattacaataggaagaagtgaaagttgtttttattgtttatatattatcaagcaggcatctgatgacctgtggaattagaaataccagcagacatttccaaggggtaggtgcacaggtcaacagaactaaactacagtgatcttcccttagatccttttctactgaggtgaatagctcaaaagacaaggatgcctttagtccaggctaacccctgtagcctctacgcaattaacacagaagaaaggccttcctcccttccagcactggggctcaacagtggactgagtgtttggtagtgtacatttccaatcttaatagagcaaagccagacttctgctttgatgactgagctacagggacaggagtggtccaaggttctcaaattctgtttttgtttttttccagacttctatactattgtctgccctaggctgtagggaatgctggttagtttgctgaacagacactgtgttcagcagggtttgtggtatctcaaatcccaggtctcagccaaagctttgcagttcaccctgactccagggaacagggcctcctttcgaggtgaggcacttgggttcttgcccttgcttcttcccagtgagaactgtttcctcctacttctacaagcattgcactgccagctgagagcactgactcaggcggggcaccctcaccaagtaagcagggggcattcagcatgccctctggttctgacccagagagaggggactgaaaataaaccctcttttgctctgtggctggcccactggctcaacatgagcgcttggcttggctgtgcctcatgagagagggagggagagagaggctttctgggccagagatgtttctgggagggtttgccagccttgtcttgagccatcagtgtggcaggggagcacaggggtgtaggtggagacactgcggaggccacgtgaaagtggcagctagctctactttcaaaagagaagcagtggttcagtgaccctgagcattctgtgtgcaggagggagctgcctggacagcaagtcatcactgcctctgaatacacacaaaggaggctgcctgtccagggaaagaagaaaacgttcagggaagagaaagatctggtcaaagaaaagggacagacagggtagagccaggaatcaagaatcagggtagtgaagagattcctaaccctgccccccaggcagttgtatactttaggctagatgttaacagagacccccttctcctcaaaaaaaaatgagtgaaggggcacaacactgtggagagaagccttctagtttttactcatttcaaggagaaactggaactaattaatgaatggacctaatatctagtttattttattaagactcccaataactcactcagtaaccttctcaagcccctggcaacgtgttctcagatcccttcctatgtgaagttcgctcttagaagctgcctatagatcctgtccctcagcctctccatctcatgtccagcagtggagaggaaattggcatcccaactaattcctcctctccttcagagttttttccaaacatccctctttggaagggaaatactctaatagtttaacgttctaagcaatgtatatatgtatatatattttatttttgacccgacttcacctccttaaatccttccctttttttggatgtttggaaatgccacagccatcttattactatgaggggaagaaccaatatcctgaagatggcagagcagaaagaggaaagaactgtaatgagcagctcatggaatactcaaaattctatgagctgctgtttttaccaattctggaaacacccaacttcaagacttcttgatatatgaactaagaaatctccttgttattaaagaaaaaaagaaaagaaaacccttccccagcagagaccacttttactacaaacttaaaatgtcttttctttatcctcggcctcaactatatgttgcggcattgaattagcattgccaaacaccgcagccactttttaccccgagccaggagagaaaggaagcatgctatgtggtggggcttgaagtcctcattaggtaggcagctgtatgtctgatcatggcgagaggttcctcttgcttcgcttccctcatccttacattcatacatgctaactctctcccccgacaatttacctgctttagaagctttgtgtcaaatgaagttgcttttccattccatctagcaaaagcctgggctgaagataatcaacaggggactacccagaagattctgttttatctctagctcaagccacctacttcaaagctcacaacagctcaaggaaagagagttatctggagcaaagaccattcgttttaggctacagaaaggttgtctaggctttggaagctggacactgagcaaagactgaccagctgcttgcctgggaggcaataagggaaaggagggcgatagcaataaagtgaaaaggaggacaatgggcctagaagagagagaggataagagaagaaataatatcagcttagcatcataaaggcagagttgttggctttcaatacttttgaattttaaaagaatactgtactggaatgggttaacatcatcatctttagcatcctggtagcattattcagtagttaataaacagacattaaaacctctgcctggctggtttttgaaaaaggaacctgagggaccccaaactcagccactcttgtagtttccatctccggttcttttaatcctggccaagatggcggccttggagactttcttccggtcataggccagaccgagggcggccatgcaatcaatgaagaatgtggtgaagttgatgtgccagcggtactcactggcagagtagtcatagggaaaggagtggtggtagttgtggaagccctcacctgaaacaaaagcgagaagttatggagtgacggtgcattgaggttttcttgatttgtgcacaccagttagctagcagggtacctcacacctgggagaaactcgctattgttgaatggatgaattcagtctcttttaatatgaaccaaacagatcccctcagaggcatctttacttttattattttactttttttgtagagacggggtcttgccatgttgcaagcaaccctcccacgttgaccacccaaagtgctaggattacagtcatgagtcactgcgcccagccagtcaaaggcatcttaaggagtgattggagaccctggtcacccgtggctgtctgggagccttgtgggaggagaactgacagtttctcagaggataaaatgactagagagaagctcctacttttgggaatgggtatcaggttggaaaattccaaattcactcttggccctgccctcaaggctctgtgtgcatgtgcatgtgcacgtccttgcagaatgaagcactc

SEQ ID NO: 5083 - DNA, 6000 bp, Homo sapiens
atgaggctgagacctactgggttgcattcccaggaggttaggcattctaagttacaggatgagatagggtgtgggcacaagatacaggtcataaagaccgtgatgataaaacaggttgtagtaaggaagccagccaaatcccaccaaaactaagatggagaggagagtgacttctgctagtcctcactgctcattatgtgctaattataatgcattagcatgctaaaagacactcccaccagaccatgacagtttaaaaatgccatggcaacatcaagaagttaccctatgtggtctaaaaaggggaggaaccttaggggtccccctttccctgaaaacttatgaataatcacacattgtttagcataaaatcaagaaataactaactgtaggtatccttcgtggacaagcccaagcagctcctctgcctatggagtaccccattctttactcctttaccttcttaataaacttgctttcactttatagactctctcgcctttttttttttttttttttttttgagatggaatctcgctttgtcgcccagactggagtgcagtgatgcaatctcggctcactgcaaccaccgcctcctgggttcgagtgattctcctgcctcagcctcccgagtagctgggactacaggcgcaggccaccacacccagctatttttttgtatttttagtagagatggagtttcaccatgttagccaggatcttgatctcctgacctcgtgatccgctcgcctctgcctcccaaagtgctgggattacatgcgtgagtccccgcgcctggcgactctctcgaattcttgtgcgagatccaacaaccctctcttggggtctggatcagggcccacttccagtaaaaattccagtgtttatctccttcaaaactcaagtttgagttgagaacaatggcaaacttagttgccactgtaatcctgttaagaggtgggacctttaagaggcatttagttcaggagggctctgccctcatcaatggactaacgccattattgtgggtacagaccatttaatagatgaagacaacaaagatttagaatctgactcaaaattccagacttctcatcccatggatattgatacacaaataaattcgtgacatactaaggaataaagctgaccgtaaaactaccttaagtatgcatacccgtgggggcgcggtggctcacgcctgtaatcccagcactctgggaggccgaggcggacggatcacaaggtcaggggatggagaccatcctggctaacacggtgaaaccccatctctactaaaaatacaaaaaattagccgggcgtggtggcgggcgcctgtggtcccagctacttgggaggctgaggcaggagaatggcgtgaacctgggaggcggagcttgcagtgagcggagatcgcgccactgcactccagcctgggcgacagagcgagactccatcttaaaaaaaaaaaaaaattaaaataaaaaaaagtatgcatacccgtgtttgtttatagaaaaaaatgtgtgaaagaatttagtctaagatacgtatccctgagtaatgagattatgggcgatcttatttatactttcagcatttttagcaaaaaaacatggatttgttttaaggctagtcaagtgaagcaatgtatcatttttagagtcagaaagaaacagtaagttccttacagcctgggggcagtaaaaagaaaaaaaaataaacagtaacttcttttgaaactttaaaaataatcaaatcatttcaagatacatattttctacctctttgaaaagatttatttgaattagttatatctcttttatttgaattagttatatctcttttctttcacaaaaggatttagagttgagctcttctcaatgaaaaagttcattttctgtgtcttcctttttaccatttaatttcaagtgtattcaaccaattaagcaacaaggaattccaaatgtgttaccatccttcaaagcaagaaatgcctgagagtcctcactatatttgagccctgttaagactgcctagggtacataaaaatccctttatcatctctaccaacatcacatactactaactgtccattcagttgatggtaaattctcctaaaatcaggcctcttgatgtgaactaaggcaaagagttgagtttcaaaaacttcaataccatattcaataggccatgtcagacttctttttcaaacaattactaggacttctccagacactgtcatcttggtaaatagcaccttcaatgcattcatctgatcaaacccagaaacacctctccccatcatctctctgatctctcatgcaattccactttcttcaaaatatatctcattctcttctttccataaccactgcaacagctttaattggggggtgggtgggtatttttagctgataacatcttccactcttgccctctcctattctccatatagcaaaagccagtcatctcttaaaaatgaaaatctaatcatgttttaaaactttcaatggttcccaatacacttaaaatgaaatcagccataatatatcctttactccctgtatgatctgcctcaagtcttttctccaacctcttctgtcactaccccctttaactactatgttctagccacactagccttatttttgttccttcaacctgctaaaccctttcctaactcaggacctccaggtatttttctgtatgcctgtgatacctgttcactcttcaccttgctaagtcctactcatatttacttcatatcaatattaagagaagattccacatttgctttgctcacctggtacataactgatgcccaataacaagcagctgcttcagtttgttagccagtactagcacaaaaaattaaaaattcttaaaatgagggggagtaaaagttacacaaaggaacacaatcatatgcttaaatcaagaacctaagagtgtcgattttcttaaaaattatgttttaaaaaaactcaatgttttaaaaactatttctttgcaaaactgtaggaactctcaaaaaatctattaaaatgttaccatcaaaaaaagagactggaatgaagcaagaataaaacattgtcacaagtgattgcccaagagcgtaatgaaaacccttgaaatcatttttctcttcactaccttttgttttacaaaacgatgaggatgaggctgaatcaaaattttaactgcaaacagtttacgactcggaaatacacattttagttacttctggtcaaaatgagaaaaaaacttgcatggctggccatccgaaatattataccatgtttgggttaaatttaaattccatttaaaaggaaataaagagcaggggataggggctgtgaacactaaagccactggaaagtcggaaaaaagggaacattacctgctccctttaatgtatggtacagacattttcccaccccagaacgccggacactgaacaatgccggacggattctctagcagaaattccacgcaatcagttcgataagccagggtctctctctatcactgagctcacatcccgcctctgccctcaacagcttcatcgtcagcactgaagtctccggcccactctcagcgtcgtcccctgatccactcctcaatcctgggattcgcattgagtacatcacttcatttctagagtcccttctgagaaatcgcttccacgagcgcaatttgcaaacagccacgggcagggcgggaggaaaaaaaatgggctgaatgcctggcttacctggggttgcaccgtgctcgacaaggaaaacatctccggcgggccctcagcgacctcacccgcctgccgaaactgtgcccctctgtccacggcccggcggggaggcgctgagcccttcttttttcctttttctccgacccgttgcccctcactcctcccagaaacggaaaatggcctccccttcctacagctactgcaacgacagacaatccgccccggaaggcgaggcgctaactcaacagtacttccggggcaagtgagcgcccacaaggccaagtgcctgcgcgttctttcccgcggaagtagttgacatttacaaggagcagcgcccccaaaggtctttagctgttttttaaggggagaacagcctttaccctctttggactttttcttcgttttttttttttttggagacggagtttcgttctttcgcccaggctggcgtacagtggcgcgatctcggctcactgcaacctctgctccccgggttcaagcgattctcctgcctcagcctcccgagtagctgggattacaggtgcccgccaccacgcccggctgatttcctcttaagactttctacagcttccttatgaaatcttctgactgggccttgagcaataaggtcttttgctacaatttagtgctcttttcctcacactaaatcgaaaactctccctgttggtcctgatctgtttcagtcaggcaaattacatcctgggaaaacgtcagatgacaggggaggccactcgcttcctgctcatccagtttcgacactttctgtgctttcattagcttccagacctcagccctggccctcgctttactgtacagtcagaactggtttctacgcctcgcgagggtgggaggtcgtgtatgggaggaggaccgcttcccaccagcctcgttgggaagccaggagaaatctcttcaaatcctgcgattcagagtcaagtcccagtcgtcctttttctggtcggcccagaactgtttgtgcctcctccctcatgaggaatgatgtcagtggggccgcggtcgccgcccacgaagagtgtaaggctgcgaagtcggggctttcccgacgccccctccgtccgcgtctgcgtaggggaggtgacgagggcggggcgcggcggcggggtgacgtcacggccgcgcgcggcgtgggcggagcctcactttgaacccagttggcgggagtggctgctcgcggaggggcagtgtctgcggggccgctgtatgctgtccagcgatggatcccaccgcgggaagcaagaaggagcctggaggaggcgcggcgactgaggagggcgtgaataggatcgcagtgccaaaaccgccctccattgaggaattcagcatagtgaagcccattagccggggcgccttcgggaaagtgtatctggggcagaaaggcggcaaattgtatgcagtaaaggtaggaagtcaacgagtagcaaggaaggggttaggcccttcggccctccttcctgccccaccggcttgggcaggccccggggttgctggagcgaggagtctgggtggcctggcttgctgaagcctccagagccctgcgagctgacttctttttggggcgacatcagcggtcgggtcgggtgtctcgcctctgttccgcccttccctccatatctcagatgcccagtgagaacagcaaagtttgactctcttctccctgcccagcgttagcaaatgaggaaactgaggccaaaggcaaagggacttgaccgaggtgattacatcggtcttagtacaacaggcacttaaagccaaagccgtgattcgtagtctcaccctggcttgagttaggtttcttttttatttttttttgaggcggagtcttgctctgtttcccaggctggagtgcagtggcgcaatctcgactcactgcaagctccgccccccgggttcacgccattcccctgcctcggcctcccgacgagctgggactacaagcgcccgtcaccacgcccggctgattttttgtatttttagtagagacggggtttctttagtagagacggggtttcaccgtgttagccaggatggtctcgattccctgacctcgtattccgcccgcctcggcctcccaaagtgctgggattactggcgtgagccaccgcgcccggcgagttaggtttctaaatccaaaaggtttttagtaattagtggttttgtttaccttgtttgctttgacgtgcagaatcgtcgaaatttttctaccacag

SEQ ID NO: 5084 - DNA, 6000 bp, Homo sapiens
taatagtgaaacacaaaaataaaaaatgacagcaagagcagcaaaaaagtgcttttgatcttgtaatagaatgaatatctaaactctttctaattctacccttactaaatatgcttctttgggtattaaaacccctgaaaaaagcattgtaaaaatagcctgttgacatctgttgttttatatatagacagagcctaaaatatttcattcattaattcaataaattagctctttattgaggagctactatatgctgggaactctgtgtgggtagggactttgctcctcactgtattcctggtgtgtcacttaggacttggcacatagttggcacttaactaacttaaaaaatttcctcttgattgtttaaaggcttctttggcaataaaatacacataacatggaaacttaagtggttaaaaaaatttaccattttaaccatgtaagtacacagtttggtggcattaaatatattcatattgtcttgcaaccatcaccactatccttctccagaacttttttcatcatcccaaactgaaactctgtacccattaactccccatttctctctgcccccctgccactggcaatcaccattctagttctgtttctatggatttgcttcttctaagtacttcataaaagtggaatcatataatatttgtgtttctgtgtctggcttctttcatttaacacaatgttctcaaggttcatgcattttgtagcacatatcagaactccactgctttttataaatcaataataatctattgcatggatatgccatattttgtttatctgttaatctgttggtggacacttgggttgtttctacattttggctattgtgaatgctgttgctataaatgtgggtgaacaaagatgtgttcaagtccctgttttctattcttttgcatagtgtatactacttaaaagtggaattgttggatcatatggtaaatctatgcttaactttttgaggaaccacctactgtttttcacagcagctgcaccgttttacattcccactggcaatatataagagttctaagtttttcacatgctcaacacttgtttcccatttttttggtaatagctattctaatgggtatgaaatggtatttcactgtggttttgaattgcattacctaattactagtgatgttgaacatctttccatgttcttattggccacttatgtatcttcttggagaaatgtctattcaagttctttgctcatatttagattgggttgtttgggcctggtgtggtagctcactcctataatcccagtgttgggggagaaccactggtatcaagcgatcctcctaccttggcctccccaaccactgggcaatatgatgagaccttgcctctacaaaaaataaaaataaattgggttgtttgtttattgttgagttgcatgagttctttgtatgtagtcatgcaccacataaggatatttcaatcaacgatggatcacacatcaatgacggttccatgaggttataatggagctgaaaatttctatcacctgtggatattgtaaacatcctaacatcacaggacaacacatgactcacatgttcgtggtgatgctggtgtaaacaaacctactgtactatcagctatataaaactatagcacatacaattatgcagagtacataatacttgataattataataaaagactatgttactagtttacgtagttaatatacaaatgtgttgttattttagagtgtattccttctactcacagaaagcaagttaactctaaaacagccccaggcaggtccttcaggaggtattccagaagaaggcatcatcatcgtgggagatgatagctccgtgtatgttattgcccctgaagaccttctagtaagacaaaatgtgcttttggtatgatacctaaaaaatcattgccacatccaatgtcatgaagcttttcctctgtgttttgttctaagagttttgtcattttagcctttatgtttaggtattttatccatttttagttcatttttgtatgggtatgccacatgcaagttaaggacccaactttattcttttgcgtgggttatccagtttccctagcatcgtttgttgaaaaggcactcaactaacttttactgagatccttaatacaatgagaggagatgtcatataaaaagtctcaggattaagagaaaagagctctcatactcattttcaggcccagccttctttctcatctattattggttcctttttaccagtggggcaaatgaagcctgggatggttaaataattccaggtaccctgccccaggtaccacagctaagtagcaactgtgtcttaatgttgcttttgagaaggtggtgttgcatcatttgctttcatagtttacttggggaaggggatgttcctcagggaaggcaaatccaaatctgcagaagacggaatgacagtttgaaaaactgtcttcagtatgactcttgtttcataatacaaacaacataaagtaaaactcctctgttgaaagcttgtggggctgtacagatgttagagtgcaagcgttggatgaatgtgaactaaaaatgctgggtaaacataggtctagtaggtattagctcattacaagtatgtgtacacaaccagtccttactgagaaaagacatttctagatgatatagccagtgaatttaggaatttatgtcttagttttcggcccccagaccatttttttttttaaccttgcacacagaattaccccaggcttaataataactgccttggttctgaagttactcagtctctccagttgctctgggtacttaaatttcttttccagttacaacaatctactgtaggtaagggaattggggtagaaagacactccaagacagttcagattgcatgtttataaggaaccttgacatagagattattgagttaaccagaccattgttgcatttcccaggagctctgacaggccatggggaaatcctctcaggccaggagaacagcggtcctgagttccagaaattacagatggagtagtgattctactcaatctgtaactggtattacaagaggattggtatgaggacccggggaggtgctggtggcagctagttctggaagccattatgtgactcagggataggtgggatgagaggataaagaatagaaactaatgaaatggcagaatcagaacatttattttattttaaagctttatttataattcacagataatattagtatatatttatgaaattcaggacatttaaaataagctaataatggaattctctccagaagggctgtttcaatttgcagtgaatgaaaatgctggataccctatgatctgacagcacttgggagcatttgttttaaaatttcatggccaatatttacttggaaattacctcattattttagtttgtatttctttgattattaaagaacttcagaatcatctcatttgtttgcatcatttatatttcttttgtaaattttttatgtgctttgttgattgatttgtaacagtaacttgtacattaggaaaatcagtcctttgtctgtcatttgtattgcaaatattttcacagatttgccttttgagttcatttatgatgcttttaggctccaaaaatgttaaaatttgatgtagttagatttattcatttttttcttttatagcttctaggttttctattgatattagaaaggccttgtctccaagataatcaaattatttaccttttttttagatttgctacaatttcattttttatgtctcacatcttgaatcaatcttgaatttattttgcacgcatgacagtgcaagtttccatctctctgagagattgctgggcaacatgtctccctctggaatccgagctccaggagggcgggcacttagcttgtgctgcttgccaaagtgatgctggtgcctggcacagagcctgccacctggtaggcacttagtaagctcttcttcaattagtacatgataacattctagaagatagagggatgagctgaatctagcaggaagaaacctttatttctggattttatcctctaaaagaaatagaaatagaataaagcatgcccagaaaatgaaaaccaaggtggtgaaggaaacagaaaccaaattagaggaggcactggggatgcttactttggaaaaaattcagtgaagaaatctcttcttttgtttagtgttaaggagatggatgccttggcttttagagtttaagaaagagctctggaagaaactgttcaaagaggggatgggttgtctttggagttggtgagttccctttccccgggagtgctcaattgtagatacatggtttcttggggactgttgtggaagattcaaacatcaggagccaagcaaatgagtgatatggactcaggataattcaatagggaagggtgggtcatgctctataggagcaatgacctctcagctctaaccaagagatgccatgtgttgcaagaaatctttttttttttttccaagagaaatttgaaagtgaatttaaaaaatggaaagtttattgatttttaaaacttgggttttaaactcctgatatgatgtctggatttctctttcagcccagcagtttgcaatctctatcacagataaaagtggaattgtatgtagaaagtagcacagtttctggactatatgacctttcaaacttctctaaccttggctctctgatttcctcagctgtataaatgtaacagaatattaatagtgtcactatatcactagactatgattcagcatatgagaagagcagattggatggaggaagaattaggatttgagggaaggaaggctttctctggaattactctgctctgtacaacctatcatcattttgtgccaataaatattaattgttggtaataatagagtgtaagggtcacataagcaagtcttaagaggagagaaaaggccagaaagctgtatttaaagaagtgacaatggagagagacagagagggagagagcgagagaagaagaagaagaagaaggggaggaggaaggaggagggggaaggaggaggaggaggaagttgagaaggaggaagaggagaaggaggaggagaaggaggaggggaaggaggaggagaagggggaggagaaggaggaaggaaagcaactttgaactgaaactcccttgtgcataaagaaattaagagtttgagaactctactcttagcccagtggcctggagacacaaggtcttctgcaggctgccttatccactaataagattaagtgttttggcttagcaataaaaatcaatgcaatggattttttttttttttttgtcctgtgatgaagctgagagagttgaaaaggaatgggaattgttactgtttcccaatccaacattattttgttgcatctttataactattattggagagggttaaatgcacagcccaagagagatggctttccttcatttagtacagtggggtgactatagttaatagaaattaatcatacatttcaaaataactagaagagaagatctgaaacattcccaacacaaagaaatgacaaatatttgaggtgatgactattgtaattacactgatttgatcattacacattgtatgcatacaccaaagtatcacatgtaccccattaatgtgtacaattattatatatcaataggaaaatttaaaaagaaagtttcccaaggtcacataacatagtcagcagctgagctaggattgaatgttggcagtttgtctttagaggtgcattcagccattgtgaagttcacctcccactacactgggcttttccatcagggtgagctgttaggtgcttgcttctcattgcttagatgatagtgattttaaggtcctgtatcagccaagttctctaaagaaacaatggaaaatatgtttttatctatatacagcatttatatttctacctaccttcctgcctacctacctacctgtctacctatc

SEQ ID NO: 5085 - DNA, 6000 bp, Homo sapiens
tttaaggtttaatctacccgggttctcatcatggaaactgactttttaaactgtattcaatctcagtgacactgtctcaaacagatcacttggtggtggctgactacaatggcaccagaaatccaggaagtaaagtttgtacttcttctctctacctagctattcttgtgacatacaaagagtcacttacatattcttgtttctatcttcgttatagaaataacaatatctacccaaatgttgttcttactaatgtaaatatgttgctccatttgtcaccctcttgagggcctctttgatttccttgttcctcaaactatagatcagagtgtttaacatggggataagtataacatagaacactgagagcaccttgtcctacttcatggagtggctagagctaggatgcatgtacacagaaagggctgtgccatagaagagagccacagctgccaggtgggaggcacaggtattgaaggccttggcacaacatttggttgatgatattttcagtatggaagctacaatgaaaccataagacaaaaggataacaagcaaagagcccaacccaacaaaaatagcttccagaaaaagaatcatttggctgataaaggggttggagcaagacaaggaaataatctgaagtgtgttacagaagaaatgttgaatgatatttggcccacagtagtagagattaaagcaagggactgtatgaactaagctactaaggaatccacccccacagactccagctaccatcttccaacagatactagggaccatgattgctgagtactgcagggggctgccaatggccacatatctgtcacaggccatgatgaccaagaggcagcactcagccagactcatccaggccccaagaaaatactgagtggcacaggcaaggaaggaaattgtcttcttatcttttaagaagtctgaaagcatccttgggctgatggtagaagaatagcagatgtctgtaaatgagaggaaactgagaaaaaagtacatgggtgtgttcagatgagagtctattctgatgaggatgataagacccatgttccaaatcagggtcacaaggtagatcaccaggaagactggaaagaggatgagctgcagctctttttcatctgagagtcctaggagaacaaacatggccacagaggtgtggttcccactcacttccatggatctgcttggtgccatctgctgagaaaaaggaatgagaaggaaatgggtttattcccagaaaagaaaaagaaacactattattttcagtcatgaagctggctaaatataaaaccttgaatcatcaatgttgagttaatttgtgtctttcatatatacaatcatgaaactttactgaaaattttttagataactatcgtgctgtctttggggacaaagacagtaaataagcataattagtatgataccacctaaaatgtcttaatttcttgtgttactgttttacaaatacatgggatttgaagatatgctaaattaagaaaattctgtcatttctctgtacagttgacccttgaacaacatggttttgaactatgcagctccacttatacatgaatttcttttcaataagtacagtggaaaatattttagagatctgtaacaatttgagaacaattcacaaataaactacataacctagaaatatcaaaaatattaagacaaagttaggtatgtcacaaccacacaaaatatatacagatattagtctattttatcatttgttatcacaaaatatacaaagatctattataaaaagttaatttctaaaatatttataatgaatagaaatttattggcttacagttctggaggctgggaattctaagatcaaggggctaacatctagcaagggccttcttgctgtgtcataccatgacagaagggcaaaaagagggcaagagagagagtaaaagagggtcaacttcccccttttataatgaactctctccctttataatggcattaatccattctctccaccttcatagcctaatcacatttcattgggcctcatctcctaacactgttgtaaaaagttaaaatttatcaaaacttacatacacagacacttaaccattcatggtgccattcacaaatgagagaaatataaacaaacataaagattctatattaaatcataactgcatatcattaactgtggtatatactgtactgctgtaataatgttgaaactacctcctgttgctattgcagtgagctcaagagttgaaattatctgcttaaagtgctttgcgaggctagttatcctcatgtgggaaattcatctctccaaaaaaatgtgtacagcagtaaaaagttatctctcatggttctcagatatttttcattgtgcttagtacagtatcataaaccttgaataacaccatggaaccaatacaaagtgctactagtgatgctggaagtgctcccaagaagcagaaaaatagtcacaacatcacaagaaaaagttgaattgtttgatatataacacagattgaggtctgcagctacagttgcctgccattataagataagtgaatccagcacaaggaccactttgaacaaaagaaaaggaaattcatgaagctgtcactgcagctactccagcaggtacaaaacccttatactttctgggaaatagctttttatctcatactgaaaatgcaacttttaagtgggtgcaggattgctatacaaaaggcatacctgtagactctaatattattccagaaaaactgaagtcattatatgacagcttaaaaccaaagaaaggtaaagaatctaaagctggagaatttaatgctagtaaagaatgactggataattttcaaaagaggtttggcttttaaaatgtcaagataacaggaaaagcaacttcttctgaccaagagaagcagatgaattcccagacaccattaagaaaaaaatcattaaacagaaaagatatctgcctgaagagatttttgatgaagacaaaagtgccctattctggggcattggagaatgccacgaaggacatttattaatacagaagagaagcaagtatcaggataggctaacttgactgttttgtgcaaatgcagttgagtttatgatcaggactgcctttatctataaagctgctaactcccaagcctcaaagggaaaggataaacaccagctgccagtctttcagttgtacaacaagaaggtgtggataatgggaatgctttttctggattagttccagaatggatgctttgtgaagtcaggaagtaccttgccagtaagggacttcctttaaaaaaagtattttgatattggacaatgcccctgacaacccagaaccccatgagttcaacaccaaaagcatcaaagtggtctacttgcattcaaaaacaatgtctctaatttagcctctagatcagggggtcacagtgacctttaagtctcattacacatgatactctatgaaaagattgtcaacactatggaaaagggtgctaacagagaggacattataaaagtctggaagaattacatcattgaagatgctgtcactgttacagaaaaaaactgtggaagccatcaggccccaaacaatacattcctgctggagaaaacagtgtccagccattgtgctttacttcacaggatttatgacagagccaaccaagaaaatcatgaaagagattgtgggcatctaataatagtgaggggggtttcaagatatggatctcagagaaattcaaaagttagtgaacacaacatcagaggaattaacagaaaacagcttgatggagatgagtgcttccagacaagtgccagataatgaagaagaagacatagaagaagcattgccagaagacatattggcattagacaataggaaagaaggattccagttactcatgactgcttttgacttcttttatgacatggacccttctatgatacaagcactgaaactaaagcaaatggtataaggtttgacaccatatagaaacatttttagagaaatgaagaggggaaaaagtcagacagaaattatgatttgttttcataaagttacactgagtgagcctgtcaatcctgtctccccctccatttcctccacctcttctacttctgctacccctgagacagcaagtccaatccctcctcttactcttcctcctcagcctacacaagccagtatttctaaacacccctatgcaacatgaagacaatgaggatgaaggtcattatgaggatctatttccacccaatgaatagtaaatactttattttccttacgagtttcttaataacattttcctctagcttatttttgttgtaaaaatacagtataaaatacatgtaatatttaaaatgtgttgactacttatattattggtaaggcttccagttaacagtaggccagttcagggaaagcaaagcattaagtcttcagccaaatggtaaataaccaatagaattttttgcctcaggcactgtatgctctcttcacgattctatagctatcattctttctagatcattagaacatcccccaaccaaaacacatgtttattcaaatgtattcacgttagaaagaaagtcatggggaaccttgacggcagaaaatagctgtcaaatatagcctgggagttgtgtctaagggtagaagtcgaaatctcaaacatttccattgctgtgatattaatggaataaactgtgtatgaactacaagtatttgtgaacattagccatccaaaatctcttccttctccctaaccattttccagtctcctagttccaaaaaggaaaagaaaatctccacagaagcatcacactattcttagagaagcacactctaagtgatttttttcccaaaatgagatcagtcatggcttcctgttgcactgcattgaaaaaaattttcaagaaatgaggtgtttaattggaaaagaacatttatatgtttgtcattaatatgaaaggggaggatggtagcagacagacaacgcatttggcatcccagacttaggggttgctctgtccacagtaagactgaatagagaaagaatcttgtgggaagagaacagaaagttgtattcattacctttttcatcatcgtcgtcaccaacagaagaacaaagatttattgcgtagctacaatacataccgatcttctccttgtaactataaagatatgtacaattttctctaatttatgctcattcaatataagaaccttaaatctggtatactatttactaagcacaatatttgtgttctgaaaattgcctctatatttctaccatatgtctctggaatcccaggtagatgtttgttggatcttcttgctctaccctccacatcaataaaacattcattatttatatttctccactgtgttctgttttctttttacagatttttttaataaattaattttatgataaattatattaattggttgtttgatacattcattgtgtttcatatttcaatcataatatgttgttttcttttctacaagttctattttgttcttttccaaatagtcaatttattgttctttaatcacactttcaatagcactctttaaacatattaaacataattattaaattattacataataacttaaatacctagtttggtgttattgctgactcgtattcaagatgtgagctatttacttgtgtgtttagtgaattttaatcagaagttcatgttactttaaatttatctgcagaaaccattgaggcttgagtataacatgtgttcctccagaaatgatttctattacttctgtcaggtaccttggggatgataccaacccagaatccatataagcaataattttgacttgggggtttctcggggccacaaaagtcataagatttaggctacatagctaagtaagcaggagtttgaggctaaaaatcatcaggggaaaccttttctcttcctccaaaactaaggctgagagaattatgc

SEQ ID NO: 5086 - DNA, 6000 bp, Homo sapiens
attccctgaattgtagaaggaaacccctccctgtctcacctgcagcagttccagtgctgagctgtggcaccttcgatctagctctgagatgagctcctgtagggcctggctctgctgggccagcttggcctctttctcccccaggattctcagctgctccctctcatccttctccagctcctgcagctgcctctgttcttcttcaaccaggaagtttttttgctgcacaaactctgcgtgaatcctagatttctgtgtttccactgttttctttagtgtcaagggaaagggagaggtggtttttatgaaaatctcccaagctttgggaatggaggtattggtacctattcctatccccaagagactccactctgtgctgtctgggaaaacacacacacatgcacacgcacacgcgcgcacacacacacacacacaattttgcttgggaggtaggtggttgaggtttctgggacagtgaggggaatggacttggtgagggcacactgtagctggcctacaacgacagctacacgaatatatggcattggggactttttccaacctctcttccaagcccagtcaccactcaaatgtgcccctgtgtcttcctgtctcagtgagttactgagaaaaaaatcacctgttcccacctccaacaacctcacaaagccaggctcacgccaccacctctaagtcctgggaaagggggcttggggacattctttgcttttcctctcctgttagtaactggaaggtcactcgatgacacatgagggtctgttttgtcaccacaacccaactcacaccctacctcaatcccaaatcttcctcttctgtgatctactggggatgggctccttcttctcccctctcatccctgacatgccccacctctcctaggaaatcatcagtgcagaacaaacattgattcttcattatattttggaccagagatctggtcatggtcaagtaaccacctggtcagatggtttccttaagtttattcctcacagcccttgtcatttcctgaaaggcttagctagcagttgggtttctactaggatatttgtctcacacatccaggtgctgacgccatcacacctctgagactagactcagaggagctcgaaactttagggtatagctagatcctctcagcaccttcttccaggattcttgatcttcaggcctgatggggagctcccctttgaacctgcatcatttttattcccctctatttgtaaacctagagagcagctggcttctggagagtgagacggaccaactctatcactgctcagagaggcacagctacggttaaggctgtgagttgaggactctggaccctgcccagccttccagcctaagatctccttcaggatgtcattcttaccttccagtctgctctctttattgcaatttccacttccaacttctcagccaactcctgctttcttctcagttcccctaatgccacctggagcttctcctgcagagaaagacagcttattcgtcccccatgcaaaccaagtaatagggtggggtaatccttgcagcattttctcatgcatatctcctacgcctggggaatgaggttgggtttaacttataattctcctcctacattagacatggagagaggtaaacccctcctttctctaacccctccaatccagaggtggtcctctcccattccctgctctgaaaacgaagcactcaccaggtgtctcttaggcctcacctggtactcctgtgcagcctcctcaagagggaccatggcgtggtcacggtgtttccgagactgggcacatacccagcaaagggccttcccatctttctcacagaacaggtgaagtctctctccatgcactgcacaccgttccccctgtgtgccctctctggcctcctggctgatttctttaaggttgttcaccatgttggctagctgtcgattgggccggagattcttgagcagaaagcgctgccggcacacaggacagacgctgcccccacctttcccaacctgagagatgcattcctggcagaagctgtggccacactcgatgctcacaggctccacgaaggggtccaggcagatagggcatgtgacctcctcccacatcattgtcaagcgtgctgctgaagccattgtcaagtgtgccgttaaacagcagtgtggagacctttagggggtttggctgggagagaagaagaaagggaaaagagaatatgagaaagtctgtgtaagaaaaacaaaaagtcaacataatccctatcaaaataccaatgacattcttcacaaaaataggaaaaaacaatcctaaaatttatatggaatcacaaaagactcagaatagccaaagctatcctgagcaaaaagaacaaaactggaggaatcacatcatctgacgtcaaattatactgtagagctaaagtaacccaaacagcatggtactggcataaaaacagacacatagaccagtagaataaagaacccagaaacaaatctgtacatccacagtgagcacattttcaacaaagctaccaagaacatacagtgaggaaaggacagtctcttcaataaatgctgctgggaaaactggatatccacatgcagaagaatgaaactacactcctatgtctcaccgtatacagaaatcaaatcaaaatggattaaagacttaaatctaaggcctcaaactatgaaactattataagaaaacattgggaaaactctctaggacattggactgggcaaagatttctttcaaatatcccacaagcacaggcagccaaagcaaacttggacaaatgggatcacatcatgttgaaaaggtgctgcacagcaaaagaaacaatccacaaagtgaagagacagcccacagaattggagtaaatatttgtaaactatccatctgacaagggatgaataaccagaatatataaggagctcaaacaactctataggaaaaaaaataataatctgactcaaaaatggacaaaagatctgaacagacatttctcaaaagaagtcatacaaatgacaaacaggcatatgaacagttgctcaacatcattgattatcagaaaaatgcaaatcaaaactacaatgagatataatctcatctcagttaaaatgtcttttctccaaaagacaggctataacaaatgctggtgagggtgtggagaaaagggtacactcatatgctgttggtgggaaggtaaattagtacaatcactacagagaacagtttggaggttcttcaaaatactgaagatagagctaccatatgatccatcaatcccactgctagcatataccccaaagaaaggaaatcagtatatcaaagagatatccacacttccatgtttactgcagcacgtttcacaatagccaagatttggaagcaatctaagagtccatcaacagatatatggataaagaaaatgtggtatgtatacacaatggagtactgttcagtcataaaatataatgagatcctgtcattcacaacaacatgaatggaactggaggtcattatgttaggtgaaataagccaggcacagaaacacaaacattgtatggtctcactcatttgtagaagctaaaaattaaaacaattgaactcatggagttagataatagaaagatggttaccagaggctgggaagagtaatagggagggtctgtgtgtgggggagaagatgggatggttaatgggtacaaaagtggagtgaattagatctagtatttgatagtacaacagggtgactatagtcaataatttaattgtacattaaaaataagagtataattgcatagtttgtattacagatgatcaatgcttgaggtgatagatgccccacttaccctgatgtgattattacacattgtatacctgtatcacaatattccatatacccataaatatacctactatgtgcccacaaaaattaaaaatatactaaaaaaagaaaaacaaaatgatgcaaaggaaaataaaaaataagaataaaaataatgggtcaggcacggtggctcacacctgtaatcccagcactttgggaggccgaggtgggtggatcaccttaggtcaggagttcaagaccagcctgaccaatatggtaaaaccctgtctctactaaaaatacaaaaattagctgggagtggtggtgggcacctgtaatcccagctacttgggaggctgaggcaggagaattgcttgaacctgggaggcagaggttgcagtgagccaagattgtgccattgcactccagcctgggtgacacggcgagactccctctcaaaaacaaaacaaaacaaaacaaggcataaaattaatggcaaaacaattaatgtcaaaaacagtaattacttttgcaccgatcaaacagtttgttgaataagtttattcctgttctgaataacaagaactcctccattgtttggtccattgatccagtgagacagaaggagaaactgagtccctaaaagagggaatgaaaattggcaagaacctcataaagctgttgacagttctactctcatcatgtccattcctgcttaaaccctcagtgctcatccatctcctgtcgggtaccaacaggcctccatgttgctgagaaattatagctactttttaccatgtaccttccatgtgccagagatacttcatgctttgaatatatcttcattaatccctcctataacggcggaagtcagttgcatatatgtatgtaggtgtatatgtatgtatacacacagagtaacaggaaccgtggccagcactccctgggctcttttctcagctgctccaaacttagtttagttcctgacaacacttattctaggacaaagaataattctgaaggcctatacatttctggttgaacatcctaaacagcctgcccctctcacctctggaggacttttggacctgggagtctccagaattgcagacctccccgacactgggctccctaccctcctggctaggctgtagtcctggctatcccagccacacccagccgtcatcctaggtcaggtgccagcatgggggcagccgggccccttccccttctgggtaactccacagtcacgtccacaacccagcctcctcccaggtagggggcagccgggccccttccccttctgggtaactcggcagtcaggtccacaccccagcctcctcccaagcagggggccagcaccggaagcgcagctggtcttgggttgagggatccctggtgggagaaggggcaaatgggaccggctcaaggatggagactggaaggggctctgcaaccctggggcaggggagagaggtcccctaggagggcaggggtcccttgatctagtggggttcactcacctttacaggggactcaacgctggtagccagctccctatttcactttcagtttccgctcagaagcaagtctgagaggaaaggggagggaggaggaggagccgtgggaggagtgagggaggagcagtgggaggagcagagccttgaaagggtgtgtggagaaatgcggctgagaagagaagtcagagttgagctgggggaggcttcagaggctctgcatgcccaggaggcttctctgagactgggaaggagtggaaactcagtagcccgtggtcctggttgcgcgctccctcccatgtcttcattatctgatttggtaaaatatctacaagacgggggagtccgggctgctttctttgacactggtcatcactccacacctagacgctatgtccatgtctggaagatgcttttaaggaagttttgatgcagagaagagtggccggtgctcttcctcgcgtgccaccatctgcttacttccagaagctaattattttcatgtgactgatgtgactaatattttttaacgcctgcaggtgagtgatttatttcgcatgaccccaaggtgagtgtcccaccagtgagtggtgagaaggaaattgacatttgacaaccaactgtgttcttgtca

SEQ ID NO: 5087 - DNA, 6000 bp, Homo sapiens
tttctactctctccccttcagtcatacagagctcattttcagtttcctaaacatggcatggtttggctcaggtctgagccttctctcattctattctctgaggcagtattatgatgtttactgattcctaaactctgtttcaaatataattcaaaacagttttattttttatttatattaaaattaaaataactttttatcctacattttctgattgcagattgtggataaattaatggaagcttaattatgtgggggttttttatccttttttaatttttctttttagtttccctactttgcagtgccctaatttggtcctcagtccgccaagcagatgaaacaccacagcagctgaccatgcctggaacatttccttaaccttctgtcatctcctcaccctactctactctcctgccctcattactagctcccctgtcaaaacccttttcactcactcggatctcatattatcaattacatttggttagcctcccttgatcacacaggctaacttgtcccagcacctaggtgatctataccagcacttcacaaatatgaatggcacattaatgcgctaggtatcttgcaaaagcgcaggttctaattcagaagatctaattttcttttcatttccaacaagtttccaggcgatgctaacattattggtccttcaatagcaaagatctctgtgaataccacttgtagagtaattataatacagtattttaatttcccatttacttatttgtatcccccattagacttcgaactgtgtaatatttgggttgatatctatcgtgttcactgttataccctcaggatcttgttcaataccagatatatgtagagtatctatacaatatttctcttaataaatcaattaagaactttaatgaaagcatgtgcaacaagatatagtgggagcagagaagaatggaataaataggaatattaggaatagctagaagttcacagggagaggtaaggaggagtgacatttctatatacaccaaaattgaatggtcagtgttagccatatcaacggggtaggaaaactgctaaatccaacatggctggatccaggaaaagaggtgagtgaggctttcatcagaccatggagggctagtaggccatatggagttctaataatttttctgaacagtagtataaacaaaatggtttttgacttagtgtcttaatctatttcctcttgctataacagaataccaaatactaggtaatttgtgaaggaaagaagtatatttagctcacagttctggaggctaggaaattcaaaagcatggtgccagcctctggagagaggttttgtgctgccattacatggtggagggcatcacatggcaaaagggcaagggcatttgtgtcagcccagatctctttttcttcttataaatccaccagtcccatcatgatgaccttatctgatccaacttatctcccaaagtcttcatatctaatcaagatatgactttgggaattaaatttccaacatgggagacatattcaaacagtaacacacagcaacccgttttcgttgctgttgttattgtttgttctcttttaagtttatttctacaatttcaatgcattaaccctggattacctgttttgcctctggcctcttgctcctgtatcaaaccctgtttcttttatatcttaaactgtttgctccttgtgctagtcttagccctgaaacttgtttttctatttcctgatcaagcatgaccatccacttgagctggtatatgcacaaattttaaaggttgcataacatcccaggactcgatataaatgctttatatattctgtatcattgagaatttttatctatattttttaccactgtaaataatggggcaataaattttcctgtacataaaatatggcctgcatctctgatatcttcctttcaataaattcttagaaatggaatattatggacattttaagacaacaatatactggaaaatatgcttccagaaagttcatgcaaacattgtaaaacaatgcttagtccactgtaacacagcaacacaacactatgtattatgtgttttaaaaaacatttgctgatttgatagccaagaatattttactgtttaccgtagtaaatgttgacagtcaataaataagacttacttcaagttcctagtgcagagttttcctatgtccaatttggtacttcctgtttggattaccaagtttcagaaacattaatatgaagtcaaatgacatcacagactatgatatgtttcctggactcaatggagttaatattaatgtattaataagatgtgttgctgtatgatttcatggaggaacattgaactcaaattttcagaaagtttagttaaattaccagctactgttctgctaggctggcatgagaatagggcagtgagaagagccatattttgacgtagtgtgccagtgtgtgtattggtgctttaaccagtacacacactagtttcattttcatgtactaagctctggcacagaatttacatggtaccactatagtaactttatttttcttataagagtaacattctttcaaccataagaataaaaatatgtgactattcccaaatagtttctgagactaatgggaaaagagtcacagccctacaatttgcccaacttggtagagaaagtgttttcaaaggtctcaagaagtttcctgtgcggaaacacaacaataaaatacctttatgtgcaaggaataagcatgcacaagtgacaacctgttaacattcagtttggcacatcagcatgcatgcaggcttttgggtgtagatgactcaaattgaaagtagtggtgaatggatagtcatgtgaagactgtttagaaaatgagttttgaaaactgagagggtgtcagatagccgaggctttgaatactacttgtgccatttataactgagaaacttaggtaagttacttacactctaatttttggtttaaacatggtttaagacataaatcaaactaataatggattcttctactgaatttattattgtagagttgtgtaagtcaaaagttgacatggatctcactgagctaaaatcaaggaatcaccaggctgcatttctttatggaggggctagggaaaaatcaattatcttcttttctccttctggaggctttccacattccttggcttgtagcctccttctgccatcttcaaagccagcaacagtggatcaaatccttctcatgctgccatctctctggttctctacttttaaagacccgtgtgactatattggatccacccagctaatccatctaatcttgccatctcaagttatttaactttaatcacatctgcaaagtccctttgcaatgtaaggtgacatattcacaggttccaggcattaagacataggtatctttaggggccattatcctgtctaccacaaacacttggcctagtatcatggatgtagaatgcataataaaatattattgttcttgttatttattgtttttattacattatgaagaagaaaatatctcaggccatgacattttcagtagtgaaacagatttgatagtggagaggagataatatcggaagcagggagaatggttaggaaactactgaagttacccaagtgagagataattgtgacttaaataaaggtgacatttctggagatgataaacagtgatcaatttctgattgtatttttcaaagagattgacataatttaccaatggattaaatgcagggtgtaagagacagaaactgagaatgaatcaaagacccatatgcccaagtgtggtccaaattggtgggaatatctaaggatctaaagaggccataaggagaaaagatggacaacttatagcaatctatgcattctatttattaaagactaatgagagtgatagtaaactgacagaaggtgacatcattggccaagtcaatcacccacctacctgcaatttttcttggtataatacaagattttcaaaatttgactataagtagagagaaccccaaattattgtgactaattctcttcaacctggtaggttgggacttcaaaatacgaaataggtcaaattataaaaaagtaaatgaaaccgtattttatacacaagtaagttgtgaaccaagatttttacctactgtattcaccaagcatttggttcatgcctctaggataaccttatcattggttaacatgtaattattggttaacctgtctatcttctacactaaaatcctaaacagtaagaattatggtgtattcttaaaaaaaaaaactctatcactgagtataatgtttagaatatgggacattcttatgaaatatttactggatatatgtatggatgagtaaatgaattattttttatctgtaagagaaagactgctgctgcaaagaaccacaggtgggctaatgaaaccatactgctgtgaataatcatagatactgaggagttaaggggtggagttggactctcactcataatgggagatgtcatttagcaatttgctacaatatttcgttttttaaaatctccttcagagtgactgctagtgattatgaggttccttttaagggtaataaaaaatgttctaaaattgaattgtgatgatggttcttgcacagttctgtgactttactaaaaaaaattgaatcatacactataaatgggtgaattttatagtatgtgaatgatataacaataaagctgttaaataaaaaagcttttgagtgaaatgacacatgaaaaaaaggttacatcagcccataaagcacatagccaccgtaagtaattgcataatggaacagatataaaaggactgtatgaggcaaaagaagtcttctgggaatctccacaccctgaagacacagtgagttagcaccaccaccaggaattggcctttcagctctgtgcctgtctccagtcaggctggaataagtctcctcatatttgcaagctcggccctcccctggaatctaaagcctcctcagccttctgagtcagcctgaaaggaacaggccgaactgctgtatgggctctgtaagtaaaactgttttgttcaatgaaaatgcttgactctagatgaattggactttctcacccacagggagtaatttcctcacaatgtgcagaattagattagatgttggtatggtgggctgaggaggacggtagaatttcagaattatttattcccaggaaatacgtagagaatgggtatttcgttctgcctgatataggttagataacttgtttttagtcaaatggtttaatcagtgtgctgatatatttatcacagtcagtgaatctcatttctatgcccaataactattactaaaaatgaaaagttaccaatttcgaacgcattgcctgccagctactggtattagacacagcgcatatcctgtcttatagatgaggaaactgggtcacagaaagtttatattacttgtagatttcagtaaaacaattgtttttgagagcacgagctttggaattaaaaagacctgagttaaaaattcagctctgactttcaccagttgtatgtgatttcaaatatgtttcagacttctgatactcagtgtctttaccagaaaaatgaatttaaagtgaatctaataatacttgtcacatgatgacatagtaagaattaaaataatgcttataaagcactgaggacaataatgttcacagaacacgtgtccagtaaatggtagctatttctatgagtaatatttttattaatggtgtagatggtctcaaaactagttagtgtttgagcaagaatctgaacccaggtcagtcacacatgatagccataccattgacaatagcatggagaatactgatgacactataaggtctagttcagcagattaagacagccacaagctatagcttataatagtgcaatgaaagaggagcatcattgtaatccgagtgggcagaaaaattagttgagagaatatagct

SEQ ID NO: 5088 - DNA, 6000 bp, Homo sapiens
ctcagattttaaaatctctatcattttgcctgtatgcactaactagctaatctaaaccagtccatgatgttaagtaccctttgaatgctaataaactctggacttataatattaaactacaatactacatctccatttgtatgtaaaatagacatctcaaatgtatgtaaaactgtttaacaacctgctaatttagacaaagtgcttattcccaatctttgtcttagtaaatattcaatcctttgagttcctttggggataacaatttcttttaaagtaaaaaaaaagttatctcatgcttgactcctcccttataccccaaatcctatccatcagcgaatcaatactttgaaaatacgtaaagaattcatggttaatgttgaataagacagaaaactgggacataggataccaggaagaagaccctggaccaggaagtagctgaatgtgggtctgaatggagacagagaggactgagagatgttttataacattccaatcccagtctgagcctccacagaagtctccacaggaaggcacttgaggtggaggaagtagaagtggtaaaagatgggagagcaagagttcccagggatcccgagctccttagagaagtctcaagaatcttctctgtgtgaggctgtgacgtcagcactgaggtcacagaagggacctgatagtgcgggttctggcccagaaggcctcaggggtggctgtgtagcaagatgagggaggtttggagccctgcataaagagaaggacgggaccacagctgactggtatgtacaccccagctgggcccttccttctacctttgtccctgtattcatcaactacagacctctttcccagggccctgcatttccctcccctgattccaacatatctcaatcccgcaatcttcctaaagcatcctgccccagaaacctcatggcccctttcatgtagaccctgcagatttccctatcctgatattcaagacccttttcatactcacccttcctacttttgccattgcctgaaaggatgatcttggtctccaatccccatgcccctagctgtgtccccacagatctgggcctcctgctgccaccatggccaaaggtggagaagccctgccacagggcagcccagcaccagtccaggatccccacctcatcaaggtgacagtgaagacgcccaaagacaaggaggatttctcagttacagacacatgcactatccagcagctgaaggaagagatatctcagcgctttaaggcccaccccgatcagcttgttctaatctttgctggcaaaatcctcaaggatcctgactcactggcacagtgtggagtgcgagatggcctcactgtccacctggtcatcaagaggcagcaccgtgccatgggcaatgagtgcccagctgcctctgtccctacccagggcccaagtcctggatcactccctcagccaagctccatttacccagcagatgggccccctgcctttagcttaggtctcctcacaggcctcagtaggctgggcttggcctatcgtggcttccctgaccagccaagctccctgatgcggcagcatgtgtctgtgcctgagtttgtgactcagctcattgatgaccccttcatcccgggtctgctgtccaacacaggcctagtacgccagctggttcttgacaacccccatatgcagcagctgatccagcacaaccctgagattgggcatattcttaacaacccggaaattatgcggcagacactggagtttttacgtaaccctgccatgatgcaggagatgatacgtagccaggaccgggtgctcagtaacttggagagcattcctggtggctacaatgtgctttgcactatgtacacagatattatggacccaatgcttaacgcagtccaggagcagtttggcggcaatccctttgccactgccactactgataatgccaccaccaccaccagccaaccttcaaggatggagaattgtgaccctctccccaacccctggacttccacacatggaggctcaggtagcaggcaaggaaggcaggatggggatcaggatgcacctgacattagaaataggtttccaaactttctgggtattataaggctctatgactatctccagcaattacacgagaacccccagtccctaggaacttatctacaggggactgcatctgccctcagccaaagccaggaaccaccaccatcagtaaacagagttcccccatcgtcaccctcatctcaggagcctgggtcaggccagcctctccccgaggagtcagtagcaatcaagggaaggtcctcctgcccagctttcctgagataccccacagagaacagtactggacaaggtggagaccaagatggtgcagggaaaagctctactggacatagcacaaacttgcctgatcttgtctcggggctgggagattctgccaacagggttccatttgctcccttatctttttcccccacggcagccattcctggaatccctgagcctccctggctgccatccccggcttatccaagatctctgaggccagatggcatgaatccagctccacagttacaggatgagatacaaccacagctgccactgctgatgcaccttcaggcagccatggcaaacccccgtgccctgcaagccctgcggcagattgagcagggtctacaggtcctagctactgaagcacctcgcctcctactctggttcatgccttgcctagcagggacgggtagtgtggcaggaggtatagagtctagagaagatccccttatgtctgaggatcctctcccaaatccacctcctgaggtgttcccagcactggactctgcagagctgggcttcctttcccctccctttctccatatgctgcaagatttagttagtacaaatccccagcagctgcagcctgaggctcactttcaggtgcagctggagcaactgcggtccatgggctttctgaatcgtgaagccaatcttcaggccctcattgctacggggggcgacgtggatgctgctgtggagaagctgagacagtcgtaggagccttattcattcaaaccatacgttttcctctgtgcctttttcccatatcctagttccctagctctcccatttttgaatacagctgcattataaaccaaatttactatgaagtcctttgctgtggaggcaatgttgttccagagtcaacgaggaagactaatggccaaaacatagtggaggtgctgtgtgtgagtcaaccacttgtaccactataccactggggggccccagtctaagctctgcttatgcctatcttgagatgcaattacacccaatttccaatgtgaactcttgcctgagtctcattcatgtgggctatgagaaaaaggatggatatgggagaagaagtagtgataagggctgtctctacatggatggaaggacttggagggaaactaaaaggtctgaagttagaagactcacaggtatgaagaacagaggaggaaatgttgctgcaaccttttgaaggtcgaggcctgcaactttcccagtgttctttcagcgtttcttcagattttgtgtcctgtagtagctgctaccaggtgctctggttttccgagctccctaccactagcctgactgaaaagtggttatagtttcttatttttatctcccctgaagactatcccccaagcagcttgcacttccaggatttgatgctgatctctaagcagatagagatagagcagcaaaggagtcagggtgacttctcagattcctgaatcttaccgactttatacagtcccttgtagccagatccagagagttaattttttgcaacttcaagctcaaaactgaagacatactttgtgtatagcattttgctagctattaggaattcaatatgagcaaaagagttttactcactgccctgcctcaatgaatttatgatcttatagcaagaattgtgcaaattgtgactatataattcacattatatataattacaaactatgagaaatggtgtaaagaaaaagatgaggagctgtgaaatagcatgaacagggtcttgatctagtctggggagaaaggaaaggcttctgtgagtgtgtactgcaaactagaatccaaaaagtggtaagaattaagtaggtaaagctttcaaggcggagggaagagctttcctgcagaagagctattatgtacaaaggcactgaggtaggaggtgcataacacatagaagatgcccttgggatctcagactagatccttgtttgcattcaaggatgccttccattaaccatgtacttctagggtaaaagtgttgcaattcataaatcaagccagtaaataatgctttccagtccatatgcacacaaatgtgtcaggtaaacccactgtagagaaacgcacaaacacacaatacacatccacttaaatatgtcttcacatgggtatattctatgtacatatgtacaagcatacatacaaaacacagtctgttaaatcagagtttcatcgcaaaatggaagtgtaaacctaagaaacattcacagtattttcctatcaaggaagtaaagaggtcttgatgggggatacctaaaagtggctgtggtgtgtgtttagatgtcagagactcagtactgggagagagggaacctctacttggagctcaggatattttgatcagcctgtgtaacttagagctgctagcacacggtttaaaggagataaaagcagcctttgggaaaacatttattctagcgatttaggtttcaatgtttaggtggagcacaaggttcctgatatgatttggctctgtggccccacccaaatctcatcttgtagctcccataattcccacctgttgtgggagggacctggtgtgagatgattgaatcatgggggtgggtctttcccatgctgttctcgtgacagtgaatgggtctcacgagatctgatggttttaaaaaccggagttgctctacacaagctctctttttgcctgctgccattccagtaggatgtgacttgcttctcctggccatggttgtgaggcctccccagctatgtggaactgtaagtccggtaaacctctttcttttataaattgcccagtctcgggtatatcttcattagcagcgtgaaaacggacaaatacagcttcagtttcccctcactccactccccattaggggatagtttttgtccagattaaagaaaaacctattgtttatggtggtgctaggggaaatgaagaggaaagtcttgcctctccattttcttccgttcatgaggtgagttctctgggtctgcctctgactggggaagatatacattgaaccccaaatttccatccttggaagtccagataggtctgaggaaaaaaacaaaaaacctaatagcaatgttactgcatttatctgccttccatttgagccaaagaaaacctgagggtcatatgaagtgaagtcctgttaattggaaggccaggtgggtctgaggaaaaaagcaaaaacaaaacaaaacaaaaaaacacctaatgggaagaaatgttactgtttttatctgcctttcatctgggccaaagaaaacctgaggctcctttgaagttaagccctgctcatcagggaagacaccaggtgaattgggtctaaaagtcttagctagggagaagagtgttcatttagtggataattctcttgccataacctcttagagctcttcacaattgactgggtgcttggaatccttgctctagcttcattaaagagtaaactcatcagcctcatgcctggctccaaggtggtgaatccaggaggaggaggcttctggggcagggagggtcactgtcttctacctagcagctaaggtagggcctggtacgtggaaagtgtgcaatcagtgattgaaggagtgttaaacaatgagtgactaagttagaaaacaaatgaggaagtgactggggacactggatagatacaaatcaaattaa

SEQ ID NO: 5089 - DNA, 6000 bp, Homo sapiens
aactcagcacataatccaatgaaaaaagagatttcagaatgggactaatatgacaacatctggattattatgttcaataaggtggagcatcataggaaataaatcaggattaggaataattacatgataaacatttaaaggactgttgatattggttcacccatcaggaaagaagtcttagggtttttaatgcagatatctttatacatctagaaaaaaattatgtatgaatataatggctaatatatggttattttattctggagatcagacctaaatataaggagtagatattatatgtttcagagaagtatatgtctctctctctctctcactgtctctgtctgtgaatatatatatacacacacacatacacacctatgcatacatatattgatagtaaataccatatatacatatactaaataattaaatgaaacccacatatatatgaatgagatagctcagggtagggtagtgagttttgaatcaatagaaagaataaataaatgtctgatgaataatcatcaagacgaaaaggtttggtggtggctcaaggattttgtaaagggttgaattagagaatataatacagtttgaaaaggggcaatgttcttcaaatgttaacatttacaaagacaaagtgactggtcttcccactctaagaccaatggaacacttgagagtgactcatttcggtcatgcctcatctgatgttagagacacaacttctcttagagactctccttccaaagaaaaaataaaggccatggggaccagtttcaatggcccagatctttcccaggttggggaggaaaagagaattatttggtacactattcccaaatatcctatgtggaaatgagctagaataaccccttgagagttgtttgtgtaacaaatatatctctcatcagaattaagagtaaatactgaggatatagcaaacaaccaatattcaggtcatgctcagaaaccgcaaagagaaaactgtggctcaggtaagaaaagccaaggattcaaatacgggaagcaagtttaaccatttccatttgatggacattggttgagaatatgagcttgggttttgggttagataaacctgtgtttgaattcctttatgacacatattagttgcgtgatcttaggctaattgcttaacttgtctaaggctcaatttcctcaccataacaatataaataaaataatatattgtctttactttcttgttttttactcacttttcttttctctctctctctttaacagatttttctctgttgcccaggctagagtgcagtggtgcgatctcagctcactgcgacctcctccaccagggttcaggggattctcatgcctcagcctccagagtagctgggattatgatcatgtgccaccacacctggcttatttttgtaattatagtagtgatggtgttttgccatgttggcccagctggtctcgaactcctgaactcaagtgatccaccctcctcggcctcccaaagtgctgggattataggcatgagccaccgtgcccagctgttttttactcactttttgtctcacagtcattaggcattcatttctgccattatgttgaaattgtcaatattaccaaagacctagttgccccaaacaatcaacacctctatgtttatattaattgataattctatatttttcactattaacctaccatagtatccactcctataaacttcccttttcattgtttttttgtaaatacagatcaactttgctatcctcttacatctgtgcctgcttctttgtctatctcctttgagatctttctttttactgagagcaaaatttgtcctagtttcccaatgtttctctccaaaccttttttttttttttttttgagacagagccttgctttgtcgcccaggctgtagtgcagtggcacaatcttggctcactgcgacgacctctgctccccagtttttttaaagcaattctcctgcctcagcctcccgagtagctgggattacaggcgctcaccaccacacccagctaatttttgtatttttagtagagacagggtttcaccatgttggccaggctagtctcaaactgctgacctcgtgatccacctcagccttccaaagtgctaggattacaggcatgagcctctgtgcctggccacctcttccattttaatttgtacttaaggtaagatataaaaaagtcacttaaaagctgagatttttcagatattttgtcttcatctcatggcttcccattgtcagttgactttaaatatttattttggtatatttattaatttcttctataggaacacaattttggggcaatatgtggagatgaaaaagtggattcaggggacactgattgtacagggcacttgcagattatctggaactaaacggaagactgttcttttttaacacgatcttaatattctctttttgtcttctcattttagtttatgtctttataaatggtttcctgaacagttcctaagctttttgtcagcatggcaagttgaagaagctctggatgatggatctatgttaccttcagaaactcttgaggactctgggatagttgctgtcaaagaatcagtccaaaggcactcagaaaggggcaagagaacagtgagccagtcatttttgcatccctcagggggcctctatgcttgcctgagagtgataaattccactaaagttatgactctcacttttgtcatgtatcacattctaggagactccctaaactattagggcaactattctccctggaatatttgggtatgtggacagtttctggtactaccaaatttgccacaattaaatgccagcgtagctgttttgctagagactgcagatgttaaatagagggctatctttaggtcaataaaatatacttataaattgtattaactatttccccagtaattaccacacagttttaataaaaccctgtgcatccgcatgtcccaaacgcagctcaggttttgaaaacacgactatagtttaagaataatcaggcctcctccggcttcctccatctggtccattatctgggtgacagtagatccaaataagtggttagctcttatcctgtacaacaaattttggcattaatccattctcttataaggcaacattggaaggttaagagaacttataatgatatacacatcactcctgtggcggtagataagttctgccacattaagcactatgcaggtcataattcagtggatcaagttagttagcagtgtttttagtatccatatgaacatagtctctgctactgcagtgcctagactgacatttttgttatcaacagtgtcccctgaagtagcagccctttcaaaagtcctttcacctttcctctgtccatctctctccaccaataattgcttatattagagatgttactatgtgccaaaattctgaaacatataattattattgtttctataggtttttataaaataaaaaaggtgcaaagattgttatcacttcatttttactgaattacacttcaaaggtgtcggtagtaatatttataatattgaatgatattttaaaagactctggacacatacagaatcaattgaatttgggagaaactgagtttcccttgtagttctctttgttttcccaataaacctgctacaaaatttcttggtatcacaacaacaaaaatcttgactttgtaaaagtgtaattataaatataaataaatattaattataaatagacttcatagttccctatgaggatccttgtgaatttttctcaatacgagtcttacagattcataatgattagagggtctgtaagattgtctccatcagcaacatagttgccgtattttctctctgggagtgcttatcttttccctagaactggttgtgtgaagtttattaactcaattaccaacttccgatattactattgcccttcagatcaacatacttacgaatctatgactctaacaagtattaggcttttgtggaggccctcattgtagaagtatgtccttaaaatatttccgttatgagcttccaacatgagtctcctattttcatgtttgtccctaatgtgccaaaactcagactttttgcagcatagggaacttgctgagtcccaagtccactgagtaattacacctttctaaaatgagtttactaactttacccacttgttcaggtgttcagatttctgtggaaactcacaatagatgagttattttctttcgttttattttattttattttttatagagacagagtctgactccgttgcccaggctggagagcagtgctgcaatcatagctccctgcagcctcacagtcctgggctcaggtgatgtgtgcccctgtgcccagctaatttttatcttttcttttttttttggtggaggcagggtctagctatgttgcccaggctgggttctcttcttattcacagtccacttgagatagcaacattgatcacaatatttctcagtcatttctattgaataagcattttcctcagtggttaatcctaaatacagctgtcccattagtttcaagagaaaaaatttgaactgactcaacttggatagtaacacagtaagggcccatatgataaataataggaggaggaataaaagagtaaagagaataaaagggaacaaaggagtcctatttgggaccaagagtcaaggctatgagcacagacgtaagatgagtgttgaaaaaataaaggttgtatgcttcatagtgaattggaattattattctgaccatgatttttgttatttgttattctagggaaaggccttgtgagtacaggcttacaattaattaagtatgagacaatccagaaaaatatttaagttttgaggtaaaaaatggcctgatgatgtgctacaagaagattgtgagagaaaaaagaaaactgcatctttggaggtcatcacccctaaaaaatatcttctccacctgcaaaacctaccatgtggtataacaacagtgctggccccttcttgctgactggcttcttgggctcagaggcagttcactaccggatctctatgtccttctttgtcatctacttctccgtcctttttggaaatggcactcttcttgtcctcatttggaatgatcacagcctccatgagcccatgtactacttcctggctatgctggcagacacggaccttgggatgacattcactacaatgcccacagtcctgggtgtcctgctgctagaccagagggagattgcccatgctgcctgtttcacccaatccttcattcattcactggccattgtagaatcaggtatcttgcttgttttggcctatgactgtttcattgccatccgcacaccactgaggtacaactgcattcttaccaattcccgagtgatgaacataggactgggggtactgatgagaggttttatgtccattttgcccataattctttcactctactgctacccatattgtggttcccgtgccctcttgcacacattttgcctccatcaagatgtcataaaactcgcctgtgctgatatcacgtttaatcacatatatccaattattcagacttctttgactgtctttttagatgctctaatcatcatcttttcttatatactaatcctcaagacagtgatgggcattgcgtctggacaagaggaagctaaatctctcaacacttgtgtctcccatattagctgtgtcctagtatttcacatcactgtgatgggactgtcattcattcacaggtttgggaaacatgcacctcatgtggtccccattaccatgagctatgtccattttctctttcctccattcgtgaatcctatcatttatagcatcaagaccaagcagattcaaagaagcattattcgcctattttctgggcagagtagggcttgagcccttatttcagaatctcaagatctctaggatttctgggcctctcccattactgaaaaggaaccct

SEQ ID NO: 5090 - DNA, 6000 bp, Homo sapiens
acaagcactcaacaccaacccatgagagtagctgtgggggctgaccctgcaaggccacaggggtgaagccgcccaaggccttgggaacctagccctcacactagtgtgtcctggatatgggacatggagtcaaaggagattattctggaactttaaggttaaaagacttctctgctaggtttcagactttcatggggcctgtagctgctttcttttggctaattttttttttccttttgtaatgaaagtatttactttcattacagatgtgaattacaatgtgactgtgaatcccatgtaattaatttgctggacctcaatatgacacagaatactgtggattgagtagggtgccaaatcttgtcacaaacttaaaatgcttatcatgtatgttattttcataatatatatagatatcattatatggaaaacaaacatatacaacaaaaccccaaattaaaaaaaaaaatccaatgcaaacatggaactcaaacccagaaaccctaactctcaattcagtgctccttgtatgacatcatggagttaatgagtgtcacctatatggcatcaggagataaagaaggaactgtctagtattgttgagcccctgtcatgttccaggatctgtacatatattaatgacatttactcctctcaacaatcctgtcaggcatatgaatcctattatgtagattaggaatgtaagggccaaagaggttaaataaattgcccaaaattatatatctgagttagaatatcagcccgtgtctttcttttgaacaggagtatgacatgatagaaaggggagactgacaaggaacaggaaggcaagagagggaagtatgagttcgtaggggtatcttgacattctctctttcatgaaacttcctgacaaaaccctatggcctgagctttccaaacattccccttccctgtcctctgccccagcctttttttctctcttgtatctcttttggtctcttgagcttctgcctcagagacatctcaaagcatcagaaggaggagggaaaaatggggactgagggattgaggtacaggataaaggaatctttcctagcttggcagtgttctctatctatgggaggaagagaaagtggaatctctgtatcatctttcttagtcccgatgactcaactttttttgcatacattttaaatcctctcctaaccaacccagccatctcaggaggaccttgatgagtcagtgacatctgaataaagtgagtggattctgttatctgctgattcctcttcaagtggtcaattatcccaagttttctttacttatgtctaatatagccatcttcttattcctctctatacctaataaaatcccaaacctctcaatattttccacatatattaattctgttgatacttagactaatatcactttctttatcttttcctctcatagctggtcctttatttattcataatatacctgttctccctacagtatttttgatcatccatttccagtctatcctttcaacattctagttatctccaccttatctctcattggtttattgtctatatagcaagttcattttacccaaatattatatctcttattcatgtaaatccaatcttcttgcacttcatctaacttcctcatgttttatctggtccctgcagatctacaatcaatgcatgttttacttgcatataattccaactctgtcatattctcagttagccacttaaattctctattcctgaccatttccaccaaaatcctttttatatacttttttctttatattccattcctgttatctgcaattcatctgttctgcccacatcatacctttctcctttttgccatgcattcatgcaaccacattataaacctttaataatcagtaagtgaaaccttataacaggaactactgtcagaaggagagatagatgctgcaacaaataatctagtgtatagaaatatgggtaattttggaggggtaataactaagggactaaaacattacgataaaaattcctaggaagagagtgggtgtttttgacagaaacatgtttaaagttacagagttatataacgtcatgacgtgtttttaaaaagttaaatagtgggcaatgattagattgctgtataacagctaaaaggaaatacattttgattctttactggaggattttgtatgtgttctcaaaaactggatgctcttgttgtcagcagtttctatacagaaatatgactctgaaaacaagtgggagttatattgatgagggtacaggctggaggaaaaaagaccaggtaagatcctatcaaaatagttaaatcaaggaatatcaatgacctgctgtgaggaactaggaggaaggcagtagaaataggacagaagaaaagggactgatatgagagataattaaagaggcattttagctagaacttggattagttaagtgtgggatgtgtgttgggggaaagggtggatgggtacagaatatctaggaaacttccagatggcttgcataggcgactgtatgaaagctaatgccatttattgtaatagaggaataacttgcttgggaaaggttattctagacatagtagatttgtggaactcctgtgacatccatggaattatatccactccatactccaccattaaggacgtgtggaaccacttcagctacagaggtcctcctttacatccacctgatcaatagctgcagggatgtagcaagcaaaatgatatatagactttcatggactctaatgagacaagtaaccacaggaatctcactgaacctgtgaagggaaaagtttaaaaaaaaaaagtacctaatgtctctatggatagaagccttatgaaccaagacttgaaggctaaataggatgtagccatgctcatggagattgcagcatgaggaaagctatgaggtgatacacatggtgtgcgctgagagctgcaaggtataaaatacagtgtagactgtggtaagaaataaggtttaggtggaagcagtggcaaaatcatgaagtgcctataggccttgtacctgtaggctaaatgatttgagcatttattgtgtacacaaagggactatggacaagttttaaggagagtaaaatggtcagttttgagctaagatctcacctttaagggtaagactataagcagaaaaatcagttgggagtccatgtgtgaaaggctattattttcaagtatgcagagcatcagacatgaaggttgaagtgaccaaaggatatgaatgaaggtccgaggccaaaaggatcaaaagcaaaaagaagggtttatgaggtaggtattgaggagaaaggatcaaggctaaggtcataaacagcaattgtaggtttgatgttcccacttatctatgtatgtacatgtatggcattgggacaggcatgtagcttaaactttcagggatgagaaggtgaagatatgcccctataactagattataagatcctgaagactcagcatgtgtctgtgaacctttatataccacaactcttagcccatggtctagagcattgccgatcaaccatcaattttgaaataaataaaattgtgggtgtgaatggtaagaataggagtgatgggaaatgaaagccagggtcataggtattttgtaattgcattacagtattaagagaaattcaagggctcaagtactgagtaatgctcaagtaatgatagcagagcatacagagaagagaaagtcaggcataaaattattagcaggttgttttaatttgtgagcacattctgcccccactaacctcatagggacagatttaagactaaaaggtaagaaatctgagaagaaatcgcacccagatgctcagctgactctaccccattctcctttctaaactccacactctctcccaatgctatatctgtacaggggaacagggtaaaaataacccttccttcatatcaactcccatgtaaaaatcccaacttcttgtctacatgagacacaaaaatggcttgaagtttttaaagggaaagggaaatttttatctttgataccaaggtaaacaaacagtatcctagtaaatgtatgtttttatatgggccttaatgttaaaggaagatactctatcctcatttcaagatacttagtacaacttccagcatcttgtaattcttagtctttctgccatccagcatccatttcctaatctgatttcctagtgaatctcatgtcttccttgtaagtactgggttctgcagacttccactctacaggtactgtgaccttctggtattctgcttttgtctttctttcctcctggcaggaaggaactgtttctgtaactgatctcaaagattctctctcccagctgtacatccaagatgtattgtacagtccctcctttacatcacctaaatattttggaagctccaaggtcctgacttcccagttccacctcttgctatttctgcaacccagaattagtcacttaaatctatatttcagtttttttaggcatacagttgtagctattagtagtactagcccacaagattgttgttaagatcaagcgaattaatactgcaaatgttttacagcagtgcatgcaataataacagtgcctgtgctaataataactcaattgtgttatatatgattgttattcctccattgtgtaacttatttcctcaaaacagagtcatgatccaactcaaagacaaactctcattttagggcagccgagactctttcaattttttggttttgatctatgttctttggggacaaaatagtgtcatttttccccagtgcatctcaatgcatgcttctccaaaggtcagaacagactccttcctatcttgtttccaaaaaaaaaaaaacatttatttttgtatgtttgccttagctcatttccagattaaagaagagagcagtggcctcagctcagtgattaattacatgaactccttacgtggtattcgaccaatataagcccattaagagaaaggctgggttcttgttgtggcctactgaagactctctactctcatctcctgaagagcagtaagagagaccaatgacatggagtggcggaaccatagtgggagagtgagtgagtttgtgttgctgggcttccctgctcctgcgccactacaggtactattgtttgcccttttgctgctggcctatgtgttggtgctgactgagaacacactcatcattatggcaattaggaaccattctaccctccacaaacccatgtacttttttctagctaatatgtcctttctggagatctggtatgtcactgtcactattcccaagatgcttgctggctttgttggatccaaacaggatcatggacagctaatctcctttgagggatgcatgacacagctctactttttccttggcttgggctgcactgagtgtgtccttctcgctgttatggcctatgatcgctatatggccatctgctatcctctccactacccagtcattgtcagtggccggctgtgtgtgcagatggctgctggctcttgggctggaggttttggcatctccatggtcaaagtttttcttatttctggcctctcttactgtggccccaacatcatcaaccactttttctgtgatgtctctccattgctcaacctctcatgcactgatatgtccacagcagagcttacagatttcatcctggccatttttattcttctagggccactctctgtcactggggcctcctatgtggccattactggtgctgtgatgcacattccttcggctgctggacgctataaggccttttccacctgtgcctctcatctcactgttgtgataatcttctatgcagccagtatcttcatctatgctcggccaaaggcactctcagcttttgacaccaacaagttggtctctgtactgtatgctgtcattgtaccattgctcaatcccatcatttactgcctgcgcaatcaagaggtcaagagagccctatgctgta

SEQ ID NO: 5091 - DNA, 6000 bp, Homo sapiens
gcaggcaagagcaaatgtgcagaggagctgccctttataaaatgatcagatctagtgagacttattcactatcacaagaactgcatggaaaaaacctgcctccgtgattcaatgacctcccacaagatccctcccatgacatatggagattatgggagctacaattcaggatgagatttgggtgggggcacagccaaaccatatcaaggtatatacccagaaatgggatttctgggtcaaatggtagttctgttttacctctttgaggaattaccacactgctttccacaatggctgaactaatttacactcccaccaacagtgtataagcattcccttttctctgcaacctcaccagcatctggtttttttgaattcttaatgattgccatcctgactggtgtgagatggtatctcattgtgggtttgatttgtgtttctctaatgatcaatgatattgagctttttttccatatgcttgtatgtcttcctttgaaaagtgtctgttcatgtcctttgcacacatttttatgggctttttgttttcatcttgtaagtttgtgtaagtttattatagattctggatattagacctttgttggatgcatagtttgcaaatattttctcccgttctgtaggttgtctgtttactctgatgatagtttctctttttgtgcagaagctctttagtttaattggatcccatttgtcaatttttgctcttgttgtatttgcttttgccatttccgtcatgaaatctctgtcagctcctatgtccagaatggtattgcctaggttatattccagggtttttatagttttgcatttaagtctttaattcatcttaagttttttttaatgtagtgtaagaaaggggtccagtttcaatcttctgcatatcattagccagttatcccagcaccatttattgaatagacagtcctttccccattgcttgtttttgtcagctttgtcaaagatcagatggttgtatgtgtggccttatttgtgggttgtctattctgttctgttggtcaatgtgtcacttttgtaccagttccaggctgttttggctactgtagtcctgtagtatagtctgaattcgagtattacaacgtgatgactccagctttgttctttttgcttaggattgccttggctatttgggctcttttttgattacatatgaattaatttttttctagttctggggagactatcattggtagtttaataggaatagcactgaatctgtaaattgctttgtgcagcatggccaatttaataatactgattttttcctatccatgagcgtggaatgtttttgcatttgtttgtgtcatctctgatttctttgaatagtgctttgtaattctcattgtagaaatctttcacctccctggttagctatattcctaggtattttatgctttttgtgaatgggaatgcctttctgatttggctctcagcttggctgttgttagcatataggaatgctagtgatttttgtatgttgattttgtatcctgagaccatgctgaagttatcaaattagggagcttttgggctgagacgttggggttttctagatacagaatcatgtcatctgcaaacaggaatggtttgacttcctttcttcctatttgaatgtcctgtatttatttctcttgcctcattgctcttgccaggacttccgatactgtgttgaataggagtggtgagagagggcatccttatttgtgacagttttcaagggcaatgcttccagcttttgcctgttcagtatgatgttggctgtgggtttcatagttggctgttttcattttgaggttgctatttgtccgctcagatattccatttcttcctgattcagtcttgggagagtgtatgtgtccaggaatttatccatttttttcccagattttctagtttgtggacatagaggtgttcatagaagtctctgatgattatttgtatttctatgtggtcagtagtaatatttcctttgttgttcctaattgtgtttatttgaacgttctctaacactacaaaatacttagaaaatgaacatttgttgaatgaatgaaactgtttactgttttatatttgcagtttagtattctttaacctgaagtatcaaagtaaacttagaaccaatatttggctgtgagataatgcattatattatactcccattaactatcaaatgaaagtgcaccacccctcagacaaaatgaaaaaaattgatcatctgagaattgacaacctcttaaagactatgtgtgtttttgtgagttgaactgctcaatattcacttgaggatgtgataatgattcctgctgcttttaattcacatttgagtctctagactcttcagagatttatccccaaaggcaaaaaataatacagtgtggctactatataataacaaggaatctaaatttataagtgtaagatgattacattttttgtttgtttgttttgagttggagtctcaccctgtcgcccaggctggagtgcagtgatgcgatctcagctcactgcaacctccagttcccgggttcaagcgattctcttgcctcagcctcccaagtagctgggactactggcgtgcaccactgagcctagctaatttttgtatttttagagatggggtttcaccatgttggccaggctggtctcaaactcctgacctcgtgatctgcccgactcggcctccaaaagtgctgagattacaggcttgagccaccgcgcccggccagatgattaaatttttatttcatgaggtaagactttcgatttgtgggtgaatctggtgtaatgagtttcatttgagaacactttattctctaaagttgtatgtgtacacacaagtcataattaagaaacaaaacagatgtaatcttgcagtcagctagcaagtaactttagtgaattaaattaagtttctgccatcaatttagtgtgagttaacaggcatgattcaatttaccaagattcttcatttatccacccataagaacagaaactcacgtggtctttcactgccgtctaaacttggcactcagctgtaatgctaatataaattaattaagtgtgagtctcactttgtcacccaggctgggagtgcagtgctgtgatcttggctcactgcgacctctgcctcccaggttcaagtgattctcctgcctcaggctcccgagtagccgggattataggcatgcaccactatgccagctaattttcgtatttttagtacagatggggtttcacggtgttggccaggctggcctcgaactcttgacctcaagtgatccacccatctcagcctcccaaagtgctaggattacagatgtgagccaccatgcctggcccaagacactttttttttggagacagggtctcactctatcactgaggctagagtgtagtggtgtaatcatggctcactgcagccttgacctcccaggctcaggtgatcctcccacctcagcctcctaagtaactgagactacaggtgcacaccaccgtgcctggctcatttttagagatgaagttttgccatgttgcacaggttggtctcaaatttctggactccagtgatctgtccacctcggcctcccaaagtattgggattacaaatgtgagccaccatggctggcccagctagacatttcggagaaagataaggctataaggccagaaaacttggagatgagggtcaagctggccatcaacagagtggcccttggtaaactttttatatttctaggctgaaactttgttcttctgtatattatgtccaaaataatattatttgattctataatacttcaatttgttaacattgttacactaggaaaagatttggtttgactaaatatcttaattatgttctgaatattaatcatacaacattttgcataatggttaaattggtatttcaacttacttgatataataatattttaattggaaataataaaagtcattaatcaatttatactaggtgacttcattcataagcataacttgaaattcccatttcttccctgtcctatgaagaaaattgtatgtctcttttaaaaaactagtgttgtttaactgataaacattgtaaactatgtaactagctaggcgtctcttttatacatcagttgtacatttcagagaactgaaatgttaatctgttatctactgattttcaagtgtaccagatttcatggtaaaaattctccaactatgctataaatgtaatggttttacaattttatacaaattatacaattttatacaaattacattaataacatagttattatggaaattgactggattcaaactatgtgggattctgatccagattctaccacttgctgtgtaaccttaggtaaattacttaacatttgcaaacttagtttccctatctataaaatggtaataataaaagtgcttcatattattttatggaaattaaaatacgtatctctgtatatataatgtatataatacaataatatgttatatattatatgcatatagataaaattcttaaccctgagccagtaatttgataggcattcagtaaatgttagctaatatttgtgttcattaatcttacattaatatattttaatcatttttgttatatgtaccataccttttattattcttataagtcttatgttttaaaatctttctctttaaagcaactttaaatatatttcattaaaaatacaaattgaaaaggatatacattatttgaagcaattttttggtgttctaaaacagattttaaaatatagaaagactgattacacataaatacataaacaatgaaaccctaaggtaaaaaaaaaaaagtctgaactttccttgaatgatacatctgttcatattaaccttcatgtatatattaatgaagatgaagccatcaaatttataacattttaatgtgctgttctcattagggttcatttagtcagcagctacttcgtctcatgaattccctgaaggacgggaatcacaccgctctgacggggttcatcctattgggcttaacagatgatccaatccttcgagtcatcctcttcatgatcatcctatctggtaatctcagcataattattcttatcagaatttcttctcagctccatcatcctatgtatttctttctgagccacttggcttttgctgacatggcctattcatcttctgtcacacccaacatgcttgtaaacttcctggtggagagaaatacagtctcctaccttggatgtgccatccagcttggttcagcggctttctttgcaacagtcgaatgcgtccttctggctgccatggcctatgaccgctttgtggcaatttgcagtccactgctttattcaaccaaaatgtccacacaagtcagtgtccagctactcttagtagtttacatagctggttttctcattgctgtctcctatactacttccttctattttttactcttctgtggaccaaatcaagtcaatcattttttctgtgatttcgctcccttacttgaactctcctgttctgatatcagtgtctccacagttgttctctcattttcttctggatccatcattgtggtcactgtgtgtgtcatagccgtctgctacatctatatcctcatcaccatcctgaagatgcgctccactgaggggcaccacaaggccttctccacctgcacttcccacctcactgtggttaccctgttctatgggaccattaccttcatttatgtgatgcccaattttagctactcaactgaccagaacaaggtggtgtctgtgttgtacacagtggtgattcccatgttgaaccccctgatctacagcctcaggaacaaggagattaagggggctctgaagagagagcttgttagaaaaatactttctcatgatgcttgttattttagtagaacttcaaataatgatattacatagaaccctatctcttctcttgagaatactcaat

SEQ ID NO: 5092 - DNA, 6000 bp, Homo sapiens
ggtgtcccggtacatgtaaaatttatgcttacactatactgtactctattgagtctcaatggcattatgtctaaagcaatgtgcatgcattacttaaaaaaatactttttcactaagaaatggtaaccagcatcagaaactttatcaagccaaacgttttgctgctggagggtcttgcttgatattgatggctgctgaagtggctgctgaaggtaagacaggctgtgccaatatcttaaaacaagacaacagtgaagtctgccacatcaactgactcatccttttatgaaagattttaatgtagcatgcaatgctatttgcatagcattttatacacaatagaacttcttttaaaatgggagtccattctctcaaactgcgccactgtttttatcaagcaagttgaacaagatggaatgtgatgggagaggcttatctctattggatatgggacagaggccaagaatcatctcaggtagggtttgtgtctccaatacctctggccactgatttgtccatagtcctcatacaggaaataacaagtctgtccagcatcttcataagcctggattgctcaccagctttgactccagctcctgtatgcatctcctgaattaagcaacacagaagggttctctgaagtcactgaatcccagaaaggccctccacctttagcacaagggacgtcttcaccactggacaaaggagaaaaagataagggtaagtaccaagatttgtcttcttccatagtcagtcatggtttttgctataagatcgtttctgtttccacctaggtgctacaggcaggggatcatgagcttgtttcaggaaaagacaggggacatgaagtttccttctggaaactgagtgctgccaacccagactgtgtgagtttcaactggagtccccccatttgatttatctgtccatatcacctcccttattccaatcactgaacctgtcctcttagagaaaatgctgcctctcacattcatttaaggagctagaggacatgcaagcattgcttcacagagttgaactgctgtagaagcaggttttgttgttttacttacttttctaaattattattccttgcctgtctggaaaggttcaaggaagaaataggtggtccaaactgaaatgactgaggagtgtttcgtgagggaagtatttacaaagatgtgcaaggttaagggaaagagacaatgcatgggtcagcaccctaagcaacaatacataggggaggactaagtcctcccctaggctgaaagggagaaggaaggagcagttaccattgtcgccatagccatagctgtagccataggggtggtagagctccagcaggcaggtggagaagccttgcacggccaacacacagccacacaggctgatatgctttggatctgtgtccccaaccaaatctcaggttgattgtaattcccagtgttggagggagggcctggtgggaggtgattaaatagtggggatggtttctcataaatggcttaacactatcccccttcggtattgccttagtgatagtgagttctcatgcaatctagttgtttaaaagtgtgtagcacctcttccctgtctctcttgctcctgctctcaccatgtgagatgacttgctccccctttgcctttcaccatgattggaagcttcctgaggccttcttagaagcagaagctgctatgcttcttgcatagcccgcagagccataagccaattaaacctgttttcttcataaatttcccagtctcaggtatttctttgtagcaattcaagaatgaactaatacacaggcagagagccaggaggtggaaatcccaagtggctctcctgctgtcttccagtctcatccaggtgtctcccagtgtctcaattccaccagaaactggaattaaaaagaatcccactgatgtggtgcatagaagccactctcttggggtgtcaaacaggatagagaagaatggaaagcaaatcatcatagcaaatgagactatccctctctccttcttatatcctcctaattcctgggacagtctctgtctacaggtgattgattcctgtctcatttcagctctttcagactactttaatgttcggcatgtctttctctactgtcacttctatgcagaaatgtttgcattcatccaaaatgcatagaaaataaaatgtaattttaaaaagagaacatatttcttttgtttagaatacaagtttgacccctctcataaagacacaaagtagaaatatcttaaataagaaagtacagtggtgcctctgggtcactaggtcctgaatctgcagattcaacaacccacaggtggaaactgttccaaaaataagggtatggcggaggtgtgcatgtactgaacaggtacaaacttgtttttccttgtcattacttctgaaataacacagtaaaacaagaacttacatggcatttgcattttgtcagttattctaagtaacttagaagtgatttaatgtatctgggagaaagtgcataggttttgtacaactatcacatcattttatataaggaaattgagcatctgcagattttggtgtgtgctggggtagcagcacacacatctgccatatgcgaaagcccctgtgaatatccagaaatgacactctttgagatcagtgcgggaagctccaaggcatcgtacatcagaattccaaaaactgctactctcgagtccctagagagttgccctcatacctgtgatcctatatggttcccagccacaccagcatttcagcatgatggaaaaaaaataaggaaaggagatgcgttgctcctgctattggtcctgtgagccaggacttgcttacatcacttttgtgcatctttcactgaacagcacctggtcataaaatggcacccagcatcaaggaaaactggaatgtaggtccttgtgccgcttttaaactctcagaatttttatgtgaccaaacaggaaaatgaacactggggcaacctagcagtctcttctgcctctgtctctgattctgtactcacatcaagatttttcaggaactcctctgaaataatgaatcatgcggcagagaaccatacagaagtctcatgcagggctccagggaccaggggctggcattgggcctgctcttcgtgttgtgaactcatgaaaacactttaattctctaggcctcggcttcatcttatgttatattaagataataccatagatgatctttaaagaacacatgctaaatgttggtgataccacagtggaaaagacaggcatgactagccgttatgaagcttcaggtttcatgaggaagacaaacacaccattaccctaaatatagagggacaatgtgtttagtgccctgcctgtggataacagaggttctccttttcctcccatttcctttttgggccaagcaaggctgtggcagcttgtctctctaagagagctcatgatggatgcactcactcctgatgctcctctgtaatcccagaggagggtgagtcttctttccacctggaggcctcctgtccctgtgcattctcgggattccagagcaaaggtggcctctgataggcaaaaaggaactcctgaatttgttactaaatggctttcactcttctctattttgttccctatttgacctgcttctctttctctatctgaagttggtttaggttagtttttttttttttcaacccacaattttgccgccaacttggatttaatcttgagaatccctcctctcctttacccgctctaacatgtataatcgacacagagtcgtgctgggtgtaaagggctgctcaaagactggatcatgagtcagccctgctgggctcaaattcatactatataagtcccagaatgaataattcactctttttgtgttccaatgcattatctgacatatgggaataatactcattcttaactcctaggctcttcagataattaaaacagacaatacctaataaactctccatcagctgctcttattctcccagattagacccagtcctcattctccagttgaaatctacatgaatatctctctttatactccaagccctacatatctcctatttcgcctcatggactcctcacatacaaatgtttgcatcaacaaagaaacgaaccaaagatctcctgaaagaaagaatgaaataggtttatattgtgtatactcagcagaatactcagtagtgccccacagatattcccacactttaattacctgctgcagtggcactcaggctcaccctcacttactctttcctctgttctattgctgagcaattcagctcagacccacaccctacccaaaacactgtgtacaaaatgcttctaggggttcggcaaagccacactgagtccttattttaaaggcacatcagtggtcaatttcaggttttgggcactcatcaatcattcttctcaacacagatagagctgtccacaaatagaattctgatgaatgaaattttctgtacctaattaaacatgggtgttctaataacttacattgtgctttcatttttgttttccatttcacccaaatctaccattaccattaggcttctcatgcatgcattcattcattgaatgaatgtatatgaaaagcacagtgtgctgcttatggaataggcactaggagtataaaatgtaaaatgtggtcctgtctgcaatgactgacatgctgagttatttctcacccaccaggcccagccattttcacacttatcctagcgaaggtcacattttcctctggttcataatgcatggtctcctttcctgtccatggatgatcagtcctggtcatgagggtgtcacaaccacctctttgcatacctgaattcctccccctgagagaaaatttcaggcccaggatagagtaatcatcgggtccacagccctggctagatgagtgggggtgttttgatcctaatgttattcccatgttagcacagaacttgtgtggcagtagagagaggtcaggcttcagagtcagcaagaactggatttcaaactggatttgaggacccccaccttttgataggtgacttattctctgtgagtctctgatctgccctctttaaatgaggaagtaaatcccacatggcagggtggtggggagaatcagagatcatacagctggtgatcacaactggtttctgtttccagggtcaccagactagggtttctgagcatggatccaaccatctcaaccttggacacagaactgacaccaatcaacggaactgaggagactctttgctacaagcagaccttgagcctcacggtgctgacgtgcatcgtttcccttgtcgggctgacaggaaacgcagttgtgctctggctcctgggctgccgcatgcgcaggaacgccttctccatctacatcctcaacttggccgcagcagacttcctcttcctcagcggccgccttatatattccctgttaagcttcatcagtatcccccataccatctctaaaatcctctatcctgtgatgatgttttcctactttgcaggcctgagctttctgagtgccgtgagcaccgagcgctgcctgtccgtcctgtggcccatctggtaccgctgccaccgccccacacacctgtcagcggtggtgtgtgtcctgctctgggccctgtccctgctgcggagcatcctggagtggatgttatgtggcttcctgttcagtggtgctgattctgcttggtgtcaaacatcagatttcatcacagtcgcgtggctgatttttttatgtgtggttctctgtgggtccagcctggtcctgctgatcaggattctctgtggatcccggaagataccgctgaccaggctgtacgtgaccatcctgctcacagtactggtcttcctcctctgtggcctgccctttggcattcagtttttcctatttttatggatccacgtggacagggaagtcttattttgtcatgttcatctagtttctattttcctgtccgc

SEQ ID NO: 5093 - DNA, 6000 bp, Homo sapiens
aagactaataaagaagaaaaaagagaagaatcaaatagacacaataaaaaatgataaaagggatatcaccactgagcccacagaaatacaaactaccatcagataattctataaatgcctctatgcaaataaaccagaaaatctagaagaaatgcataaattcctggacacatacactctcccaagactaaaccaggaagaagtcgaatccctgaataaaccaataacaacttctgaaactgaggcagtaattaatagcctaccaatcaaaaaaagcccaggaccagacggattcacagccaaattctaccagaggtacaaagaggagctaataccattcctcctgaaactattccaaatgatagaaaaggagggactcctccctaactcattttatgaggccagcctcatcctgataccaaaacctggcagagacaaaacaaaaaaagaaaatttcaggccaatatccctgatgaacattgatgcaaaaatcctcaataaagtactgtcaaaccgaatccagcagcacatccaaaagtttatccaccatgatcaagtcggcttcatccctgggatgcaagtctggctcaaaatacgcaaatcaataaatgtaatccatcacataagcagaaccaatgacaaaaaccacatgattatctcaatagatgcagaaaaggctgtcgataaaattcaacaccccttcatgctaaaaactctcaataaactgggtactgatggaacatatctcaaaataataagagctattttttataaacccacagcaaatatcacactgaattggcaaaagctggaagaattccctttgaaaattgccacaagacaaggatgccctctctcaccactcctattcaacatagtattggaagttctgcacagagaaatcagacaagaaaaagaaataaagggtattcaattaggaaaagaggacgtcaaattgtccctgtttgcagatgacatgattgtatatttagaaaactccattgtctcagtcccaaatctccttaagctgataagcaacttcagcaaagtctcaggatacaaaatcaatgtgcaaaaatcacaagcattcccatacaccaataatagacaaacagagagccaaatcatgagtgaactctcatttacaattgctacaaagagaataaaatacctaggaatacaatttacaaaggatgtgaaggacctcttcaaggagaactacaaaccactgctcaaggaaataagagaggatacaaacaaatggaaaaaaattccatgctcatggataggaagaatcaatgtcgtgaaaatggccatactgcccaaagtaatttatagttttaatgctatccacgtcaggctaccattgactttcttcacagaagtagaaaaaactactttaaatttcatatggaaacaaaagagatcctgtatagccaggacaatcctaagcaaaaagaataaagctggaggcaacacactacctgacttcaaactatactacaaggctacagtaaccaaaacaacatggtgctggtactaaaacatatatatcgaccagtggaacagaacagaggcctcagaaatgatgccacacatgtacaaccatctgatctttgacaaacctgacaaaaacaagcaatggggaaaggattccttatttaataaatggtgttgggaaaactggttagccatatgcagaaaactgaaactggaccccttccttacaccttatacaaaaattaactcaaaatggattaaagacttaaacataagacctaaaaccataaaaccctagaagaaaacctagacagtaccattcaggacataggcatgggcaaagacctcatgaataaaacaccaaaagcaatggcaacaaaagccaaaattgacaaatgggatctaattaaactaaagagcttctgcacagcaaaagaaactatcatcagagtgaacaggcaacctacagaatgagagaaaatttttgcaatctatccatctgacaaagggctaatatccagaatttacaagaaacttaaacaaatttgtaagaaaaaataaacaactccatcaaaaagtgggtgaagaatatgaacagagacttctcaaaagaagatatttatatggccaaccaacatgaaaaaatgctcatcatcactggtcattagaggaatgcaaattaaaaccacaatgagataccatcttacaccagttagaatggaaatcattaaaaagtcaggaaacaacagatgctggagaggatgtggagaaataggaacgcttttacacggttggtgggagtgcaaattagttcaaccattgtggaagacagtgtggcgattcctcaaggatctagaaccagaaataccatttgtctcagcaatcccactactgggtatatacccaagagattataaatcattctactataaagacacatgcacacatacgtttattgcagcactattaacaatagcaaagacctggaaccaacccaaatgcccatcaatgatagactggataaagaaaatgtggtacatatacaccatggaattctatgcagccgtaagaaaaggatgagtttatgttctttgcagggacgtggatgaagctggaaaccatcattctcagcaaactaacacaggaacagaaaaccaaacactgcatgttctcactcatatgtgggagttgaacaatgagaacacatggatacagggaggggaacatcacacactggggcctctcagggggtggggagctaggagagggatagcactaggagaaatacctaatgtagatgacgggttgatggatgcagcaaaccaccacggcatgtgtatacgtaggtaacaaacctgcacgttctgcccatgtatcgcataacttaaagtataattttaaaaaaataaaatagaacttctagaaattagtaatataaaaattggatttaaacttcagtggatagattaaacagatgattagacacaatggaaagaatctagttaactggaagatacatctgaagaaattacccagaaagcagcctcagagacagagacgagacataaggaaaaggttaaagaaataaggatgatagaagaagagggctaacatatgttgaattagacttccagaaagagataatactaaaagtgataatgagagctaataattttatagtacttactatgtgctcctattgtaaatcatttatatacattaaattattaatcttcacagcaaacctatagattaataatgttatccccattttactgatgaggaaacaaacataacagagttacaaaatctggctaaggtcccataggagaaatgccaagtagcctggtcttgtgttcttcaccgttatgttaatatttaaagagattatagcattaaattgtttaaaaatgttaaatgatgataattttaaaatctaggaaactccacaaatcccaaacatgatttgaaaaagagtcaccagatacaatttggtgagaatgtatcatagcagagaaaaataaaagctcttagaggaaaaaaaggcagatcaccacaagcaaatggcaacctgactgatggccgcaacagtaaccctggcagtcagaacatggatcttcaatgtgctggaagaaagaaactatcaccctacaatgccatgcctggaaaaaccatctttagaagacgagggtgaaacaatgacattttcagatagataaaaggaggcatttaccatgcagagactctcacagaaggaactcctgaagaatgtgttttgagaaatggaagatatgagatgtaaaatgggaggatgagcaaaagcattggtgattatgtggataaatctgaataaacactgactatttaaaacaataataagtgtttcatttgttggagggaaacagaatcaaaatcaaataatagagcacagtaggttagacagtaacagaagttaaagctttctaaggtcctgctgctgctcatgaggaaagcagatttctggggacaaatgcatggtttacccactgcaccaaagtataatacaagaaaatgctgagtctcagaactcgcctcaatcaacacatgttccctgtctgaggtcacccagctgctctggaatgcaaaggggcatgatcttgtatggtgttcatcattgtgtcttcattgcctggaacggtacctgacatatcataggcaaacaataaacagtgttgaatgaatgaataaatgagtgaataatttcttctgattgtcttaaatgcttcataattgttacttataactcaatttggctgcagcataggcacatgaaaggaagtcataggagataaggctgaaaatattggttggctctagatgatctaaaaataatctagctaataaatatcatgatgtagagggagaaacgtgacagatggtgcatgtgatgtgctaagtcccctatattttataaggagactcaatatatctagttgttaacatcgataaatcaaaaatagaaatgttgttttattacgcaaagcttttttaaaaaaaagaatggaaactgtatgcagtggttgcttttggggaatgagacttcgagagactttgcatttcattttatacaccttagtgtcatttgaaataaacctgattttgaaaggtcaagtaagccagggccttgaatgccaagcagaagagggcagactattctttagctatgaaagctcacgtcgcttgattggtctgcttcctggatgctcattgtgggcaatgaaagacttcaggacggtgattccttgcagggagtggggccggagagggtaggggagaaaccaagataagtgattggagtcagggcaaatgctgagaaacatctcatgtggtttcctgtgtcatactcttattttccagcaccctctgtacaggaaatcacagggttgttgagcatcttgataagcttcactcagtcatcaggtttcactccagatcctgcaggcatctccccatcctcagctgtttgccagtcccaggaaagcacttctcaactcaccaactccagtagaaagaagggtgttaaggtaagagtttgttcaagaaccatcttctttcaaaggcagttttggtttttaccttagtccacatcctgatgaattcattaggaaaagaagacaggaagctcctttgaggaagctttggatgctggcagcttagatgctgggagatccgaatggggtcaagcaggttcgtcccacttctcttctatctaccaatattctccccttctcttcgaccattcaaatctgaaactatggagagaaagattttgctgattttaatttaggggcaggctagaatgaagtcattacttccctaagctaaattgttatttaaaacctcaggttgcactgattttcttgttattcaaaaggtttttccttcatatctgtcattgtcccagcagaaaacacacatcacacactctaaaggggtagtttagaggagtttagtgaagagactgtttacaacggcgtgaacagggattaaggaatgatgaagccctcaaaggcaagtgatagtggagggctgttaccgttgctaggtctgaagtgataaggagaaagagaagttctgagaactcagaatgtgctgtagcggtaactgtaactgtaactatagctgtggctacaggaaagggccaccaggcagggctatgtccttaggtagaaaaacactgccactgccaactcacagcccttcagggcgcagggagagagccaggaaatttttaaaaaatcatcccccaatctactgtcaatgtgtccctttggctgaaaaaaaaagtcaccctccaatctcctgtcaatgtgtaccctttggagcctgagtgaaagacagcccattgacgaggcacagacatgtctcctcccaggatgcaaaggcaggtagagaaggatggacatgagatcctaatagcaaataggaaagtccatttcttcccatagcctcttctcagtt

SEQ ID NO: 5094 - DNA, 6000 bp, Homo sapiens
aacatctaataatggtaaatgcacataatctgcaacctaataattctgcttttttttttttttttttttaagacagggtcttgctcttgtcccaggctggagggcaatggtccaatcatgcactcccaagctagagtgcagtggtgcaactttgacctcctgagctcaagctgtcctcccacctcagcctcctaagtaggtgggactacaagtgtggaccaccaagcttggccaatttttaaaattttttgtagagatggggtcttgctatgttgcccaggctggtctcaaactcctgggctcaaatgatcctcccaccttggcctttcaaagtattgggattacatgcatgagccactgtgcccagcagcaattccacttccagacacacacaatacacacatatacacatgaatatttaaagaaaatacacacattttagagaaactcttacatgtatgaacaagcaaatatatacaaaaatattcatagttgaattgtcattagaaaaaataaaaataatcttaaccaagaggatggataaataaatactgagtataatgatgaattttatgtgtcaacttgactgggcaaaggatagccagatagctggtaaaacattacatcttggatgtgtctgtgagggtatttctggaagagattcagtagactgagtaggaagatgcccttgtgcatcccattgagggcctgaatagaacaaaaagacaatggaaggccgggtgcagtgggtcacatctgtaatcccagcattttgggaggctgaggtgggtggatcacttgaggtcaggagttcaagaccagcctggccaacacagtgaaaccccttgtctactaaaaatacaaaaattagctgggtgtggtggtgcatgcctgtagtcccagctacttgagaggctgaggcaggagaatcgcttgaacccaggaggtggaggctgcagtgagctgagatcacaccactacactccatcctgggccgcagagagagactccatctcaaaaacaaaacaaaacaaaacaccatttaaaaaaacaaacaaacaaaaaacggtggaagagtgaaaagataaatttgctttctgcttgagctgggacatctgtcttctcttcccctcagacttcactgctcctggttctcaggccttcagacttcgaccaaaacatcattgactcccctgggtctcaggccttcaagtttggactaaaacaaatccactagctttcctgggccttcagcatgtagatggaagattgtcacttagtctccataattgtataagtcagtgcctcacaataaatctctttctgtatttctatatatatcctattggttctgttctctggagaaccctaacacactgggcatttcattaagtggaatattatatagtaataaaaatgaagttacaagcctcatagttcgtgaatgtcgattacactcacaggttgagtgaaaaagcaggttgcagaacagtacgcaatgatgttgatttatatatgaaaaacaatgctgtttattgtttagggatacatgcatacgaaaagcatgaaaatatgcatgggaattaactacaaagtttaggaaactgcttacttctcagggagaggaagaaaaggaatatgattggggagtggtacaaagggagcttcaactacattcgtaatatttcttaagctgattgctgttaactctttttctaagtcgaaatagttcataaaaagtgaaattctacatgtttgaggacttttatccagtcaatcattacagcactcagagcccccactgtatctgagctgttgttgtaacagggcaccttgaaccgttcacccaacaggtagggcctctgcatatacttgttcaggttctatgtttacaagagttcttgggtaaaggggtggtagaaccgaagtccagcttatccatcagtcaacaagtcctgtgtgctctgcacaaagacaccaaggcaagtatcactacgatagggtactttcttcatggcccataagctccatgccacatatgcagaggggttgcagcccagttctattttttatctagcctgtggatgccgcaaatttacttacacacaaccaatgaaaactttaagaggaaccgatctgtagacagagaccctattattttttgcttgccgtcaatttttatttggtttatctcagtatctttccagtccttatgatttatttaagagctgatcatttttctctagttatctgagatattaccttaatcactggttttttgttttttgtctttatactttcttgggacatcttatccaagagatggagactaattgaccaatgtatctctaatgcaaagcatacaaaatgtaccaaataagaaatacaaacacttcaatatatcttatcttttctgttccctacccaagtcttttgttcctgatcttttatcttcttggctaagctgcaaatttgaatcttcctttcttacatttgtcatctaatagacaataggaatttattttttagtaaaatctgcatctccccttttttcaaaatataaatctctcctttcacctaagttttcagccataagattttattatttgaagacaaagaataaagttctccaagtgtggttcatgaatcacctgtgtcactttcacttgctgtgcaacaaaatgctggtttctgggccccacttaggcctactaaatcattctgcatttttaatcaagatttgcatataagccggactccgtggctcatgactgtaatcccagcactttgggaggccaaggcaggtggatcacttgaggtgaggagtttgaggccagcctggccaacatgagaaaccccatctctactaaaaaaaaaaaaaaaaaaaaaaaaaaaaaagtagctaaacatggtggtgggcacctgtaataccagctactggggaggctgaggcaggagaatcacttgaacccgggaggtggaggttgcagtgagccaagatcacgccactggacacagtgagtgagagtccgtttcaaaaaaaaaaaaaaaaaagaagagatcttaaagaaacgattacagaaactaactttacaatttcttccttatttgttcatgacagttgctagaaaataatggaaatgatttagacgatgaaagcctatttagggaaggctctaagagtaccagattaggagccaggagcccaggagctgttccgtgatgatgttgggcagaacacactctctctcgagcctcagatttcttatctataaaaccagagttttctgggggtctttaagttgtctttcagccctgcagtgagaggagatatgtcattcctaaaacttgaaatgaaggcatatgtttatttattaactctctagcttctagacagatttactgtatgtgacttatgtgcccaacctgacattatcttttagataaactcccaaatacaaagatgataaaattttttcattttaaacttataggtctgcatcaacctgtttccattgtcctaagttttatttacatacgatggctagtcaactttatatgataattatctttaaatcctgctttttttttttttttttttttttttttttgagacagagttttgctcttgttgcccaggctggaatgcaatggcgcgatctccagctcaccgcaacctccgcctcccgggctcaagcaattcgcctgcctcagcctcccgagtagctgggattacaggcatctgccaccacacccggctaattttgtatttttagtagagacggggtttcttcatgttggtcagggtggtctagaactcccaacctcaggtgatccgcccgccgcagcctcccaaagtgttgggattacaggcgtgagccaccgcgcccggccgaatcctgcttgttttaatgtattcattaaaaatgtctccattatagagtaaaacgactcaacgccatggcagagagcaagaaacgaagtacccttaaagccgtagttggtacaggtaatgattccgtggggtctattaggccacagggactcaaaatccagaagaggagggaatgctgataattacctaacaccaacgttgctgctggcttctcagccgtagtcacctcccactcagatgttttggaaattgtccagtgttcagaaacatcactttctctgaccttttacaaaattcctgtgtttcaggattttaaagtgcgtgagaaaggagtctaatttgcagtcaccaaaaacaccaaatacagagagaggactggggagaatgaattgctaagacttagctaccaaatgtgtatcaagataggtgtaaagatcccaggtgaagtgaggcactggagagggtacacttttaacttagtgtatagctaaaacccaaagatgtgtgtcagatcgagggaaacttttttcctcctcttcaaaatcttttttccgtttgcagagctccagacgtcctcgccctttggaacagcggagagtcatttaaaacttaactgaacgctggagggaagttctacttaccaggtcatccaatttaggagatccaatttctgcggagggaacaaaaagacgggtgggggagggaaaaactagaccccttgtcctactatccttctaccttcaatccacaacctgccagacaaatccagccaagtcaagattttgccttgaaccaccaccaccaccaccaccaccaccgccgccaccaccaccaccaccaccgccgccaccaccacaaccaccaccaccttgtcactcacgcccgagaaacacgcccctctggtcctcctcttggccaatggcggctctcctctctgcatagtaatgagctcgagacctccccgggccaatggcgctccgggagaagggatacttttgcatgtacctaagtgatttgcataagccagcggccgggggtttgggaaccagagcgtgcaaccctagaagggaaaaggacgggaagagattgagccgcggctgggagacagcgagccagagtctgggtgtttgtgcgagagccacggcgggggctggggcgagtggccggcatggctgaaggctgcgctctgcaaccttgaagagccgctgcattgagaggccagggacagggagaccggtgcgatggcagagcgcggcccccgccgctgcgccgggccggcccggctggcgtgagccgccggaggagcggggctgcctctgcgcgtccatggagcagcgggaagggcgaaactccggagcgccgcgtccctgcgccgctgcggcggactgctgaaggggccgagcccgcgcggaccgccgaggaagagacccccgctccagcccgcaggccggctgcccgggggcggcgggggacatcggagggcagcggagcgagcagcgccgcgggagaggccggcgcgggaggcggccgcagcaatgccgggcccgctagggctgctctgcttcctcgccctggggctgctcggctcggccgggcccagcggcgcggcgccgcctctctgcgcggcgccctgcagctgcgacggcgaccgtcgggtggactgctccgggaaggggctgacggccgtgcccgaggggctcagcgccttcacccaagcgctgtgagtgcgggcggcggggacgcgagggggggggaggaaacggggcccagcggggggcgccgcggggcggagccaggggtcagtcccaccccaccccgccccgccgccgcccgggcctggggagggggtccgccggtcacctgcgtgcgggctgcctggcacccactcctgtgccacgggctttccgcactttgctagtccgggttcgagccagcagtagctttcgttcccagactttttgggcacaagcaccctcccaccccaccgcgcacacccccaactcacaagtgcatctggggccaagaaggaggaagtaatctaaaaacgcttgcccctggcagcctgtccacgcgaccttcccttctcatgagggccctcgctcagc

SEQ ID NO: 5095 - DNA, 6000 bp, Homo sapiens
ttttgagtttttccaagcaaagatttgattggattagatcaagatatggcagtccaagttaatggaaatagaaggcaagggctttgaagcaaggaattgaaacaatctagggaataaactttctttctgctgatgtttctcattgaataatccatggggtgttcagaaaatatttgtaatgagcagccaaaatatttgcctaggcaaaatctctaaaaaaaaaataaataaaaactagggtgtgcgaatgaaaataaaggaacttcagagtcataataatgcgacttcaggtgtgtttttcattcttaccttctaggttgtgtatagggatagacagtttcaggtctcaaagataattataatttattcctttttttccctgtaaattctcagtggaagtgataaactataattaattattatatcctacctgaagtggtagtctcataatttttaaaatatctttttaaatagagataacagaggctatttaattatgtatatactatgtatctttcttctatcagtaatccatacatggcagaaacctgatcagttgactataaacccgatcagttgactatgcgattagcttatatcagataatataatgttacatgtaccagagccaaattatcttcagtgtcttctcagacctaacactagcagccactatcgtacttctatcttccagttgatctgatgttaaaaagaaaaatctcaactatgtctatatacctaaaacctgtggttttctagaatacttgaataataagtacaattgacttatgtcatgtgaaattttcccttccatctttccttgccctccatgtctcttggatactaagtcagggaaatttagaatcacaataaagagtagtgcaaagtccaagaattaaatagggattgcaagtgttcttctgcagagacaacgctacagatactggagagaatagtctcttcttacaaccgtcttacaggcttagacctctgcccacagattctcataaatcactcaaccattagaatattatattatcactttcctttccgaagagtaggattagcaaaagagaacggttacttttttcctttaatgaatgaaattataaataattaatttttaaaatttaaatttgtgatttctaaagaagtatattcaaaaaactagatttacggagtaaatttttaaaatgtttttcaaataacttcattaccaaaatgataattacctcaaaattttttaaatgataaattccttgtatgagcatattatactaaaatgacaaactctcattttttctttatagagttaactttcagttcaccaaccctatcactatattttcctaaatcacaaaataagttcagtattgtgtgcagttatatagaaggatcataccacaaataaagaggaaatatgaattcagatttgagctcacagtaactgagattttttttcaatagttagaatgtacacagtggattgaagttgtgaaattattttcctaaaaaataattaagctgaggcttctgaccatgttttagtaggttcataaatggatttttgcaatggatataagttttaagaagatttcctctgtgatactccagatataggcatgataaataaacctgcattatactgtgaaaataaagagactataattggtggggctgcactaattacaattagctattaactacagttgtttgaatgaagctatcttatacaatgtatatcagaataatgaagttgatgatgacaacctgtgtttactgagatgaccttgccattgtcctgatacattttggtaccaggtgttataaagtcctctgtcttgtcagaaaacatctggtgatactaagctctacagaagctttcaatgccacaaaaataattcattaattttcagtactagtaatcataaataatatttttagagtttccatgtggtttttgagaaatttaaatggcagtagttacagttttaaatatttgaactatttgtaaagaacctccacaataaagacggtcctttgtagaatgccaagtgttaaaaacaacctcctcgatattactgaaaatgaaaattacctcttcaaattaacacaacagcatttccatgaaaattatgaatgtgtttctagagaaaatatttacattggcaataagcctagtaactattctctaggagtctctcagaaattaacatgcttggaatccttcaattactaggtccccagtgacataagaattcatgtaaaagcccttggttgtattggtgaaattattcccttaagcaacttgcaacagttccttcctcagtaagtagcttctgcggttattggactggctttaatcgtgcaaaaaaaaaaaaaatcaacttttgttggtctgagagcaagaaccactgatttgagtacaaatagttttgaaagtacatttatcattcaatattgtactgacaaggtaatctatcttttatcaccctttctgatatagcttccacagggtctaaaatgtcttttgtttaaataagccttttgttactgataggagaaccaaagcatatctacctaccttataacttgaattaacttattttataacataagattgttttgttatgtttggaaagaacttattgaatcatagtatgttagtaagatttatttgttaattcccttttaaaaagaagaatccaagaatcactgtcttttcctaccactatcctcatgcctcttctcttccttttaatatttctctaaatagaattttttgactatcagaaggaatgaccaatgtgaagttgccaagaatacatgccccacatttttgggaagtatgcgaaccatagaatggtcatactgttaatattctccccgtcctcatgcttgctttcatgggctttgatttcatacacccctgagtttgaattgcactggtcaactacatgttgaatgaccttgagatactatcctaagcattaatgttctcatccaaaatatggagctaataaaaagaatcctgtttatagagaaccagtgtatcatgtggctttggagtcagaattttgggttctaatcctgtttccatcacatcctaaatctcaaattctctctttcttagtttccttcatctgtaagaaaaagatcataatgatagtaactccatggtaattttgttagttttttggtgacaattaaatgagttataggtgaagtgttaagaatattgcattacacatagtaagcattatacaggtgacaattattgttagtaaaatttgacaggtagctctagtcataatctaagaataaaatggcagcgtggcaatcaaaactaatttttgatgttatctactgtatgtcagtctccctaaagaatgacacatggaaagataagtaggtagataaagggacagaaagggggggcagaacattttccctatttaatccatacagaaacactatgagatatttattatcattgttgtagtatagattaggataatttatattaagtggcacaaggtcacacagcccccatgcagccaagatgggcatctaatcaaattcctcctaaatcgaagtgatgtcttatattgtctaaataccttgactattttcaaacaagcaaaatgagaataaccactgtcctgctgtagtgctgcatctcattcacacgctttgaggtgataacataaggcagcactttgagcacgtgattaacccttctgattatcaataggcttctcagtgtttatgtcattgggtagttttattgcttacatgagataaataaattgtctttagcactgtcattgtcataatatctattatgtaaatgaggcagtgactcaaatatttttaattcccatcttggccctctcaacatgaactttagagattgatgctttgcttgcttttttttgttgttgttttgttttttacgtatttccaagtctatccttcatggtcaaaatcaaattatttgtacttcaaagtcaagttaaaaatttttataattctgtaagtattttgagacctcagaagcagtgtttaacagatttttctgactcaacactttgtattatactaccataacaataaatgcaacaattgttctttacttataaaatttaatcagtgatgatgccatatatagtaatgttatttaattgcaagttaacatataactaaatgttttgctgactgtacttggtcagtccactaatgtttaatgagcatttccaggaagccaaggagttcgataaatgccagaagtattgaaacaagtagttaactaattttatcagcttagtttagtatgtgaacagggtttatggaattacactaagctcttttctgtcaaaaatatcctcagagctggtatttactgacatttgtttttatttcgctaaagcttctgctttacagtaaaaaaaaaattagccggcatatttcatcacaccactctatttactcagtcaagagacacagcataccggtatctatcaaatcctgaaaacaagaagcagatgttctaaaattcttattcaaaggaacactctataagtcagtccatttttaataatatacatattttctttacttaatgtgatcatcagtctgttcattaatttattacttttttaatactctgggccagtaattgtttaatattttgggtgcaaaatggtaagccaaatcagacatgatccatgcacataggaagtcaactgttcaatggaagaaatagtaatcaaataaaatataacctgcaaccatgaaatatgatattactaaattctgaaatatatttctcagagtttatagttcaaaaaagtttgagcttgctttctttatcttattgccatttatttatttttaaacaataaaataactttataattacatctaattatttttcttttttcatcattatagcattgtagggtattagaaattctcataaaaggaaaacaacacagaagatggaatttacagatagaaactacacgttggtcactgagtttattctattaggttttccaactcgccctgaactgcagattgtcctgttcctcatgtttctgacattgtatgctataattctgatagggaacattggattgatgctgttgatcaggattgatcctcaccttcaaacccccatgtattttttccttagcaacctatcatttgtagacctttgctatttctcagacattgttcccaaaatgctggtcaatttcctctcggagaacaaatctatttcctattatgggtgtgccctgcagttttattttttctgtacttttgcagatacagaatccttcatcctggccgccatggcctatgatcgctatgtcgccatctgtaaccctttattgtacacagttgtgatgtctaggggcatctgtatgcggttgattgtcttgtcataccttggaggcaacatgagttccctggttcacacatcctttgcctttattctgaaatattgtgacaaaaatgttattaatcattttttctgtgacctccctcccctgcttaaactatcctgcactgacacaacaattaatgagtggctcctctccacatacggcagctcagtggaaatcatttgttttatcatcatcatcatctcctactttttcattcttctctcagtcttaaagatccgctctttcagtgggaggaagaagaccttttctacatgcgcctctcacctgacttcagtgacgatctaccaagggactctcctctttatttactcacggcccagctacctgtattctccaaacactgataaaattatctcagtgttctacaccattttcattccagtgctgaatccgttgatttatagtttgagaaataaagatgtaaaggatgcagctgagaaagttctaagatcaaaggtagattcttcatgagataaagcatctcaagatacatctaatttctcaatcacatactgtaattgggaac

SEQ ID NO: 5096 - DNA, 6000 bp, Homo sapiens
ggataaattggaaattaatttgtgataaaaataaaagaaaaaaagaaagagaaaaagaaagaaaggatggaagaaataaaccacaaatccttcattaaactgcatatcaaaatagaggggaaaatgatagacctaatttaaaacttgaaacaacagaaaacacttaaataaaacagaagaaaatctttttgacctggggttaggaaaatatttcttagacattacacaagaaaacacaaacatataagtaaagcctcataaattccattatacttctttatatttaattcctctccttcctctagtccctgacaaccactgggaaaccacagatgtgatttctgtaattcttttcccctttttagaatatgatctaagtgaaatcatacaacttgtagcctttcaaatcaggctttcttccttactgtgatgttttgaaattcaaccatgctgttgcttgtatcattttatttgtttctgtgggtttttttcttttttgcctttataagaatgaaacttccaaaagcaatggacttaataatgactgctaagtagtattccattctcttacataacactaattgagagaaaatgacattgtttccaaataagagccattataaataaagcttgtctttgtatctatgtacttgcttcacttaattgaaattaccttctgcttataaaaagctactctcaaaaatgtaaagtcaaggcataaactgaaagcatgcattgtgaaagtgcatatgcattaaaggacttgtatccagggtataaaaggaactatgaaaaaacagtaataataaaacgaacaaccaaagagaaaattttcacggacattttaccaaaacaacaaaaaatagtgatagcaagaaaacatataaaatgtttaaaatgattagttgttagggaaattcaaattaaaaccacaatgagaaataatggcacatctatcagactagctaaaaaatgtaaaagaaagaaaatgccaagtgctggtaatgatttagagcaacgggaactcccagacattgttgtgttgacacaaaacaccgttttaaaatgttgtcaaagtttgtcagtctcttaaatagcttttacttaccttatgatccaatagacttccagttattacccaagtgaaattttaaaaatatgtagatacaaagacaagctttatttataatggctcttatttggaaacaatgtcattttctctcaattagttttacataatggaatggactactacttagtagtccattagtccattgcttttggaagtttcttttttataaaggcaaaaaaacctcacaaaaaacaaagtgataaaagaacaacatggttgaatttcaaaacatcatagtaaagatgaaggcctgatttgaaaggctataagctgtatgatttcacttagatcatactctaaaaaggggaaaagaattacagaaatcacatctgtggtttcccagtggttgtcagggactagaggaaggagaggaattaaatataaagaaatataatggaatctatgaggctaaatgaaatattctgtcttaattgtggtagttgttacaagactgtatgtgttgtcaaagctcatcaaactgtacccttaagaatgaaagtttttccattggtaaactagttcaaccattatggaagtcggtgtggcaattcctcagggatctagaactagaaataccatttgacccagccatcccattactgggtatatacccaaaggattataaatcatgctgttataaagacacatgcacacgtatgtttattacggcactattcacaacagcaaagacttgtaaccaacccaaatgtccaacaatgatagactggattaagaaaatgtgtcacatatacaccatggaatactatgcagccataaaaaaggatgagttcatgtcctttgtagggacatggatgaagctggaaactatcattctcagcaaactatcgcaaggacaaaaaaccaaacactgcatgttctcactcctaggtgggaattgaacaatgagaacacatggacacaggaaggggaacatcacacaccggggactgttgtggggttggggagaggggagggatagcattaggagatatacctaatgctaaatgacgagttaatgggtgcagcacaccaacatggcacatgtatacatatgtaacaaacctgcacgttgtgcacatgtaccctaaaacttaaagtataataataatttaaaaaaagaaaaaaaatgaaagttttttgtaggaaagctataccacaatggctttaagaaattaatggtttctaaggccgtattgtccccatttaaacattcatgaattaaagtatttttattcattgttctttctgcttcttcctgaataaactcctttcaaaactttaaattaaaacttccagttcattctactttttcagtctttgcttttttaaggtttgataacatcaatctcttcttttttcatagtattatcttctctccttgattctaacaaaattcatgaattgagaatatattgtttttcctccatctctttcaattcacagttgagtttctccagtaaaaattatttcacatactttcattccttaagttatgtattcttacatacataagcagataaatattgaaaatataataggtaataatcaatcatggcataggtcttgatggcattgtattagtccattctcacactgctaataaagatgtacctaagatggggtaatttataaaggaaagaagttcaattgaatcacagttaagcatggctggagaggcctcagggaacttacaatcatggcagaaggggaagcaaacatattcttcttcacatggcagcagcaaggagaagtagaatgagcaacagagtgaaaagtcccttataaaaccatcagatctcatgggaactcactcactatcacaaaagaacagcattagggtaaccactcccatgattcaattacctcccatggtgtccctcctatgacatgtgaggattatggaaactacaattcaagatgagatttgggtagggacacagccaaaccatatcagacatgatggtgagatctttaaaagtcaactttttaacaaatttcttgcattatgttagaggcctccctttagatgctgatgtctcctacgtgctttgaagattggaggattagattcactatgagatatacatacacacacgctacatatacacatacacgtaaacatacacacatatatatacacatataagctaaaatggagcatgataggaaatagcgagctaggtattagttctttatgttgaagattgtgttcaagtttattcctctacttaccaacagtttatctttggggaagttgtttaacagattaaagccttacttttttcatctataaaatgtgcgaataataatgtcaacctgaaagactggttgagagaagtaattgagaatttaaacaaaataattaacatagcaattgctgcattatgagttccctatgcaaatagactctctttgcatttgaatacccaatgtagtatattttacgttgtcttctttttgaatttagatctagaaaatctatagcttcatgtctttgcaggataagaatcacaaatagtaacggcaaaaaccaacacaatttcaaaatcataaatatataataatttttaaatctattgtgctatttgctcaggttataggatttctttaaaaatcatacaatagatatttattaactaccctttctcactacctttatacaggaaaatagctgaattttaagtcacaccgaaaaaaagaggggtgcacccacatactaaaatggcacagggggagaacgatagtttagtcacgcacttagaataagctaaaaatacagacacagagagagtcagtgtagatagacaattattttccagaggtcacaaaccactttatgatgtaagactttcataatgtctgattccatacatctctatgtgatcatattatatttaatattgttttgagacagagctcctgcctgtagagaattgactctgcaattaatagctataatctactccccatggttaccctgtcttcttggagaaaaacaaaatacaagtgcagtaacaagtatttaatcataaggcatcttaagattttaccaatagataattcaattttccactgcattttttaaattaaattttcttcttttatttttaagctccaactaagaacctctgataaaaaaaaaataatagttacttacttaggtaagtagccatctggggaggaagttttaaagatttggtaatgttattaagtaaggtggataggtaccctgtcggctgcttcttggaattaacttgataatggacattgtagtataacaatcatttggtttacttttaaaacatcactaaattatttttaaggatacaatagatgtgaaaatattgattatttgaaatggtcactctttttgctgcttagggctacacataagccattctcaagagataaagtatgaattttggagttgaagaatgtacagagtgattttgagaaaattaaaaaagaatgcattgagttaaattcacatacctgctctgagaatgggagaaattttagcaagaatatttttattattttacattttggatgtgggctagtatagaaacaatagaacaaagtatttgtattcacagaaatagagtatgtggacttcagccagtgatttgagaagcctacaactccaattcaatacaatcaattgtttattacatgtaaatgcttacccatgggtcctctaatattcctcttacttcagtaattatgacatattattctgggtttttgtttatttatttgccatatgtgactgtcctattaacacttctttttttttttttttgtaaacttttagagaggaaaatatgtgcaactaatacaaagtttacacaaaatatatttctcataaatgaccagaaaaaattatacctcactgactgagttcgtcctattgggattagcagacacgctggagctacagattatcctctttttgttttttcttgtgatttatacacttacagtactgggaaatctcgggatgatcctcttaatcaggatcgattcccagcttcacacacccatgtatttcttcctggctaacctgtcctttgtggacgtttgtaactcaactaccatcaccccaaagatgctggcagatttattatcagagaagaaaaccatctcttttgctggctgcttcctacagatgtacttctttatctccctggcgacaaccgaatgcatcctctttgggttaatggcctatgacaggtatgcggccatatgtcgcccgctgctttactccttgatcatgtccaggaccgtctacctaaaaatggcagccggggcttttgctgcagggttgctgaacttcatggtcaacacaagccatgtcagcagcttgtcattctgtgactccaatgtcatccatcacttcttctgtgacagtcccccacttttcaagctctcttgttctgacacaatcctgaaagaaagcataagttctattttggctggtgtgaatattgtggggactctgcttgtcatcctctcctcctactcctacgttctcttctccattttttctatgcattcgggggaggggaggcacagagctttctccacgtgtgcctctcacctgacagccataattctgttctatgccacctgcatctatacttacctgagacctagttccagctactccctgaatcaggacaaagtggcttctgtgttctacacagtggtgattcccatgttgaatcctctgatctacagcctcaggagtaaggaagtaaagaaggctttagcgaatgtaattagcaggaaaaggacctcttcctttctgtgattgtttggctaaaaatctcaactaaagagcatattttagttactttcaaagtcta

SEQ ID NO: 5097 - DNA, 6000 bp, Homo sapiens
tctacgcacctgatgtacattccttgggtgaatgtgtgcattcagtgcacgctcatgcctacaacacacaaacatgcatactcttctatacacgttaatgcatgaacccaatgcacatcatagcccactatgcacaagcaagcacactgttctacatgcatgaatgcatgcacccaatgcacatcctacctcactatgcacaagcaagcacactattctacatccatgaatgcatgcacccagtgcacactcatatccccctgcacacacaagttcagcctgctcacaagcacctacagacttcacatccaagtgacctcgtggcacacagaaaacttgcattcacaaagcacacatagtcagcatgtccatgggcacaggccaagtcaggctctgctttttaggccaggcacaaacctggtggtggggtgggtgaggaatattgaaccactgactccagaggtctcccagaagtctgggctctcctcaaagggcactagcaggtctggagtgcttttctgccaggtgtcattcatctcggtctcatcacaatgccctgaagaaatcacccaggagagagagggaagttccccaggaaacctgtgcaggcctctccagggcaggccagctctgggcaccctggccaacaggcttgccttagctattggtttgccagatagctcagagtagaatttcctggatcactttagcaaaagttgccttgttaatgcagtagagcagctctggggtgaagatccaagtcttacacccttctcctgagtgtgtttctattgctttaattcaacagacttttaccaggtgccaagtagggtggggggcagaaatgaaaagaagatatctgtcccaggccttgtatatgtctagtctgtgaggcccaggacccatatacttctgagccccgggacacacaagtttcatcttcagctactggtcctattttccagtctttcttctgtgtggaatggtgcaatgcggaacagggacagatcagatcaggcaggataaggagtgagctggctaattctgctcacttcaggctgtcattgcagggggcactcaggccatctggctacagctggctcctggttggaggccggatcttatcagcactctaccctctctggtcccaaacggtggcctcttcccagccctggcccccaattccctcccctctcaatgagtctggtaactctagtgagattaactgctctttactccctctagggcagacatcctggaggtcggcagatgaaagcgatggatccatatcctttcccacaggggtctccaggctcctgtctggctcagcattccagtgggaacagctgaggggagggagacagggacctgatttcagggacgcttcaagcttgctagctcccttctctctgtatttctagctgcaaagggcacagacatctgcatctttctgggagaatcatgggagaactgggatcactaggcgtctcaaacttggtctttatcctggaatgtcccaagcagtaatgtttactcgtaaaagggccatctattatgacctgacctgagccaagctggtccctgcacaactccaaggtcccctttgataggtaaagatagcttaccactgaagaagtctgaggtagccaaaggttagctatttccacccaggatataatgtcaggatataatgaaactattatatcaggatatgatgaatgaatcatgatatgatgaatgaatgtcaggatataatgaaaaccattctgccatctgcgcagaacttctattagccaaaaatgcaggagcaagaggccccaagcaattcctaccctgtgtactgtgagatggatggagccccagctctggatcctattgggtgtcccagcccccactgtacagaatgccaagattccaggggcagagtcctgttagctttctagctggcaccaggcaaccaggaattctctttggcaatggctagagcgagggtggtttctggatcaagtctatggtgctaaccctaagtgtacagattattgcctggcaggattcttataccctgtctaatcaatgtgaggtgtgtctctaaatagtcaatctatttaaaatctcacccggtagagcttattttaaggtaaattacaggtatcctggcatcgccctacatttctctaatgcttaacagatgacacacccctcagtttaaaaaggattgggcgtttttctttgggagcatagtggtttagtccatgggctcgagacagctttggttcaaattctggctctgacaattactgctgggtgatcttggctaaactgcttcacctctgtgtgcctcagtttcctcatctgtaaattgaggctaatgagagcacctgcctcctaatgtcattttgatgattaaaagagatactaataaatatatgtagaatgtataaaatgtttagaagactgcctggcacacaataagtgggcaacatgtagtcctcatgagaaacaccaacatattcattactccacattgcatttaggtgaaggtcacaggatctttctaatctctctctgcagccttctctcctgtatctccccactgcactctaaggctttttctatctttgcattttttgtttcctcctcctgccccatcctcttggttcttctcctgccttctattcttggcaagctcctgtttaaagaacacaaactcgggggccaaagacatgttttacttatcatggtctgtgcttttttttgaaatgaaaattgatttccaaaatttacaaatatgaaaatttcttacaaaaatccataatttgaaattatcttggaaaaatcctaagacacagtcatgctggggtccagctttctgcgtggcaaccagagactagagctgaagaggcctccctatgatggaatgggcaccctccagtttgccacagtctttaccattctctgttgtctcaaactacactcttggcctgttttttttttttttttttgcaggtatttgagtttgagttccttgatctctgcatatgattttctgatccactctccctccagaaaatggattccagcttttgtagtaacttaagacaaatatatatcgtgagacagggtcttggctgtgttattcaggctagtcttgaactcctgggctcaagcagtcttcctgccttggcctcccaaagtgctgggattataggcatgagccaccttgcctggccaattccagcttttgtaagtcttttgccttggaagtggctaaggctcagctcctgcttttgttccatctcactattacccaacgtcaggtggcttccccaactcttcaaggttgtggaaagggtgcgtattttttaaaaaaaatcttacgtcgtgcatcttccttccttcctagaggtcctggagaggtgatgagctggggcaaagtgagcgtctacggaactttccccacagtatcctccagtgactgagtctttctctagagacccccctcctctagctcaacttcctgaccccctgtggtcttacagaaacctcttggtccatggaggatagtaaaaacctgagaactgaaatgtatccatgttctcaccacgtagtaattcttacacttgttcttccatctatggattccccttttcactcacctcctacatcatccatccacttactcactcaacagccattcacctggctgggcgtggtggctcatgcctgtaatttcagcactttgggaggccgaggtgggtggatcatctgaggtcaggagtttgagactagcctggtcaatccccatctctactaaaaatacaaaaaaattagcctgcaatcccagctactagggaggctgaggcgggagaatcgcttgaacccaggaggcagaagttgcagtgagcctagaccagcctgggcaacaagagtgaaactctgtctcaacaaacaaacaaacaaacaaaacagccattcacctacgacatgccaggtactgtattatgttcgtgtttggagaagaagaaaagcaaacaatcaactgtagcataattcactttattaccttgggcaaaacattgaccttgttgggcctttgtttcctacagatttaatgacttgtttagagataattttgtcctgggtttcttccatcctgtgactgccctcaaccttctaaagcatcctgtgccttccgcaaactgcaaactgcagtctacactagtgtaggggtatttctctagaaaccacaaaagttctcagagggagggtcaaagccaaggggtagagaaagatgaagcgagaggcaaagtgggagaagaccctcctgtgacacctggtctgggtgggggctgggggtgcaggaagggagccgagggggccagacctgcctgccaggaggacctgccagatgccctgcccatcctgcgaaatcttacaccctccttgctccctaccagccctggctccagctcaagctggattgcaatctgcataatgtgtcccatttagattggatggaagggggtgagaacaggagggcggagagcactgaggagggagtgccctaaagggcaggcaggaagtggtggccagaggaaagtggagggataggggctggggtgaaggtgggtggcagccagaaaggagaggcggggccaggaaagccgacttgcaaaaccacagataatgttcagcccagcacagtaggggtcaatttggtccacttgctcagtgacaaaaagaaaaaaaaagtgggctgtcactaaagattttgactcacaagagaggggctggtctggaggtgggaggagggagtgacgagtcaaggaggagacagggacgcaggagggtgcaaggaagtgtcttaactgagacgggggtaaggcaagagagggtggaggaaattctgcaggagacaggcttcctccagggtctggagaacccagaggcagctcctcctgagtgctgggaaggactctgggcatcttcagcccttcttactctctgaggctcaagccagaaattcaggctgcttgcagagtgggtgacagagccacggagctggtgtccctgggaccctctgcccgtcttctctccactccccagcatggaggaaggtggtgattttgacaactactatggggcagacaaccagtctgagtgtgagtacacagactggaaatcctcgggggccctcatccctgccatctacatgttggtcttcctcctgggcaccacgggcaacggtctggtgctctggaccgtgtttcggagcagccgggagaagaggcgctcagctgatatcttcattgctagcctggcggtggctgacctgaccttcgtggtgacgctgcccctgtgggctacctacacgtaccgggactatgactggccctttgggaccttcttctgcaagctcagcagctacctcatcttcgtcaacatgtacgccagcgtcttctgcctcaccggcctcagcttcgaccgctacctggccatcgtgaggccagtggccaatgctcggctgaggctgcgggtcagcggggccgtggccacggcagttctttgggtgctggccgccctcctggccatgcctgtcatggtgttacgcaccaccggggacttggagaacaccactaaggtgcagtgctacatggactactccatggtggccactgtgagctcagagtgggcctgggaggtgggccttggggtctcgtccaccaccgtgggctttgtggtgcccttcaccatcatgctgacctgttacttcttcatcgcccaaaccatcgctggccacttccgcaaggaacgcatcgagggcctgcggaagcggcgccggctgctcagcatcatcgtggtgctggtggtgacctttgccctgtgctggatgccctaccacctggtgaagacgctgtacatgctgggcagcctgctgcactggccctgtgactttgacctcttcctcatgaacatcttcccctactgcacctgcatcag

SEQ ID NO: 5098 - DNA, 6000 bp, Homo sapiens
tatttgatgagctcatccatgagcaagtttcagccttacgctggcacatagtgagtgccccataagtgttagctattactgttttcattttttttttttttttttttttgagatggcgtctcgctctgtcacccaggctggagtggagtggcaggatctcggctcaccataacctctgcctcctgggttcaagcgattctcctgcctcagcctcctgaatagctggtattacaggcgtgcaccatcacacctggctaatttttgtatttttagtagagatggggttttgcctgttggccaggctggtctcgaactcctgacctcaagtgatctgtccgcctcatcctcccgaagtgctgggattgcaggcatgagccaccgtacccagaagctattattgctttcactgtgttgaatggtggccctcaaaagacatgtccacaacctaacccctggaacctgtgaatgtggccttatttggataagaggactttgcagatgtaatcaatttaagaatctcaagatgagagcaccctggatgatccagatgagccctaagtccagtgaccagtactctgtgagagacacatgaaaagagggagggggaaggccaggtaaagaggaggtagagattgcagtgatgcagccctaagccaagggacgcctggagccaccagaagctggaggggccaaaaagtctccttttctagagctttcggaggaagtgctggcatctgattacagactctggcttccagactgtaagagaataagtctctgttgtttaaagctgccacgtttgtggtagtttgttctgacagcccgaggaaacaaatacaccactgttgtttctgcgacgattgcctggcacatgtgtgggcctgagcccaggccagggctgcctctgcctgctctgccttcttgtcttccttcctactataaagcgatcagtccccaaggttgtacccactgcaggtgaagacagagccatggagaattgcaccagaccatgggtaagaaaggttccagaatggggccggacacagtggctcaggcctgtaatcccaggactttgggaggctgaggcaggcagatcacctgatgtcaggagtttgagaccagccaggctaacatggtgaaaccccttctctactaaaaatacaaaaattagccgggtgcggtggcgcacgcctgcagtcccagctacttgggaggctgaggcaagagagtcgcttcaacccgggaggcggaggttgcagtgagccaagatagggccactgcactccagcctgtgcaacagagcgagactcagtctcaaaaaaaaaaaaaaaaaaaaaaaagtaaaggtctcagaatgggtcaccacaagggactggggtcctttgaggtctgcacagggaagccaattttagagattcattctgttcagcaaatatatgttgggacccctctcatgtgtcaggccctctgcttgcctttggaggtgagaagataaaacaggaataagtctctgtcttcaggtggctcatgagggtggtgaacagttgtgtgaacaagagttaccagggaagacaggggggctgcaggtcaagtgaagtggagatgtgggagaggagggacagcaagtgggtctgagagaatcagcaaaggcttcccagaggaggcaacctctaaccagggttttgaaggatgaataggagttcactgagaggccaagggaagaaaaggcattccagagcagagcacaaacagcataagccagggcacagaaacagcctggtgggcacagaaacagcctggtgtgtacagaaaaagcctggtgtgcacaggacaggaggggacagtggtgagtgctggctgatgacaggatgccactagggagtggcagcaatgccaggggaggcttgggtgggactggatcaccgaggggcttgttggccatgcgaggagtcctgtgggtgatggtggcaccagggaactcaacctgggcctccccaaggtatcatttggggccctgccatgctgctcctctactgggtgtgggtagctcgagggcctccgagcaaggggctggaggatcccagggcaggcctcaccctgcttcctgccctgcatctcacttcctgtttgactgacttctttaaagtggccagaaaggaacataaaaaacccacctagagggagaagaaagcccatgtgggctgggcctatgcttgggggctccatctgcccctccttcattcctttgctcccttggctgtatttgttaaacattgatgctgtaagtatcctctgagtatctagtgacattggtggtctcagaaagaggtcctgcaggatgagtcgtggaggggaagtggcattcccagcagcacgtgccaaggcatggaggtggggaaagaaaggatggggtagctgtggacatgaggaagggggtgcagggactggtggttggtgcactggatcctgagaggccttgaatgctaggttgggaatctggacagctcccatgggcagcagagatgcagcagaggtcccgtgtgccaggaagcgacaggctcagattcatctcctccacggcagaaggtgatgctgaggcagcgagggacccgacttccgctcttactgcctctgatattaagttccaagccttggaggaggttgtaatttagggactagggcctgagcctgagtgcagctgcatctttctcccagtcctgggggacacaagccatgggataaggcagggcacggctcttcttcagaaaatgcctctgggccctgctcatctggaacttgttttggtaactttaagcttagtagctttttttgtttacttagtaatacattttctttagagagaacacacacactgggttttctttagagaggaacacactcgcactggggctggacatgagtcactacagtgattacaggactggaaacaaggactgagaaggggcagatgagtaagggttttttagccagaaaagaagcacctcagcagggtggccaggagaggttgtgcaggatgttcactgtacaaggataccagtggaagggtcaagggtgggctgagatccagaggaagggctgtgccttatctcaagcctgatgccctggtgctgagatgtgtctgtggggtggggtggtggggaaggggtgattctttttcttagtccaaagataaatctgggctccaacccctgtcctttgagggtgggactgtgcagaaggaacaccatttaaagttcatattttactgctgtgaagttacttgcccaagatcacatagctgaggagtggcagtgccagatccagacactggtggtctggccccagagtccctgggcttaaccacagcctgacactctctgtgcgcagacaaggcacacgtggccttgtctgtggttcagtgggttgggtgtccggggtgggtggaaaagagggcactttccccatgcagaatggaatcatccacctatgttctctggagggctgcaggcatttgtctttggaaatcaagccttccctgacctggaggagaggggacattttcctattgttaatgatttggatcaccaaggctcttactgatctgccatattgggctacagtgagatgtattatccccatcacaagggcatagcattttactcattttccactcatgatggtagcctctcagcaagagcgtattatgcattagtctctgcgttaagactaggcctaaatggaagatgcttgtgctgtccatctcatgggaggtgcctttgcctcgatacagggatattgagttcttaaaatgttttaatgagtatccattaggtgctgagatgctgaggttgaagggatggtcctgaccccaggaagcttggtcagcaaatgagagtaaggagttagggaacaatgaaatgcaaacttctcttatcctagggctttgagcctgtgtgtttttttgtttgtttgtttttgttttttagtttaaatttccatttttttttttttgagatggagtttttactctgtcacccaggttggagtgcagtggtgtgatctcggctcaatgcaacctccacctcctgggtttaagcgattctcatgcctcagcctcccaagtagctggggttacaggcatgtgccaccacgcctggctgagttttgtatttttagtacagacaggggttttgccacattggccagtctggtcttgaactcctgacctcaagtgatccatccgcctcggcctcccaaaattgagcctgttttaaataaaagctatatgacctttgccttagagcctatattcatttttccctcagaggagaaggaagctgatttttataagcacttactgtgtgccacgagctttgtgcaatccatctcattcaacccttaccacagcctgtaaggccgatgttactgctcccgttcacagatgacaaccccagggctcagcaaacagaagtgactgacctcttggactgcgttcttgccactgcccccactaccccactgtactttcctggccttagagccctcgggtccctcatggacaggcccccacactgcctgggaaactcagaacagctggaggggtttcttctctgaggattctggtgtcgggagatggaagcccaggaacagtggacagatggatgagacattctccttctcacgcacttatcctacacactggtcactctcaaaagcacacccctagtcacactcgggctcacactctcttgcacacatcgattttttcacgtgcacttgcactgccctctggacttctgcagtctccttcatgaagcggggatgggtggagcaggggctgccggcattgatggaaattgatgatatttgaacatctgtgtggcaactcactctccagctgtccccgcctcccccaaccccacccctaaacacacatgcactggggctgacagctatttcctctctcagcctccctctcccacctctgtctgcccgctgcctcttgtctagctgctgtcaggagctgactgcctccagggctggaatcctgtgctccctctgtgcccaggtaaggaggagtggcccaggggttgggcagcctagtgccctctctagacccacagaagaaggcaaagttttaccaggtgagagggctgttaccagctaggatggcagaagattgagtttaccaaagactggaggggacttggtgctcagaggagggaaggattagcttctcttaggcattaactagatgtcagatacgaggggaaaccactcaactgtctgtcaatattcacaagcagtctgggtgggaagatgacaccagcacgcttagagtaactggcccaaggtcacgcagccaggaagctgaggagctgggattcaaacccaggtcttggactcccacagcttgcactctctgtccctttttttttttttttttcttaacctgccaaagccggaccttagctgcttggctcctgagaatcctgggaggctgggggctgtctctatagagttagaaggactgatctggtggtgcccaagggtgtggcaggactgtgctctctgatcatccccataggacttggatcagcagcagctggtctgcagggaatgtttcagggcagacagcgggtggtacttggctatctgctgggagtgaagtcccagccccactgttgcagctgaggaacgctgggcaagttgttgtttcttcttctgaaaaatggggtgtcataggttcattgcaagagtaactgctctgcacattctaaagcctaggaagtatgaccattctcaggaagcacaggctcctcttccatctacctgcaggtctctagctccaaggggctcctccgccagcagaattctagtttgatattccagaaccccactctacaaaggactgtggtctctggaagggagtgggttttctcatcctggccaacagtgttttccctagaaagatgagtactgaagaccattgctcccctc

SEQ ID NO: 5099 - DNA, 6000 bp, Homo sapiens
tcatatctacacttttgaaaaccaatgataaagagaagaccttaaaaacagccagagatggccaggtgcagtggctcatgcctgtaatcccagcactttgggaggctgtggtaggtggattgcttgagctcacgagtttgagaccagcctgggcaacatggtgaattcccatctctacaaaaaatacaaaaattagccgggcatggtggcatgcacctgtagtcccagctacatgggaggctgaggtgggaggatggcttgagcccaggagatgaagattgcagtgagtcgaaatcatgccactgcattccagcctgggtgacagagccagaccctgtatcaaaaaaaaaaaaaaaagacagagagaaaaggatgagaattattacagacctcttttcagaagttaagcaagacaaaagaccacagaatgacatctttaaaattttaaaagataaattttaaaactgtcaacctagaattcttcatccagagaaaatatccttcaaaaaatgaaggtgacacattacccacaaaaattaacttaaaatgaatcaatgacttaaatataagagctaaagcctcaaaatccttagaaaagaacacagaggtaaatcgccaatctccatgaacttggatttggcagtggattcttagatatgacaccaaagacacaagcaacaaaagaaaaaatagataaactggacttcatcaaagtaaaaacttttgtgtctcaaaggacaccgtcaagagagtgaaaaggcaacctacagagtgggagaaaatatttgcaaatgatatctcataagaatctaatatatacaatttttatttttaaaaaactttggctaggcgcagtggctcacacctgtaatcccagcactttgggaggccaaggcaggcggatcacctgaggtcaggagttcgagagcagcctggccaacacagtgaaaccctgtctctacaaaagtacaaaaattagccaggcatgatggcaggtgcctataataccagctacttgggctgaggcagaagaatcacttgaatccgggaggtggaggttgcagtgagccaagattgtgccattgcactccagcctgggcgagagagcaagacttcgtctcaaaaaaaaaaaaaaaactttaacagttcaacaataaaaagacaaataatccaattttaaaggagaaagaatccgaatagatatttcctcaaagatatacaaatgaccaataagcatgtgaaaaaatgtaaaaatgttctacatcattagtcattagggaaatgcaaatcaaaatcacaatgagataccaattcacgcacccactaggatggctacaataaaaaagacagctaataacaaattttggtgagggtgtagagaagtcagaatcctcatacattgtaggtgcctactttattcatggaaaggacctggacaaaggtaagaactcactggggtacactgaatgaatgaactactgaattaataattgaatggaatccattaaatgaatggaatccccccaatgtccaattcatcagcaagaattgtgcgctctacttttaaattttattccaaacccagctgtttctcatgacctacactccacagccaccacgccagttcagctcccactagcacctgcatcagactccttacttgtctcccagcctctcctcttgtccttatcagtctattctccatacagcagcctaaacaaactgaaaaattaaataagttattgtcaaaatcatggttttcattttggatgatgggtacctacattaatatgaacacaaacatatatacactaaaaaataaaagagggcaaccaagattaacaggatgtcatgaaacaagaagtattattattaatccaattccattcatcagctgtccaataaaaatgtaagtagggcacagtggctcatgcctgtaatctgggaggctgaggtgggtggatcacgaggttaggagataaagacgagcctggccaacatgatgaaaccctgtctctactgaaaatgcaaaaattagctgggcgtggtggcatgtgcctataaacctagcttacttgggaggctgaagcaggagaatcgcttgaactagggagtcggaggttgcagtgagccgagatctcaacactgcactccagcctggcaacagagggagactccatctcaaaaaaaaaaaaaaagtaaaattttttagatgtaataaaataccatttacaatgccagcaaaccactaaaacaatacctagaaattaacacaataaagtgtacagaacttttatgagtaaaatttcaatgttatagcctggcgcagtggctcatgcctgtaatcccagcactttggaaggccaaggcaggctgcatcacctgaggtcaggagttcgagaccagcctggccaacacggcaaaaccccatctctactaacaatacaaaaattagccaggtgtggtggtgggtgccggtaatcccagctactctactcaggaagctgaggcaggagaatcacttaaaaccaggagctggaggttgcagtgagccaagatcgtgccactgcactccagcatgggcaaaaagagttagactccatctcaaaaaaaaaaaaaaaaattcaatgttattattaattattttacaggatgtaagaaaggatttgagaacagagagacatttcagactatggacataatgacttaacattgtgaatgtgacaattctctaatacaatattctgcaagttctatgagcttctactgaaaacttgagagtttctttcttttaggaattccaaaaatttgctctaaaattttaaggaagaataaagattcacaaatggctaattcaattttggcaaacaaagttaaagaagggacatgcatctcataaaataaaatgacatagcagaaagacatatttaaaaaaaaaaacaaaacaaaacactgtgttaatgttgtaggaactgagagacaaaccaatgacacagaatgaagaatgaaattaaaaacccagtcccatgtgtaaatgagaacttaataagtcaatagggaaaggacagactgtttaggagacagtgttaggaaagctgatccatactatggaggaaaaatcaagctcataaaaaatagattccagttggatccaagaacaaaatctgaatgggaaaaactataaaagtaatagaagaaaatagaaaagactacattttttatccagggagacagaatactttcagatttagaagacacaaaatttcagagaaaaaaattctgaagagttggctataccaaaatttaggatgtcttccaaccaaagttcacaatagataaagttgccataaaaaacagagcgttctcagagaaaagtatctgcaatgtctaaatccaggaaggcattaatacctagaaatacaagcaactcttgcaaatcagaaaggaaaagaaaagaaacccaattgaaaaatggacaacaggtgtgaacagacaatttgaagaaggggaactccaaatggctaacagatatatgaattgatgctcaaactcactgtaatcacagaaatgcaagttaaaacatctacagtatatcactttgcaaccatcaggttggcaaaagttagaaaaacaaataacaccaagtgttggtgagagaatgggaaaacgtaaacattcctattctgctggtacaggtgaaacctgaagcagccactcagaaaaagaattaccaggcaatatttagtgagactaaatgtgcatatgttctatgaccgagcaatcctcctccaagaatgtatcccagaaaaatattgagtcaagtccaatgggtacatgcatgaggatgtccaacacagtgttttggtgataatgggaattttgaagcaagctgaggatccacagtaaggaatggataacagatcaatgtgcatgatgacattttaaaccacaacttttgcatacagccacctggatatatcctacaaacatattgtcaagtgaaaaataaaaaacccatcattaattctaaatcacaacatttacgtaaatttaaaacacaatgggcaaccactccatcttgaaagatattgaggtgtccaaggatttgcgtgaaacaggttggatggatgcaagcggcaggaggaaaaaggcagctaagatgggatggggaaggaaacttgaataaatggagggtttttaatgggctgatgctcatggtgtgtcttaaactaaggagtgtagttaattctacactttgccctgaggtctaatttttttttttttttaagagacagcatctcgctctgtcttccaggctggggtgcagtggcgggaccatggctcactacaacctcaatgtgccaggctcaagcgatcctcccgccttggcctctcaagtaggtgggaccacaggtgtgtgccaccatgcctggctaattaaaaaaaaaaattgtagagatgagatcttgctatgtggcccaggctggtctcaaactcctggcctcaagcaaaccccaaagtgctggggttacaggcatgcaccaccacgcccagccctaaggtctattgtttttttaattaactcacagggtttgacaattacaggagaaaaaaaaaatgatttcaaatgtttctatcaaatagtttttctacatctattgataataatgatttttctataatagatgtagaaaaagcatttgataaaattcaatacctctccatgatttaaaaaataattcaaagcaagatagaagagaattttttaacctgataaagggtatttataacagctttgtagctataaaggtgaccctggaggcagatctgggctgagtgagtcacaggagtgggggaaggttaagcctcccggtcatggtctgttacataaagaacctggaggggagagctctgaagctggaaattcgaggggcacccaggggtcccccgtggtcccagcaacacagaatttcacattggtacatcttcctctcgtagggatgaaccagactttgaatagcagtgggaccgtggagtcagccctaaactattccagagggagcacagtgcacacggcctacctggtgctgagctccctggccatgttcacctgcctgtgcgggatggcaggcaacagcatggtgatctggctgctgggctttcgaatgcacaggaaccccttctgcatctatatcctcaacctggcggcagccgacctcctcttcctcttcagcatggcttccacgctcagcctggaaacccagcccctggtcaataccactgacaaggtccacgagctgatgaagagactgatgtactttgcctacacagtgggcctgagcctgctgacggccatcagcacccagcgctgtctctctgtcctcttccctatctggttcaagtgtcaccggcccaggcacctgtcagcctgggtgtgtggcctgctgtggacactctgtctcctgatgaacgggttgacctcttccttctgcagcaagttcttgaaattcaatgaagatcggtgcttcagggtggacatggtccaggccgccctcatcatgggggtcttaaccccagtgatgactctgtccagcctgaccctctttgtctgggtgcggaggagctcccagcagtggcggcggcagcccacacggctgttcgtggtggtcctggcctctgtcctggtgttcctcatctgttccctgcctctgagcatctactggtttgtgctctactggttgagcctgccgcccgagatgcaggtcctgtgcttcagcttgtcacgcctctcctcgtccgtaagcagcagcgccaaccccgtcatctacttcctggtgggcagccggaggagccacaggctgcccaccaggtccctggggactgtgctccaacaggcgcttcgcgaggagcccgagctggaaggtggggagacgcccaccgtgggcaccaatgagatgggggcttgagagccgcccacaggtgcttcccacctgtgcgagc

SEQ ID NO: 5100 - DNA, 6000 bp, Homo sapiens
aggcaccacaccgaggagctgggtgtgtgggaaggactctgctgggggcagcgaggagaatgcacctgggaggcaccagtgaggggtctcagcagggaggtggcccaggggacgggggagagatggacacagtcaggcagtatctggcatcagggaagtggggaattggaaaaggcagagagtcccacattggaaagatgggaaactggaatgtccagacctcagggctcaaggcagcagctctgtgcctggacttacaggggcctgtagggtgcctcaaggccctaccctcctgcccagcctgcacatgcaccctcccctcctgccctgcagccacccactttgttctcctagtgcaccaatcctttccatcacggggcctttgcacctgctgttcttgatcctggaacactttcctgtgggttgcgtgagcagccacctcctccttctccttcaggtctcagtgtaagcatcatctctgtagaggagcctccagccccaccccagctaatcaggcctggccatccccatggattagtttcttgtggcttctgtaacaaatgacacaaacttagtggcttaaacaacacaaacgtattctagtaagagttccagaaatcagaggcctaaagtcaaggtgttggcagggctggttccttctggaggctctaggggacagcttgtttccttgtcctctccagtttctagaggcagcctgcattctttggctggtggccccttcctcacatcaacacatggcccactactcattctgatctcctgtctccttcttacaaggacccttgcaatgacatagggcccacctggataatccacaatgatgctcccatctcaagacccttcactccatcccaactgcaaagtccctttggccaggtgcaaagtcacatgttctcaggatctggggattaggacatcaacatctttaggggccattattcagctcacctcccatccctccctgcctaccacctaagtttctgtcactatgcctgtttggttttctcaatgcactaatcacaggttggagttcttatgttcagttttttctatttatcacctgctccccatgccccatgtctggttcttccacaattcttttcctagcaccaacattgctggtgttcagtacaaatgtgttgaattaaggtaagaatgaatggatgggtggatgggtgagtgggtgggtggatggctagatggatgaatggatggattgatagatgaatggatggatagacggattgatggatggatgggtgggtggatggatggatgatggatggatggatggatggatggatggatggatggtttggtggatggatggatggatggatggatggatggatggatggatggatagatggatggatggatggtctggtgggtgggtggatggatggtttggtggatggatggatggatggatggatggatggatggatggatggatagatggatggatagatggtttggtgggtggatggatggtttggtggatggatggatggatggatggatggatggatggatggatagatggatggatggacggtctggtgggtgggtggatggatggatggatggatggatggtttggtgggtggatggatggatggatggatggatggtcttgtacttggatggatggatggatagatggtttggtgggtgaatggatggatggatggatggtctggtgggtggatggatggatgggaggatggatggatggatggatggatgagcaagtagatgggtagttgagtgggtagatgagtaagtggatagatggaaagatggacaaattaacaaatgaatggtctaccacatgcaggacagaggataatgtggacttttgctgagattcccaagatgcaccttccagcacagaaaggcccagcctagtggaggaggggaacagagcagaaggagaggggtccctttcactattaggaaagacagctaggccttggttcaaccttttttctttagacagagtctcgctgtctcacccaggctggggtgctgcagtggcgtgatctcagctcactgcaacctccacctcctgggttcaagtgattcttatgtctcagcctcccaagtagctgggactacaggtgtgtgccaccatgcccagctaattttttgtatttttagtataaatggagtttcacgatgttggccaggctggtctggaacgcctgagctcagtcaatccacctgcctcagcctcccaaagtgctaggattacaggcgtgagccaccacaccagccgaatggccctgcacaccttcttcatcgcaggtgcattttactgtgtttcctttgacctggtctgcctctctgttggacatcagctcccggagagcagggaccttgcctgtcctattcatcagcacagagcacagtgcctggcaccctgcaggtgctcaggaaatacctgtagtctttactgaggatggtgctggctgcagaggggccacgagggctggtccacacccaccccctcgtccagggagcagcagggcaaccataggccacagaagcacctggcagggagacatctctgtccagaaccgacctccttcccccaaggatccccccaacagaggagggtccaggcctgcaccctcaggaggggacatggggagaggcgtaggaccatgaggcccttggcaagggatgattaaaaacaaagttctactgggaggggcaggggaggactcctgacggcaagtggtggctgtttagaaagtgaaggctggacgagcagggaccatgccccattctcagcatcagccagagccctgagccttgcagggagggcctggcaccagcgggacacctggagcagggagcggcgttgctgaggtgcatgaagagctctttctcccggctcctcccggcatccaatccctccttgctataaccctgtgggtcattatcttttcccatctgacagctgaggaaaccaaggtccccagtgggaaggaaactgtccacggtcacccaagcctggaggcagcacaggaactccttgcactgggcctctgggcaccaccccacacacacagcccaccactcccccagggggtggggagagacccccagggtggctgctacagactgcatgtttgtggccccaccccctgccctgctgccccactgccctgaattcatgtgttgacatctaatctcctgtgtgaggtggggtgtttgggagatgagcaggttatgagggtggggcctcataatggcattaatgcccgagtaaaagaggccccattgagctccttcgcctgcctgaaaggggtcaccacatggggactcagtgagaggctgggtcctcaccagacgctgaatctgtggaggccttgatcttggccttccagcccccggagccatgggaaacaaacgcctgctccgataagcccctggtctgcggtactgcaacagagcagccggacacaccaagcccacgggaaggggactccacaaactcaggccaggacgaccttcccgtttacaagcgcctctcgcttattttgagagaaacagatttccataccaaataaggcggtggacttcagagcctctgcccacttcacacaattccttttaagtgtccaaacgcaattacacttggaactcgccgggattcagcctcccccggcctccccatgtaaacaagcgttccagctgggccccagctggctgccctggagaggaggggacgggtcaccaccctgcctgctgcctccagcctctctctcagcctcaggcatggcccgtgagcctccaggatcccagagtccctcctcaccccatccctgaaaaacggaccccaggaggccagctgagccgcgcagggagcagtgcgagagtccctcttccacgctgaggttcgcacatggccaggacaagcaggaggcaggcagctcccagcgcaggtgcaggggcagctccgcttctcatttcccttcaagatgcccacagaggcacatctctcccagtctgggcactacactcctgcagggaaagttcagaattccctcgggcttcctggaccctgagaaagttggcccagggtaggaggggagccttctcatcaccccctcctcctggccaccctgctggctcccgcacccccgactctgcacccccacccctaccaatgctcagtgccccaggcatgaacgcgttccaggacccccccccaccgcccgcctccaggggctcaatggggaagggggacctgactcatcctcccgctgagcagcgcaggcaccaggcaccacagcccgccaatttccagcttgcttgccgagcgccgtgattttccacttgcgccatctgattgctattagggctggggaaaagggaattcctggttccataagcccccagggggcccaggccgagtccggggtgggaagggggaggggtgccgcttgggcggtgctgaccacctctgccagttctgcactgcccctccatggagccctcgccctgctgccccccactgctctgtatcagcccctgagtaaattaaaacaacggggtggggactagcccctcctgggccagcctgccccgaaatgcccactgggggcagaccaaagacgccaggcaagtgtacagccggtgctccctctcctgggcagccctgccgagcagcagaatgtgagggagatgaacagctggactcgggctgcagtgctcgggccaacgtgacgtcaccaggcggagagatgagttcccggtggggctctggggggggctcctgagcggggcattccttcctgaagcctcatccccgctcagccctgctcagcccctcctcctactcccctccccctccccctcctgccgggccaggaattgggtttggggcgggttctgcttccaaagccatctcttccagcaggagagggctctactctgagctcctattttccaaggctccgggccgcgctcggcgctggcctgctgccccggcgggtccgccggccggaggcgggagtcacaggaagagccctccacaaaaggaggcctcggcggatcaggacagctgcaggtagctccaggggcccagggtccaggggagggtgttccaacaaccggggctgcagggtgagggccaggcagggaaggaaaatgacgcgggcactgtaggggcagagaggtggacgctgtcggggcaggcagctcccagaaatcctaaggccccaggcagggagccctgagaccccagagaggctgtcactcaccggagaagctcccctgccactcctgaggctccagggttccagggccatggaggaactttaaaagtccccctcccgtggcaggacctgacccctctcagctggcctcacccccagccccaccgtccagctcctgctctgtgctgctgggggtgagggctccctctcggtccctcccccagcctcactggccattcaagcatgcattctagaggggctggaacggaacacccagcaggcagtgtcccacacacagggagatggctccccctgctctcagccctggggtgcacatggggtgtccgtgtgggcagccacaggatgttgggcaactgcagtcccaccttctcccaggcctgcggcctgatgaagctgttggccttggatggaggcggctcctggaatgatctgcaaggtctcagtccccccagacaagcctcttcaatccaagctgttaagcaggggactccagacccggagtgaggaaaacagaggctctgtgtctgggggagcgagacaggcccctctgatggcggcacaagcggctaaggagaggggctgggacagccccagcggcgtcggggctgggtcatggtgggatggagtgaagggagaggaggagcttcctgcgggcaaggctgcaggaggctgacaggtggccaggccacccttgggcttgctccgaggggagggtcaggtgtgagct

SEQ ID NO: 5101 - DNA, 6000 bp, Homo sapiens
cagagtgagaccctatctcaaagaaaaaaaaaagatatttgtctactgtaaaagatttaagaatagacacagtcaaacaaaaaggaagataaataattggcaaaacatctgacttgagaagaaagctgaaagtgtgaaccatgcctgacttggaggagcggtttataatcttgacttaaccatcattctggaaccacttaggtagtgttttggcggttgcctatacccggctcataatgcaggctttctttttctgaataatcagatcacttataggcagaaccattcatttatgtattaaacaaataactactgagtgccttctatggctcaggtaatattgttctatgttgtttaagagcatggtagtgaaaaagacacagcctctgacttcagaggagagtgaaagagacaaaagcaaaacagcccaataactttataatacagaaccttatgtaaaacaacaaggggagactggaaataagaaagctcaacaaaatgcacttaaccataaaaaacttgttttgcccttggtctcatgtcttaatcttccccaatgtgactgtaagctccttgaaggcagaaaccacctttaacatgtctgcatactccctagtacccagctcaatgacatgtccacaataacccatcactaaatatttgttaacagcttgactgatcaatttcactgaaacgaaacgaggctatggaggtaaaagtgtgtttgcattattttttgccttccatggaggtttttggttgttcatctttgcgttaactcatcaccaccaataaataaggatgtctgatgtaccatttaatgcttgctaaacttatgggtaggaaaaattttgagcttctatttcttgacatgcaagagctctgtggtgacaattcttctctgctagctagtggtgcaatggactaagaagggagtttggctctgccacttaataggtattaatctcttgggaactttgattcctcagctcgaagtaagatcagtgttcccttccaccttactcagcaggcgcacttttgttttataactagtttgggtgcagggggagatgtaacaccctatttataaatggatggaatgtggcatggcatcttcttgctttgcttttgttgttccacagtaaattcccaatacttatggggttttagtcccagtgaattatttccctcaaaaaccaggcagataataatgaaccactttcttgcactttccatcaagacagctctttgtgagttctaaatgttctatctagattcaaagaagctggtttcttcatgagtggttggaataagacttttcttggaagctactgaatatggattagttggattgtttcataggaaataaaaagcaggctctagggtaactacttcagcacttaattgggttagcaaagagccgcaaatgagagattttcccgtaggagggaaaggatgtttatagcttccacccccttaggtgatgcattttaacctaaacattactcttccaatgcagcctttaatttagtaagcattacaagaatctattagagcagaaaacgtcaggttgaaaaattaacacatcaccggagttaataagaacccagcctcttattagatacaaatggagagccctccaactgcccaacagactgttgaagtcatgtttgttgcagctccaaagtagttgaatctttactgctcagaggctggaccaaggaaactgcccaggcactcaagccagagttagcaggggcccatggcctacactttattcaggtgtccctatcttttcctctcagaaatgctgtgcatgtcacagggtggatatccctctgcctgggactccctcgggaagtgttttctgtaacaaagacaaacatgccatgcctgtcaccaggggcagattgtggactgtgtaaaccactccaggagagggaggctgaggggctccaggccattcagatttagctctaagttatggtctttgttgtctttccacattcagactgaaatgtgattcccctagctttcttttttggaaaatactggtgatgagttccacgactagaaagaaaagctgttgacagaaaaagcttctgatagggaaggggcttcttcatgtgttctcaaaggagacaattgcttcaagcaagctgaggcaggatgccaggtctaggaataagaggtccagatcacaaaatggtcatctttaactatggattaggctgggcgtgaagcagtttcctctgcaagagcagtaccatgcacacagagtttagggccaggcagacatgcatgagttcttctctacgacttactgtgtaatcttgggcaaactgcttggcctctcagagcatcagtttctgcaagttgtgagaaataaataaaattaagaatgtaaggcatgtaacacagtgtctgaaagtaagagttctatatgagtggtttgttattgatttgaaaacagtattccttcacccagaacaaatgatgttccttgtgtgccaggccctgtatgagggacaggtcctcctccttgacctcagggagttcactgtttaataaaccatgtaaccatatcttcagcacaaagcacaccccaccaccaccactcttccctagaagaagggccaattgcatactaactacactttgttgagtagctacgagtcttgcaggtcatccccctttgagtagccctccagactcagccacttctaccttcaattcacccacaattctctatctgtgcacttagcaaactaagttattgttgtttgttaatcctttgtctcctcctgtgagatcctaaaggatgaggattatctattcatttgatctgttcatctgattatatattcatctctgtaacccaaatgattaatagatcatttgatctctacatctgatcgtttattcatctctgtaggccaagggttttatgcattactcagcacaggcacacagagattcaatcctattgctgagtacattgatttccagctgggaattttttctgggaaaatagccctgccttccatctttgaagagcctcttctgggccctggtttggttggtcttgtcattttctattactgtggttctagcctcagtttcctaatctctataaggagctaacggaacctccttcactgggagtttatgatgatgactggagacaatgcagcttctccgtgtccaacacagttctaggcacagagccaaataccaaaaaaaagttgattccatttttgccctcagtcaagtctcgttgccaatataagaagactaaaaatacaagacagaatatgagtgtcacatgagtggcacagacattcttccaacttgcatctagcctctgccatatgccacagaattggctgaaatgggaggataaaaacatgcataaaacagtggcaagtgttggacaaaaagatctcaggaagagggtgaaaagccttttacccagatcctcattccggggctgctggagctgtctttagcaccaggctggaaagcaggaggctgtcccataattgatctcccctagctgttttggaaacacatacacacacacacacacacacacacacacacacacacaccccaatcaccaagttcttcagcatttattatgtgtcagacactgctaaatgatttacaggtattatctcactgaactcttagaacaactgtgtgaggtggatatgaacttccccactttacagccggccactttgaggctcagagaggcaccatagcttcaacacagtcaagcaacaagtaaacggtggaggaatccacctgctgggagtttactggccgactggaaagcagagagagggtggaccagcacaaagccgcggggggctggtaatgagacaggaaagttgggttcaaacctgggtcacatgatccccagatccctaggagccgaagcagaagcaaagaaaaaaaggggtgcagcctggtggggagggggtgcccgggaggccgggagagaggagtcacggtggttgtgcgccttcctcgtccccagtgcacaggtcaagcctctcccctcccgccctctcaccctcccaaccttatttagaaaccgtgtccccgagacaggaagggcggcgggccgagaagcacggagagtcccggtctcatttcctttcgaatccccctgtggaatttcatttcatacggtgaggaaatcagagcgcgagaccgtcggcgggtctgcagctccgcagctctggggcgcctccccgctggcggctggaggtgggcggctccctgcgcaggtcgggcgagtctgggggcggggagaggccgggccccgatcgccgctggtccggagtgaaaatagctgtggactcacgcagtaccaggcaccatgctaagccttctacactttatctctaatcctcccaagtgactttacagaggagactgacgccgaggggttgagcaatttgctcaaggtcacacaaccgggactgaaagccacaatcggtgtaaatccaaatccccaattctttgtgtacgtttctctgcctgacggggaggtggccaccggcctaggttacagctgaaaggagacaggaaggaaagggggcagatggaacagggcgcacttctcacctgcagaagggggcaggacggcgtggctggagccactgggctgcgtccctgcttggcccctgcgcgcctagatccgggtgggaggaaagcaagagccgggaggcgggcggggcggggcgctaggggagggagggagggaggggcggccggaggagggggccggagggcgggggcctgactcctcctgcgggagagcggccccgccccgccgcctcgcccctagctgcccaccgcgcccggccattggagaggcccgctgtccgtcccgccccgccgccgcgccgcgagcctccagcgccgcgcagggctccggcggtgagagctgcgcagcgctggctgctggctggcctcgcggagacgccgaacggacgcggccggcgccggcttgtgggctcgccgcctgcagccatgaccctcgcagcctgtccctcggcctcggcccgggacgtctaaaatcccacacagtcgcgcgcagctgctggagagccggccgctgccccctcgtcgccgcatcacactcccgtcccgggagctgggagcagcgcgggcagccggcgcccccgtgcaaactgggggtgtctgccagagcagccccagccgctgccgctgctacccccgatgctggccatggcctggcggggcgcagggccgagcgtcccgggggcgcccgggggcgtcggtctcagtctggggttgctcctgcagttgctgctgctcctggggccggcgcggggcttcggggacgaggaagagcggcgctgcgaccccatccgcatctccatgtgccagaacctcggctacaacgtgaccaagatgcccaacctggttgggcacgagctgcagacggacgccgagctgcagctgacaactttcacaccgctcatccagtacggctgctccagccagctgcaggtgggcgcccccacccccacccctggcgggaccccttggggagggacgctccaaactaactttgcagagcccatgccaagttgatcatcctagcccgaaggagacagctctcctggaaaagtgatttccatccccacccccactttctcagggactggaagccaaaacgttgtgtaagtcatctggcctgggaaagaacccactcttacaccccgcccttccgtttttctctcttgcccacccatgtctggcccagacccctaaccccagtggagctgagggttatctctgccaaggattctggccgccactgctcggtgggcgagtgggagggagccagctgcagctaagacttggagggagtgataaggagaccatccttcaccgaacttccttctccccactatttttggggtgttattaaatgaaacactactgcacctttttctg

SEQ ID NO: 5102 - DNA, 6000 bp, Homo sapiens
aatagttgcaacagctatatctaagccattaagagcataattgtctcttatatatatagtgaaacattcccagcaattctattaagcaatgagtctgaggttctgtttggaatgacaaaaacttctgtatacccttggtcatttacacgcagttcagaatactgctgccattttacttaacctattttttattgtaagtgaaaaattttactatcttttccaaaagtattgatgaagaattactacaagacctggtcttataatttaaatatatttacaaagagatgagctctactagactagaaagtagttttcaaatttccaagtatcttaaaaagtggactttatgtcccaggctatgtttagtgtcttggtcatgctaatgtgggatgtaaataactggaaattaaagtaaacctatcctcattcccatcatcatcatcatcaccaccaaataccctgtacctgccacatttcaaggactgtacaattgcttcacatctattattatttatcttagcaacctctacataggtactattattcacattttacagaaaacacaaaacaagaaatttcctgtcaacataaaaacagaatttagaaaaggattttcttttgttatacatgacccttcctagtaatccaacaccgttattcaaattcttgcctatacatcacattgtactggaacaaagagagccatattgtgaggaaatgtgagggaaagaaggaccacgatttgctgagactttatagcacttttgatttccagagtgactttatgtataacaaagaaagttaagtattttttacatcacctttttgattttcccatttccagataaggaaaggaggttccaaggttcagcagcttttccaagtcccctactcaagaaacagccaaaattcagtttccaaatgcaatcagttaggactgaaatccagtggacattctgcctcacccttggataagggctctgtgtcttcacctgggatataaaggaagtcctttgccccttgtgatgagacagttacacatacacacacacacactatattttgtgcacccagagtgaagatgaatatctctgtgtttgccatacatgtgtcaagagtctgcttggacagaggacttcatcttggaaaacactgtctaaaggagttgtagttcaaaagcactaaaagactaaatacatttcttactgtattttttaccaagtatcataacaaaaattaattcacagggctatatttataggtctgtcctccctgaagaatagagagatgaataaacatagattcataaataacagcttctttgcattaaatttccatggtttgtctagatcttaaattgaagctttatataagagtgcgtaatataaacaaggttcctatttttgctataaaatccctgttgaagacattgagtttttagggaccatgtatataagggtctatataatagtactagcatttagtaacagcagcaataataaaattctttctatgaacagactaaatttcttatattagataatgatataactaaatattttctggtaaaccactttagtcaatgtgataggagtatttgtcatttcctttttctgcatggctttctttttccattcttaataacatatataattgactcattcacgtctagaaagtttgcagattaaatttagtaaataaaattagataaaattaccttcatttgggagttgaacaagctgagctatagttaaggtttgtcaagctctacttcatctaccccgatgtcttttcagtttctaaagcacagcaaatgttgttctgcctcagagtttccacatattgttccctctgcctgtaaacccccttaattttcttcccactctttgatcagccaccccttgttgatcacatctcttaactcaaacagaaacatagacacatgtcacattttttgcataataatacacttttttaggtcttgatttaatatttgtcttagaattatttttaatgtccaattaaaacaagataccaggccccctcctcatgccctgctattctttataactgtaccttgttcttcattgtatttcccataaattgtgacacatcagttagtttattcacgtgttccttactttaagcctcacaggacaggagacgaattctatttcatccatcattttatctccaacacccagccattcctggtacatgatagtttaataaatatttaataaatggtatgaatgaataaatttaaacacatatgcactcacacacatgtatgtaataactttaagttttctaaggccaagtaagtatatgttaatattttgtgtatcattctattatagtgttttgtacagtaactggcaaaaaataatagcaataataaatgtttaatgagtgttcattaaattgataaaaacattcaaaaatttttaagccacttataaccttttatttaataagctcagataaccacatacttgcaaaacatttagaatttgtataacccccttgaagtctagaacatgagctagctaagtctgagaatcacaaatgcaaaaacacaatttaagaagtgggtaagtgtgcccatattcggaaaaggtgctgtcactcagtagtctttcagacctcctgcaaacattcacatgatttaccatcagtgttgccaacttgtacaatgaagggcagcatataacaggtatacctctattttcataaatattcatttaaatattctaaatatttattgagaggacttaggcttttactcagtgaaatcagaagttactggagagattcgatttaagataaattctttaaaagatcactctggatgctgtgctgaatgtagcctgtactagtttggaatttattcctgtaaggcaggtaaaagatgatagttgatggattcaacaggttctctttgaaggtggttagaagtggtaagattctaggatatattttaaaggcagagctaacaggatttcatgacaaattctcacatataagaaaggacagaaataaatggagatttcgagttttaagcttgatcaattctgagaatgaccgtgttttccattctttttttctactgttctacataagaattaaaatattttgttcattaatagatcatcctaaggcaaaatttatacccttgagcaatttataatcagaacttactattggaatgtaaaacattgtttctatattccttttaattttaattttgcctaattcagcactttacaattgtgagatgaagctatattttaaaatgtcactgagcaattttaagattatataatcacattttccttctcatctgaaaattttactattgttcaacatggagaatgtccttcacattttagcctttagagcataggaagtcaatatttattggtaagtaggtattacatttgtggagtgctttgtcattttttttgacatgctttgacatgtcttatgtcatcccactctcatcatcacactggaagacaggagagaaggaaatttgtgtaggaaattgaaaagtttaagtgactgagtggccaacatgatatctcctcctttcccattcactaatgtattttgatccagctccaactgttggagaaaaactgggagcttggagtgccctatgctcactcaaagctaaatgtctcatacaaaaacccaaatttgaccttatctttattgttaacgcttcagaaaattggataaacaaatcactgtattcatcagacttaatcacatcaccagagtcatctagtcatgtcaccctccattttcttgcgaactcactattttatgtattttctcacctatgccatctttctattttctcatctatgccatctttctttctttcttttttaattaaggaagctcactcacagctttcctggcctctctccaaagtactaaaacttgttttgtgaattgcagtcaaagaaatacaaaaagtaacaatgatcccatcagtagacgtgaaaatgcaagaagaaagatgccattgtaaaacccaacaaggtgtggtagatacatctctttttcttgttgttaaatcctgaagctatcaaacaaaaacttaccttattgacaagggtctagtggaaaatctaatgagcattagtaatgaatgcaccagcatcaatccccttgtctgtagtgcactcatcttttaatctttgacccagctgctgcaagcacctggttcccaaaattcagctagggaaatacaatgggaataataatcatattactgcaatgtctttcttttctttaaattaagctatgcaagtaatttataccaatcgccttttcagaggcagaaatgaagtctgcttttgtacttaaagataacctcagcatagctgacaatcctgggcagttatgggggtggtgaaggaagggaagcaaagtcatttgagaaagtaaagacattcaactgccaacgaagaataaattttaacggatgtaggaagaatcgtttgtaagaagtgcagaaaatgcaaaatggtattattaataagtaacatcattagaggccgttctttctaaccagtcacacctctgaatcatctcgggcttccctgacttcctagctttctgtaccctccagcagtgacgccccttctcccaatcattgtcaggggtttcagtgccatagtcaaaaagaaccttattatctacctgctcccccagcttctctctgagtgacacaccacccacgcctcctccgcacagctttcctcctcccatggctcccagagggaacgtgaggagcaggagagagagaccaaggctaccctcgcctgaaccccgaaacgacgaggctttaagacccttattcacccactgagtctatgccctggccgttctgccaacccccgccgcgcgctgcgggagtataagccagccctgcgctgcgcttccagctgcgtctgcccgagcgcggcacgtgctcccggcgctggcgcgagagagcgagcgccaccgccgcgggccccgcagccgttctgcctgctgtcaccgctgcctccatcgccgacactagcgctccagctgcagccaaggccgctacgagagcgcaggaagccctcgaggagcggctgcctgggggcgcaaggctcagggcgcgcacctggtaagcacagcgcctttttctttctcttggctatagttaccacggatataggataccgctggagcccctcccccagtgcagggatggagagcaatcaagcaaggggcgggagctggggctaaaaagacccaggagggcaagtggtgggcaggtggagggctggtagagccaggaacgctacgaggtcctgcaagtttagaaaagtcaccctgcaaggacgtgtgctgtgtgaatcagacataaatttaagtcaggagcctgggctaccgcggtatcgctccaatgggaggtttatgaagatcattttgcttttatttgcataagtgagggatttaagtgggcttgtttccatagaaaacgaactaaaaaaaaaaaacagaggaggaaaagataaagatccgagccaaaggatacgtttggatctctctctctgtgtgtctgtctctctctctctccctctgtctgtgtgtgtgtgtgtgtgtgtgtgtgatgccaatacatgtgcacgaaaggcaaggatttaggaagagagatgggctcctctatctttgagcccattaggtgtttgagggagctaatggcagttgctggtgcttcaccccaaaaagaggcagcaaagaagggacccgactgggtgtaaatgtcagtttccgtttctaaaaggactacagtactaggagggagaggttttctggaactgtgggtcatgtaaagatggtacacctgcagctctggacctataaactcaagttcatatactcccagtggagcttggaagacatgtttactcttggttcctttatggaactttggcaaaaataatatctctc

SEQ ID NO: 5103 - DNA, 6000 bp, Homo sapiens
tgtgagatgaccacaagattctaaccatggtggacaagtgaataggaaaaggagcaagtacaagaaagtgagggaagagcaggacataatgaattgagtttggagcttgttgaagtgggtgggtattccaggtcataatgtccgatcaacagtgaaatgttacataatacgggtttggagcttttaacaggtggtaagtgaggtacagatcttggagtcattggtgagtaatggatggttaaaccagtgaaggtggctgcgatcacccagggggacatttaattcaagaggagcagataatggagcataacatcttggagccctgaactttagctagcaatgctacgataaatgctaccatttatccgtatatgggttaaatgggttgttggagttggcttaagaccctagccaccatttagaaaaatttctatgtagaactgcagagtaagttcaagcaacttagaatttaatttggggccacaaactgaagttggagcttggttgtacttctttttgcatatcctaaatatacctttttactctatggctcagtgtgctggaacttggaaagcaattcctagcttagcctgcctacacactttgcatttttattgcatttgagcatatcttcagctgtacttggtatttcaggcttacttggttcatttgtaattcaagtatgatgacatacaactggtacaattaaactaggattgactgtcatgtgcctggcattgtgttgaactgctgtttgttcccttctgccactgtgattagtaccataaggaaatgtgagtgtggtgagtttttaactcaagtagggccttttcagagaataatattggtgataaaaaggcattgtttgcagcgtcaggaatactgatgtggtgagactctcaaaacctctttcgtaggcctctatgtgatgttacagtagtctcactttatccaaggtttcgttttctgcagtttctgatgaaatcttgcaccaccctactctgtccactcaggatgtgaatcctccctttgttcagcatatccatgcagtacctcctcctcagtcactcagtagccacctcagttgtcagagctcccgtcaaggtattgcagtgcttgtgttcaactaacctttattttacttatagtagccccaaagctgcaagagtagcaatgctggcaattagcatatgccagctagaagctataaaatacttcctttatgtgaaaaggtgaaagttcttgatttaataaggaaggagggaaaaatcgtaagctgaggctgctaagatctgtaataagaacgaatcttctatccatgaaattgtgaagacggaaaaagaaattcatgtgtagcctgtatagggtttgatactatccacagttttgggcatccactaggaatcttggaatgtttaccccatcaataaggggggactactgtgttctataattcttggtctcatttttattaaaatagtgtgaagtggtttattggtttttttgtttgtttcaagtacatttgagagagtgaaaccctctgctcttttctgtgtttactgtgtgtgactattactagagatctaggaatatacttactatttggcacaaactgactattcagtgtctttggttttatttgtaatgtacaaaaacaagaggttggttcactgtaagagctgcttgtatcttcctgtaaccacttagtaagagcaacagtgatttacagtgatttaccataacgcctctgagaaaagaactacttttaataactcagccttcgtgtgaggtaaggtgaagggatattcttgtttcattaaagactgtgacttcggccgggcacagtggctcacgcctgtaatcccagcactttgggaggccgaagcgggtggatcacgaggcgggtggatcacgaggtcaggagatcgagaccatcctggctaacacagtgaaaccccgtctctacaaaaaaatagaaaaaattagctaggtgtggtggcaggcgcctgtagtcccagctccttgggaggctgagacaggagaatggcgtgaacccaggaggcggagcttgcagtgagccgacatcacgccactgcactccagcctgggtgacagagcgagactctgtctcaaagactgtgacttcaggagttcaggataagtttgggacagtggtgctgggctaagaggagggcttggcagggctcaggaggcccaggcctggctgagtggagagctgaatgcctggggaagaggaagaggaagtgattccagacctcatgcctacccttggattttctcaggaccgcctcccccttcagagcacaccagtgcaacttgcaactgccagcagtagcatttatttgcctgagcccttgttttgcctctggagcccattttggctatccacatggcaggccagaagttcaggagcatcctgggagaaggagcagacccctgggagaagccttcaaccagtgactaacaggaggtggagtacagataccacagctctgtcaccccttggcttggatagctgatgtgtacaccttacactggcttcccagcaggcttcagcttgtcacccacagtggtagctggcttgacaaaactctattggttgctttccctttcttgtcacacttctccacttccctattggtgtttgccttcatctcccaaatgaaccctctcactagagtatttgtcacaggagatgcttttggggaaagctaagaactaaaacacctcacctctttcagaaagaaagtttcaggcttctggtgtaaatgccctcacacttacaaggtgggcatgatgagcagggaatcaaagtgaagacattagttaggtggcccagattacaaatatgccggctagcaagcaccttctgtggtacttggaagagagtgcttggaagggcactggctacctttgatttctttctctgagcttgacgctgactattcctcttctatccatacactctttgttgacactgggcacagtcaattgactaggattctgttttctaaatgaccatcatattccggccttgcctctcaagatgatgccaggtcatcttgatggagcagcaagtctacctaagcttttttctttttgagacggagtctcgctctgtcgcccaggctggagtgcagtggcgcgatctcggctcactgcaagctccgcctcccgggttcacgccattctcctgcctcagcctcctgagtagctgggactacaggcgcttgccaccacgcccagctaattttttgtatttttagtagagatggggtttcaccgtgttagccaggatggtctcggtctcctacctcgtggatccgcccgcctcgacctcccaaagtgctgggattgcaggcgtgagccaccgcgcccggcccccaagctttcagtgtttacaggcagtctcttggtttatttcctggagctaaagatgtattatttcatcggcctagcaccttgtcccttctaggatctgtcacataatcccctatttcagccatttaatcctgtgagacctgccaggtccttcagtataattgagggttatctgctagccatcctttcctccagacacagttgcttgaagagtacatgtgaagtggaaaactggagacaagagtaatacctaggtttgagtcattgtttgggtcccagcccaaggacattgctccccagggcacgttgacacaatgtaaagaatctacatggtgtttcctgttgggggtcaggggtggttaccagtagtcaaccagatattgcatgtcttgcaccagagggcaatgcagtgagagatgtatacaggggtctctgaaaacctcacatttaggaaaagaaagccttttaaccaaggccaaaaatgttaaatggcttgcccaagatttcacagctaggaagtgacaaagctgggattaaaccctaattacagagcccatggtctttactacaggcttgtgggtggcagaggacccagtgactgggagagttttcacagtggaagtgaaaacgggtgagcaggatagcaaggtttcctgaagaagtagatggggaaggaaaaacagcatgggtcataatatcccttaaagatatagcttcaaggacttccatggcagaaaaattcaagttacccaagaggtgagcacacagctaaacttctcttttccttcgcttctttgatggtatccgaactgctttgaagagtttccttgaaaaacaaagctccccagattgcattcctgggggctgtcaaagaaactgtaatcctttaataagccctccagcacctctggtatctggatactccggggacttggagaatccttaacgtctctattttttggtttgcctttttcctgggaccgccgggacgcagcgatccatttcgatattgaaactgtgccaaggctaaggcttaggtggaaacaaatggaatatatccttgtcactgacccggctttgccagcatgccccctcatcatcccaagtgcccctgtgggcttcctcccacctgcctgccctgcttcctttacaagaggctaagccgacaccacgcgagtgtgtacgcgctggggactgagcccccgaagcgaagccctgtcggaggagtttcaggcgggagtgggaacggctgggcgtggggtcagcaacggcgccacccggtagggtggggggagccaggcttgtcagagccagagcgcgtcaccgtcgccgcgagagacgccgcgctgcccaataggcagaggcgctccctagcagcctggtgggagcagagatataaaagtgctccaacaaacccggagctggcgtgccgaccgcgggctggtggcgggcggcgcggtgctccgcgcgtccgggctccctggctcctcgggacggccttgtatgctgtgcgccccgcaccccggctgcgcgctccgatcccagcgggaggggacgcccggcccgcaggctcccaggggaggggtggctcctgcaaaatggtccctcacctcttgctgctctgtctcctccccttggtgcgagccaccgagccccacgagggccgggccgacgagcagagcgcggaggcggccctggccgtgcccaatgcctcgcacttcttctcttggaacaactacaccttctccgactggcagaactttgtgggcaggaggcgctacggcgctgagtcccagaaccccacggtgaaagccctgctcattgtggcttactccttcatcattgtcttctcactctttggcaacgtcctggtctgtcatgtcatcttcaagaaccagcgaatgcactcggccaccagcctcttcatcgtcaacctggcagttgccgacataatgatcacgctgctcaacacccccttcactttggtaaggggcccgctgcctgccgccccaccttctgtcttcgtctccctttcctctctcagttctctggcctccctctgccgttctgcgtctccctgtgggtccccacttctctctccacatctctcttcctcctcatttctcctctcctctgcctctgtcttcctgtcctagtctcttttctccctcctctgtcatctcggttcttgtatctctcctgtttttcttagtctttctttcagtctctgtctctctctctgaagtctttctgtctctcttctctatctctcagtgtcctcatctttttttttttttttgtctttcagcctccctattcatctgtctctgtctcctcacctgttatctctttttcttcttgtcagtctctctgtgattttatttttctattctctctcctctcctctcctctccccacctctcctctcttcctctctcccctgcctcactctctgatttctccccacttttttctgtctcatcgccttatcagccagagcttctgcggcggtggcattgggtcaatggtttgagtgtctgcagccagctggaaatgaatgaccatttcctgtttaatctcactgggtctgggcttgct

SEQ ID NO: 5104 - DNA, 6000 bp, Homo sapiens
aatatattaattctaaatatatatatataaatatatatataaatatatatgtgtgtgtatatatatatatatggagctaaatttaggcagaggtggtggtggtgataagagaatgtggtaaaagaaagctttccaggggaaacaacatccaaggaagaaacagcggtgaaaagcctaagacggaaaagagaacgtgtggcatcctaaacagtgctttcctcaagaaaaatatctactgaaatgagaacatgttcatgatagcaagagatataaaaaaccagagtaaaaaatttcccctggctcaaagaatcagcaggaaaggttttgagatgtgtgaataatgtagaatcatagaccacagcaaaaattaccatgtgggaactacaggtgctgaacactttcagctgatgagatgtggaggatatcgaagaggatcagggcataagaaatgaaactaatgaaatgaagctaggggcaagaattcaatcttatttatcattttctatggtcctattaaaaacagatctcggcttttttttttctggtctttatcaccctatcactaaatatatgcagttgcttcttgatttttcagtgttaggcctaaataaaaagtcaactggttttcagtttaggatatcagaattaacttcattttttacctcccttcaacacaaatatactttctgttctctttatcctcccaatacagtttattttttgtagttggattcatattcagtgtttacataattataagaatgtaaatgctttgcttatgtaagtactgtaatgtgttttgatcatttttctttcactacctttgttctttctagaataaataatggttttggtttttcattcaattttctatgtacttataataaattcatcttaacactctctctgttgtttaaatcatctttccatacttacaaaacttggtgttcgaaagcaaatatacttaacttaaatataataaaagtttccatgttactcatatagagtttaaaataagtttttctaaatggagggcagctccataaagtaataaacttggacccaagacccttttctcatgttgctatgtcatctctaacacatgctcttctgcatcagtgaggccaaagagggagcatcgtgagagatgatggaagtgaagtttttgtgagtttggaacggacacacttaacttttgcttatgctccatggctagaactcagttatggctgtacttaagcaaaagagactctgcgaaaagtattctagttttgtgatcaggaagaagataaaatgagtttgtgggacatctagcctgtccatactttgtatgccttgaccacacctggcatgtcggaaagtgtctttattttatactcatatttcaatgatacagtaacattcagtatgtgaactgccaattatttccctcagttttagtatagtacttctccacactcaagtgccttctattctagagatgtttcatttttcatctctgcagaataaacctccagtcttctgctggggtgtaggaggatcactcttctggatgcaccgagtagaagagagaatctggggatctgcctacttctgtaacagactttcaagccgccttcctgtttttatgctcaccatcacccctactttcagaggtgagctgtgccaccacattactgagcacgtgagacacgctatggcgtaatctggatatttgcttccactacggagctctgaattcagctttctggggaccaccgagtcagttactgattatcactgtgccttccagctttctgatttttttttttcctgctgtctttcccctgtgttcttgtcccagtaagttaatgaaacatgcttgttcttctgccttgtaatgccttcattaacattttagtgggctttcagaaagtagcagtggttaaaatggatgagttcaactgtatttctctaacccaaagtcctctggctaagtctctaaggtgatgtctgtgagcacacaaagcctgcacaattctatctattggcaaaaacactcctctcctgagctgatatacctttgcttagataaaggatccttgagatctaaactccacaagtaagttatctgattattttggaaggtttacttattcatttcatcaaataaacatctgtagaggatttaagtatgaagattctctgaacacaaaaagagataagatacagatttgccctttggcctaattgaagaagcaacagaagaaactgagaattgcacaactaatgggtaactggtgttaacaatgctaagctcttttattaacttaccttttaaaatctctacacaagtatctctgttttacacaggtatcaaccaaggcttagcttaaatgcttttgcccaagttgcaaaaactagtggcagagccaggattcaaacacagatctttcttaatgtaaaatttatctctgttacagtgctatacataaaaatgaaagtaagcgctgccacagaaatttgtacaaggtacaatagtgccatatattaagagccttttcattcgaagtgattgcttttcagtaattactttcggtaattcagatttaacaaacctgagccaaatcagtttaaacaaaaaagttcatttaatgggaaagtccaagtaatgcagggcaggcgagcccctacattggggcttaacctgggagaattcttggcttctctcagaaaagaattccgagatgagccagtggtaatagacagcagcttttattgaagtggcaatgtatggcagcagcagaggtactgctcctctcaggggcagtgtgcactgtgcagcagctcagaggttgttctgcagtcctatttatacctacttctaattgcatgcaaattaagagacaagttattcagaaatttctagaaaaggggtggtgacattgagtattgccatggtaatggtaaattttcatggcactggtgaacatgtcttatggggaggcgccttccatgcctctttcctgcttcagccagtcttcaatttatatgaagggcagctccctaaaatagtagatggagtcgagtcctgcctcctagggacacattttgcttcagatttgtctggatccaaggggtcacagggattgtgcctctttttcaatttttctgatgtgcttggttctatgtggctttttcttagacagatttcttcacctatagacaagaagaccccattctgctccttatgaacatgtgtctccacctttattactctcagccatggaaagagccacttacaataaaattttcagaaaaataggacaggagagaatgttctcaatttagcaaaagaaacttattaaaaaactacatcttacatcatagttaatggttgaagactgagtactttccccaaaagactggaaacaaactaagattattctctctcctctatgtttggtgaagagcctagcttgttgaaatatgacagaaaaatgaaataaaatgccaatggattgaaaaggaagaggacaaataagcattgttcacctaaaataattgcttatgtagaaaattattttaaaaattacaaaacaaaaataccagagctaaaaaatgaattcaggtctcaggatacaacgtcatcaaacataaatcaactgtgtttctatatactggccacaaaaatttggaaagttacattaatacatacatcatttatagtagcatcccaaactaacttaggaataaatttaatgaaagatgtgcaaatgtctaaactgaaaactttaaaaccttgctctgagaaagaaaaataatatgaataaatgcaagatacatgatattcatggaatggaagatacaatgttattaacatgtccgtctattagatctgtagatttaatgcaattccagtacacatattgtatcaatatgttcaaaattctcagaaaaattaagctttaaactggaggtttaaattaacttttaaactggaagttaaaccctaccattgccaatcaaagaagaaggcaaaaaagaggcaatttcagacaggcaatttctataaaatttgtatttcatgtacattttctctagaaattaatagaaaaattttcaatcaaaatgaggaagaaaactattacagttgagaggaatgtaaggagaattgaaaattaaatgtaatggggtaacctggatgacctggcacagaaaaatgacattaggtgaacactgaagctatataaatacagactttagttaatgaaaatgtaacaacattggtttattaattgtaataagtgtaccatactaaggtaagatttaatattaggggacatgagagtggggtatatgagaactctctgtactacgttctcaatttttctataaatctaaaactattctaaaaaatgaagttcactttaaaaatggagagagaaatgaagaaacaggaaaacagaatctagaaaacaggttacctaacacaggtatgaggtgaagagaattcccagaaagatggtgacaagagatctcaaaatgttagattttcaacaaagctagaggacatcccattaaacttctgatctggtagtagatcacaagtttcttaggatgacatttttgagaagatgaaatttttgaaatatcagctaacatcatatggctacaactgtatatagtgagaaaagatatatacaaatggagaagaggtcatgaggataattcaaggaaatcatagactatcaaagcaaatgagagcccccaaaaacatttgcttcatggaaaatgaaaaagaaataaaataaaaatgattctggtatctgatctattatctgtaaatagtgtttaaaattgtgttaataatgcaactactgaatatttatctaaccaaatttataattattataagccatattacaaggataagattgtgcgtgtgtgtgtgtgtgtgtgtgtgtgtgtgtgtgtggtgagaaggaggttacaaagaacaaattcttttattccataagaacccacattagaaaatcaagtgtaatccaatcaggaggtgaagagaggcttacgaaagcaatgtattagagaggaaagaccagagcaagattttgaagagatagcttctctgggacatgaagcctggatgaagaaggtgagtgaggagcagatgcttaaatttagtaacctgggtggtcatgaaaataatttagacaataatgaacggagaaggagtggttctggaaatcataagaaaatgctgactgcagtttgggacactttgaacttggggcacataaatacacataaaataaaagtgttcagggagcacgcagggaaaaggttcacgttttatatatataggcgaatatgaatgaggagaaggagaacaaacacttaccagactctttccatattccaggcagtgttctaatactttccatgtactaaatcatttaacccccacggcaatcaattactattctcattttacagaggaggaaacaagggtcaaagaagttacataacatctaaaatctcacaggaagtgcagaaatagtctagatttaaattgaggcagtctgacttagctacaaagtagctacaaagacttagctactttgctacaaatatctttatagaagagaaatccacaatcacatatggtgtcaaagctataatctacgattttactaacacaatcccaaaggcatgtaggaaagtagaaatggcaagtgactgtatccctggactttccttttgtagcactgtgcatagactccaggggaaaatgaaggaagtgacaaagggagcattcactcttctgcattggagattggatttcccgacatgaaattataaactaagtaagaatgctgagtacagaaggatccaaaggtaggtctatgacacaggatgtacacacaggctcagtaatgtaaacctttaagaggctcatccaactttagaggaaattgcaatggaaagaatcattctctgggctttgaatcactttct

SEQ ID NO: 5105 - DNA, 6000 bp, Homo sapiens
gctaattttttgtaattttagtagagacggggtttcaccatgttagccaggatggtctcgatctcctgaccttgagatccgcccgcctcagcctcccaaagtgctgggattacaggcttgagccaccaagcctggcctgttgtggaggatcttctatacataagaccatgtcatctgcaagtagaaatagttttcttttccaattttggatacctttaatttctttttcttgagtaatgctcttgctagaatgtccagaacaatgttgaacagaagcagcagcagtgggcatccttgtctctttcaaaggctttttgtttctcaccattgagtatgatgttagctgtgtttgtattttgtttgtttgtttgagacagtccccctctgtcattcagggtggagtgcagtggtgcgatctcgtctcactgcagcctccacctcctggattcacgtaattctcgtgtctcagcctcctgagtagctgggactgtaggcgtgcgccaccatgcccagctaattttaatttttgtatttttagtggagatgggatttcaacatgttgggcatctggtcttgaactcctgatctcaagtgatccacccgcctcggccttccgaagtgctgggattacaggcatgagtcacggcgcccggcctgatgaagtttgtttctattcctagtttattgagtcttattatcatgaaagggttttgaattttatgaaatggttttttctgcatcagttgggatgatcgcgtgggtttttcttcattctgttaatgtggtgtatgacattgaatttcgtctgttcgttcacccttgcattcctgggataaatcccactgggttatggtacataatccttttaaaaatgctgtttttcggccaggcactggctcacgcctgtaaccccagcactttgggaggccaaagtgggcggatcatgaggtcaggagtttgagaccagtctggccaacagagtgaaaccctgtctctactaaaaataccaaaattagctgggcatggtggcacgtgcctgtagtcccagctgttcaggaggctgaggcaggagaatagcgtgaacccgggaggcagaggttgtggtgagccgagatcacaccactgcactccagcctgggtgacagagtgagactccatctcaaaaaaaaaaaaaaaatgctgcttttctggcaggcagcactttaaaagggactgtgtttgctcatattttttcgagaacttttgcatctatattcataaaggatactcatttggaattttctttttgtgatatcattactgttgagttttgagaattattaatcttttttgtatacaagccatttgctggatatatgattgctaatttttaaaaaaaatttgtttcttttttaattttaatttattatttatttatttatttatttatttatttatttattttgagacggagtctcgctctgtcgcccacgctggagtgcagtggtgcgatcttggctcactgcaagctctgcctcccgggttcacgccattcccttgcctcagcctcccgagtagctgggactacaggtgcccgccaccacgcctggctaattttttgtatttttagtagagacagggtttcactgtgttagccaggatggtctcgatttcctgacttcgtgatctgcctgcctcggcctcccaaagtgctgggattacaggcatgagccacctcgcccagcctatttatttattttttgacacagagtcttgctctgtttcccaggccagagtgcaatgacgtgatctccgctcaccgcaacctctgcctcctgggttcaagtgattctccttcctcagcctgccaagcagctgggattacaggtgcacaccaccacgcccggctttttttttttgagacggagtcttgctctgtcacccaggctggagcgcagtggcacaatcttggctcactgcaatctccgcctcccgggttcatgccattctcctgcctcagcctcctcagtagctgggattacaggtgcccgccaccacgcccggctgatttttttgtattttttagtagagacagggtttcaccgtgttagccaggatggtctcgatctcctgaccctgtgatctgcctgcctcggcctcccaaagtgctgggattacaggcgtgagtcaccacgcctggccaattatttgtatttttagtagagatggggtttcactatgttggccaggctggtcttgaactcctgacctggtgatccacctgcctcggcctcccaacgtgctgggattacaggtgtgagccactgcgcctggcgtagacaacccaatttttaacaaaagcaaagatttttaacaggcacattccagaagagggcatgctgacagttaacaggcacatgggaaaagtggtcaaacatgagtagccatcaggaaaatcaacgacgtcctactacactaaaatggaagaaacattgccagacgtggccatttgcaaatgtcgtttcctggtctgtgtcttttgattctcctgacagcatatttgagttaattttttaatgtgtaaggtatgagtggaggtcctcattaaaaattgtttaggctggctgtatggctcatgcctgtaatcacagcactttgagaggctgaagtgggaggatcatttgagcccaggagtttgagaccggctgggctaacatggcgagaccccgtctctacaaaaaataagaaaattagctgggtgtggcaccacgcatctgtagtctcagttgtacaggaggctgaggccagaggatcacttgagcccaggagattgaggctgcagtgagccatgattgcagtaagatgtgatcacatccagttacatttgattttcagataaacaacagaagtttagtggaggctgggggcagtggctcacagctgtaatcccagcactttaggaagctgaggcaggtggatcacctgaggtcaggagttcgagaccagcctggccaatatgatgaaaccgtgtctctactaaaaatacaaaaaaattagccgggcgtggtggcgggcgcctataatcccagctactcagaaggctgaggcaggagaatcgcttgaacccgggagacggaggttgcagtgagccaagattgtgctgctgcactccagcctgggtgataagagtgaaactccatctcaaaaaaaaaaaaaaaaaaaaaacaaattggggttgtctgtcttttctcattgtttccattgtttctggatctgtgtgtcagagatgtgtgctgcacacatcctttctccgcctagcttggttttcactcttggtggtcgcagacatcttgggggctacttgaaggaactctaagccgaccagaggctgggctggactcgccgtttggcgcccagccggagaccccagggccaccctccccggttccatcctgggagagaagaaacttccactgtcccagtctctcctgtggtgacttcttttgctcaagggttcacaagggcagcagactgatctgcacaagagggactgagcctggctgcggccgcacctgatgcctgtgcacacctgtccctggtggtctctcctgtggtgacttcttttgctcaagggttcacaagggcagcagactgatctgcacaagagggactgagcctggctgcggccgcacctgatgcctgtgcacacctgtccctggtgcaggcccttcccccgcagccccgtgaccttgtcctgtgaggctcacggtgcctgctccttctcagagtcctcatttctccctttaacgcacgccctgtcagcgcctccgtctagcccgtgtcctccagaccttcgaggtcaggggcctcaattcctggcacagcccctccactccaggcctcccagaaacagactagagcatcaggatgtgcgccgcctggggtcccacagagtggtgcccccttttagtgtcttctaggccccttagtgacagactacagaaaatacctctcaggtcacaggtcacccctctttggtgaagagtccatagaattctctgctgcgctttgcaagcactttctcttctgcacgtttggaacctaccccggcctgtcgtgtctttctcctggcctcctcgcgagccgaacctactgtccggtcccgggaccccctgcccagggtcagaggggcgcctacctagctcacggtcttgggccggagggaatggaggagggagcggggtcgaccgctcagctgtccgcccagtttcggaggcggccacgcgaggatcaactgtgcaacgggtggggccgcggctgaccgtggtggtcgcgggggctgagggccagaggctgcggggggggggcggcgggatgagctaggcgtcggcggttgagtcgggcgcggagtcgggggcagggggagcgggcgtggagggtgcgcacgaggtcgaggcgagtccgcgggggaggcgggcagagcctgagctcaggtctttctgcgtctggcggaacgggcctgggagggaggttttgccagataccaggtggactagggtgagcgcccgagggccgggacgcacgcacgggccgggtaggatggcgctggcgtcgatgcccgcgcgcttcagggcctggtctggccgcccctccatccttgtcggtttctcgggtcgcggaccccgcgcggcgccgggcgatgctggcctgcccgtggccaccacctcgcttcattcccgtctctttgggccgccgcattcgtccacgtgcccgtctctccctgcgcaaaattccaagatgagcaaatactgggctcacggtggagcgccgcgggggcccccctgagccggggcgggtcgggggcgggaccagggtccggccggggcgtgcccgaggggagggactccccggcttgcgacccggcgttgtccgcggtgctcagcgcccgcccgggcgcgccatggggaaccgcagcaccgcggacgcggacgggctgctggctgggcgcgggccggccgcgggggcatctgcgggggcatctgcggggctggctgggcagggcgcggcggcgctggtggggggcgtgctgctcatcggcgcggtgctcgcggggaactcgctcgtgtgcgtgagcgtggccaccgagcgcgccctgcagacgcccaccaactccttcatcgtgagcctggcggccgccgacctcctcctcgctctcctggtgctgccgctcttcgtctactccgaggtgagccgcgtccggccgcacgagcatcctcacctgctcctcggttccccgtccctgtccctacggaggacccggcgcgacccggcccctttctggtgcggagcttccagctggggcggcggcaggggcgctgcgccttgtccctcggcgatacacccaccgccgccacctcgcgaccttccacccgctgcgctgtctgtcccccgaccctcgttcctcttctccttccccgtctgtcttggcgtctgttatccaggagatgcccgtccttctatccagggaccccggaaacaggcgactttgtcaagcccagtcccctccgtagctggatttcacctccagggcagccagctggacagacaggcagatgcaggctcagccccctggctgccgtgggacacacacacacacacactgccacagccactgcccaccacacacacctagtgcagatgctggcacacccccagaaggaggctcacagctcgcaggggagacctgggctggacaaaacccaggggaggggagggtgtgtggggaccaggcccctgctgagaaccctggggggaagcctgagggggaattgggggatggagcccacactccacaccaggtctggccctcgagtgggtcggccttggtgccagcccctctgcggccagagaaaagcagcttagggctgagctggagacgcggtgtccccgactgtgggggagggggactcgaggtttccccttgatggacacagtgaatccaggcggctggggcagagacca

SEQ ID NO: 5106 - DNA, 6000 bp, Homo sapiens
agggtttcaccatgttggcctggctggtctcgaacccctgaccttgcgatctgcccacctcggcctcccaaagtgctgggattacaggcgtgagccactgtacctggcggggcttattgttttttaaaaagatttccaaaaccttgccctggcaattctgattttctgggcctggagcaggacctggagggatggtgttgtcaattactttagatgtttctatcaggaaagtttgagaaatggtattcaggcctaaacacaaacctctcttgaaatctcatcccagactgagcccctgctccctatcttaaattagattatagtaggtcttaaagtcagctgtagactgagcctctaaatctgaacccagacccaccctaaccccaggatacatcagaagagctggtcaatgtggaccattctgagcaatcctgcaagtctactctgatgggaaaaggctaagagcagtgccctgggcagcaacatcagctctgaagatgcaggactgtgttacatgttttatgagtgggtcttcacacactgagattcatgggacagtaatagaatctgcttgtgcagcactggggccttggagggtcagggtaaggctcaagatgtccaggaagttgtatataaggagaatcagagcagagagagactagggttcagaattaccaggatgacttagtcctgtttgttactgtcaccactccaatgccttttcctcattagtcctttctctcctctgagccacaactaaatgatgtttctacttttccctttctactttcctagaccctggattttgtatgcagaagccccagctcttggtccctatcatagccacttcaaatggaaatctggtccacgcagcatacttccttttggtgggtatccctggcctggggcctaccatacacttttggctggctttcccactgtgttttatgtatgccttggccaccctgggtaacctgaccattgtcctcatcattcgtgtggagaggcgactgcatgagcccatgtacctcttcctggccatgctttccactattgacctagtcctctcctctatcaccatgcccaagatggccagtcttttcctgatgggcatccaggagatcgagttcaacatttgcctggcccagatgttccttatccatgctctgtcagccgtggagtcagctgtcctgctggccatggcttttgaccgctttgtggccatttgccacccattgcgccatgcttctgtgctgacagggtgtactgtggccaagattggactatctgccctgaccagggggtttgtattcttcttcccactgcccttcatcctcaagtggttgtcctactgccaaacacatactgtcacacactccttctgtctgcaccaagatattatgaagctgtcctgtactgacaccagggtcaatgtggtttatggactcttcatcatcctctcagtcatgggtgtggactctctcttcattggcttctcatatatcctcatcctgtgggctgttttggagctgtcctctcggagggcagcactcaaggctttcaacacctgcatctcccacctctgtgctgttctggtcttctatgtacccctcattgggctctcggtggtgcataggctgggtggtcccacctccctcctccatgtggttatggctaatacctacttgctgctaccacctgtagtcaacccccttgtctatggagccaagaccaaagagatctgttcaagggtcctctgtatgttctcacaaggtggcaagtgagacaccttagtgtctcgcttctactactactacagaagatgggaatattaggatcctattgaatgccttggtgattaaagtatcaaacctattgtgctgtcttcttccagcaatttaagtagatcatgtattctgtctccaggaatgtgtcagtactgaacttatgaccctgtctggacatcctggagaatgactgcactagtccctctgctatggtggtcttgccttctccttctctctcagctagaaaatacatctagttttgacatggggaggctgtaaagatcacacctcatggttcattccagttttgaagtatgattttaatgttcttgcccccatgtgcccatgttggtgaatttgcatggactataaacgttattgcaaataccctaaagtggttacccagccataatcaggggttaatgaaggtatttggggaatagtaactggagagacagcaacaagacaagaggcagctcacatgcaatgttgaagtttctgtatgcaagagggtgtgttggcagatttgtgaaatctgcccatttgcatctgtatggctctatatgactatttgtccataagggtgccatgtattctggttgtgggtgtgaatgtgtgggtgtgtttatgtggacacttgcttttcagtgtgcgtatatgtgagagagagggtgcacacatggaatacgtactggttgtgtcctggtgagtgtggtagctatgtcctggcacatgtatgtttcatgagacgtgtctctgattgcgcatttgtatttctgtggtatctgttagttggtatatgatatgtgtctacgtgagaatgctggtgtctgtatctgcatggtgggcagtacctttatgtgtatctggtaagaatgctgcctctaccttttcttcctatttgtactatgtgaatgtggtgcatgaatgtgtggaatgtgtggaatgtgtagtattgggatgcctgtatctttcagcgtgtttgggtgtatgtccactgtgcataatatttgagatgtaaaaccattttgtgcggtatatgtgttattagttgtaagtcggtgaaatgtacatctgaattctgtgtgcatattgttggtactgatgctattttcgtgcatatgtctagtgtatatgttttaaggcaaactttctttgtgtgttgggtgtgtatgtgacacgaatggggacagcatctgtatttctgagcatggattgatgtgtggtgtctgtatgtatcttggaatggaggagggagattgaagaagtctggctgtgagcagcagaaataatttccaaagttgagtgacatgactctaagatgcccagtttctcggcctggggtcagcctgggtgatagctcagtctgtcagaatgaaaggaaacacggtgcttccttgctccaccttttcacaggccagaccacaccttcttcatcctgaacacaaggatttcaagggcttttgttacctcttcctacgtttcctgcctctgctatccgaggcactggcctccctaaaccctgccctcctgcctcaatagcaagtcatggtatcctcacctctcccttccctttttggcttatctgccaaacatgtataaaagtccttggttccccatctctactaaaaatacaacaattagccgggtgtgatggcgcgtgcctgtagtcccagctagttgggaggctgaggcaggagaaacgcttgagcccgcaaggtggaggttgcagtgagccgagatcatgccactgcactccagcctggtgacagagcaagactctgtgtcaaaaaaaaaaaaaaaaaaaaagccttggttgtagggagtttctcctaatccctctgggaaagcaagggtggaggggaagccagtcaatctcccttctgttgccgcatggaaactcccttaaggcaggaagctgaaaaaactgtagcattcacctcattattcaccttgtctcatgtctcactgtccttccacatgtctcattgttactccatattggatggaagtagaagtccctttggtattttttaaagtctttgccatgtctaagttaatgaggttaatggaggcagcagagatggctccagggttctgatagcaagtgtcaggctgcgtgctctgtaggcaccagaaactgttgtcaccagtaattttgatgtggtctgagttagaatggtctgatttgccatgatctatttaacatagcttgatttagcgtgtcctgtgttctgaatttaaaactcacagttgtgaaactgatcagtaaaaaataaggggagaccaactaaaaaccatgttgttctatttatagatgtagtttttacttatttcaaaatacgaggtatttagttttacattcaaattgttctctaactctctaaaatgttctctgactatttttgcccttaagggagaaaccagatgtcattggtcttacgtggctggtgttgggggtggggagggttaaagaaaccacgttctctgtcctcagccagaagttcagtaatccaaggccagagagtggacggcagaggcactgtccctggggaccttggttataagttatccagacacagggaccagagcctgggagacaaaaaaagatgtagccctagggctttgggaaaaggaggatggacccagtgaattccacgcttagcaaggacctaaacagtgtcccccaaatgagagaagggaggacagaaagaacacttcaggatggaaatgggctgacacttaaccgtggagtgtctctgcaaacttcctttgccattctcctgtttgagtttgataaacctgagaagagacttggataaagaccgtcacgaagactacactaatgagtttcttctagcttttttctactcactttccctatctatccttcacattgggagttggcatgaggatcccagcagcccatcaggggaggactctagagatccctttccccattgcctctcctccccatacccccaggcatatcctcccagggcacggaagctgagaagcagtccagaaccacagtgggctagtgaggggtacctgctgatgtaccctttggacagcattctgccccaccctgcaggaagaagcagaaggagggagagggtgaggcagagaataaataaccctgaccagggaggtccaagggagtaggcggagacagagaggctgtatttcagtgcagcctgccagacctcttctggaggaagactggacaaagggggtcacacattccttccatacggttgaggtgagtgcaggaggccaggggcatgtccaggtgcatgggttacttgcagctaggggtctcctgttagacttgctgagtgcatgagaagccaggctgtgaagaaccagaagtgggagatgtgtaggaagcccctgactcaaaggacaggcagccttagtgatctctaggtttgtgtgctgaacagaaagcatgtgggtgctggaggtagcctaagggtagttttcaagcagtttttcagtgattagtttactagtatgcccatctggaggctggcaggggctgatgtgaatgaggacagaggacagaggacaggctgggctggggttagactggggctgcattggggttgggtcggggtttggtgtgtgaacagggtgaacgtggttgaagctcagtctatgactggggatgaggctgcagctggggtggaagtggggctctgagtgaggttggtttcactgtatgctgtacatcaggagtcaggctgtggctgagactgggacttagtaatcttcctggggctccgatctcagcttggtctgtgtctaggatcaggattcagtcttcagcccatttaaaaagtagattagtgtccacacggcaacaccccttgccttgtactctttaccctagctacactaagtcactttcagctttccaaacaaggtctgttctctttctctctggctctttgtattagccaggatgtatttttaaaaacaaactagataagttctgttgctgaaattcccccaagtcactcagaattaaaccaaagctccttgccataccctgcaagaccctgttacctgatgaggtccttgccttcctcccgcctcatcttctcaaactctgttgtgctcttgatgctctggccaccttgaccttccttttgttccatgaatcccccaatatcattcttgctgggggacgcttttctcttgctgtctc

SEQ ID NO: 5107 - DNA, 6000 bp, Homo sapiens
tgcagcttccttcctgttcttggtccaaacatttccctaaaacattaccaaatggtagctcttaatttcctctaactaaacataacaaatgtattatatcacacctacctacataggcaaacatttaaccacattttctaaggttaattgacaggtaccattcttccaatttgaggtaggtccctgccatgtgagccatggaaagtggctctcatcacccctccttttttcagcaaccatatgctcttatttatccaattctctctgacttatcaacaatctatttttctctctaccaaatagttcataccaacctccaaagatgcattatttttcccgattttaaaacaagaaatgctttttaaaatttaatttttatttttgatgtatattttcatttttaattgactaatatatataagggatgcaatgtgatattgtgatatatgtatactttgtggaatgattatatcagtctaattaacataactatcacctcataaagttattttttttgcagtaagaacattttacatttattctttcgcaattttgaaacataccatatattactattgactgtggtcaccacgttgtacaatagttcttgaaaatttactcttcctgtctaactgaacctttatacactttggtcaacatctccgcatcccccagttccccaccttttatccttttcagcatctggtaaccaccattctactttctactacaaattactctaaaccccaacttccaactctaaacttccaacttctgccctacattttcttgtttgtacaaacttctttaaaatgttatgtgcataaatttttctatttcctagcctttaacttactctttagcccactccaatatgactttttcttatgcactccaaaaatagacagttcttttcaaaaagtcatttgtaacctccaagagactgaatccatcaatattactttaaactatgtttcattagatctgtcagtacagtaaaattatgaatcaatttctttgccttcttctttaaaaatcaatctgtcttttcctatataggttattttcggtctctttttctttctcaacatttacctagacatcatgatgagtttctagaaactacatgctagaccaccttctttctgtcactatcctcacttgctaaaacatctatttgtgctaatagcattaattcaaatattccagtaatttccaaataaaatactagtcactccagtttttctcaaattgttcctttgctctctggaactactttttcctctctttgctaaataataatctcttggatgcttcaaaggtaggcacctcatattggtcatgacctcatttgaactcattctcttcccttataatctggttcttctccagtcatccttaggtacatgaatgacatattccattccagtgcatgtatgagaaacttagagttattttggggtcataaatattataaaatttacatccagtataacttctatatccatccatttctctatatcttcatagcttaaaataaagctgtctcacccttgaagtactgttgtcagtgctcatccaacttacttatatttattcttgccatgtacaatctggtcttcacattgctgccatgcctaaattatcctaaaccttttcagtggctccatattgctttagcataaatttgcttaaaattatctgaccactatgacctcaacagcaccatctcacatcacctcccatgttccaccacaccttgaggtttccagacacattgttgtcaccttgaggttaccttgttgttacactgagattaccagacacattgttgtaacactctgttgttaccttgactatgccttgatccctctcattttaacattcaaagattcctggataaaaagtcttttttatccccaccccaacacacacaccatagttatcttctactcaaacaattgccctcagaacaaacattttttcaggatatcctctctgacaacaagagattatttttttcttcatgtgaactcttatcacttggtacttttgctttaaagcactaatcccagtctattattatatatttgcttgattttgttgttattattctctccccccacctcaactagaccacaatttcaatgagaacaggaacgatgactgttctattgatcactttatgcctaacatgtttttcaaacacagacagaactaaatatgtatttttgaatgaaagctttctcctttaaaaatgtttaaataaatctcctagccacagaatttagaacacccagagtttgtgtgcttaaaaaccattcaaacactctaaaatttctcacctttataggtccattttgatttaataaatgaagatattcttctattcatgtaaattcttaggttacattaataggatacatgtttttgagttaatctgctttctattctagtgggatttaacatcctaggaattcagctttctctataggtctttcatcatgtctgcaaatgagatctattatgcttaggtcactgagctgctttactactctccataaatttcagaagtttataatttctgtgccacatcttagctgacaacacatttttatcttgtgttaaagcatctttctcataaagttctgtctttgcccagtagaaaacttctgccacgcctaggatcccagactgtgagtctgtgttcataagcaaggtaagtgataaaatcttctcatggtcactttggctaaattccagagagttcaatggcttatcctaaacattatgttgttttgtcaacattctgcaaaaagattgacatttctctctgttttagtagcatatagaggattagagggcctttccaaaaaaggttgaagtcagaattagaaaatattaaggctcacatggtgcactagaagttaccttgtctgtaatcaaaaaacaacactgccagattatcttcagggttaatatattaactgttttatatagcagaatcgtattctatgtcatgctagaatataattgtaaaaaaaattaaaaacaattctttttctgtgagctcaaacatactacttctcttaattgtatcacacatatacaaatcagaaaaaaattttaatagagaaaacatcaaagataaaatgttatgtgatattaggatgtaaagtaataaatgagtattaagtaaaaatgccaggccttgtacatcaaatgggttacatacttccacgcatccaggataaaactattgtgttgaaccccttcagaattctcctctaaaagctcaaagtcaaactagctttacctccattattgcttgtgctctttagtcattgaaattttctgtagatacatttagataattttactctttatcaaattacattcaccattaaagaaggatgatttactccatcatttgggagtatatgtttattcaaacatacaggcagtaagaaacctctgaaaggaaatacatttagtttttaataagaattgatacaacaaaagaattttattttcttccagatttttttggtatttaacaataattatatcaaaaatcaacccataactaatatattaaaaataacattttaacctttgaacatagctttccagtttttgtttcttgctcataaacctgcaatagcttccaccatggcaaaaatattggaaataaaatgccttgaaaaattactaattttagcatagagtaagtattatatgtatctgcagtgtaaaatacaaagaagttcaaagcaagagattatattcacttcggtttgagtcatatctgagagtgttttatgcaaaataaaggattgtaatagtaaataaataataaatggtaaataaataaaggattgtaataataaagtattgtatttgaaagaaaatgtgaaaccatgaattattttaagcaaaggaataccagtgtctgaaagatcagattgctagcagaaagaaagaattatggaaaatcagaaacatttgctccaggcaggttgcagaaagcatactgaaaaaaaagagtgcatatgaatgaagtaaagaaaagaaatcaacaatatgataagcaattatttgcagtaagggaaggttagttttctagattcaagcttgtctggtcgagccaccatgcagaataaaaagtaaatggataacaacaaagttgtagaaaagataatgagtctaattttaaccatgatttttgagcattgaatggcaattccttcaacattatggacaaataattcttgtttgttaaataagttaaaattactgttcaatggttagaaggttttagttgtacaagatgaataagttctagagaccagctgtacaacattgtgcctgtattcactaaaaaatgaatagagttgatctaatattgtgttgttatcacaggaatctttaaaagcttcttattagttttacctaaatcctgtatttatgtctttataggttctctaagattcaactataaaaaaacttactaaggtatgtcttcattatatgacttctcatatggagaaattcagccataatcactaacttccttttaagctactcttttgcaacctcctcagaagtgcatacaaaatagaacatgaaagaaaactatccccaaatcctcaatataatttatttctggaaacctttacaagtccatgatatcaaaattttgaaaggctatgtaagacgttaatggacatctatatcaacttgaaatgatgtagctataaatttcatctcccataattcttcatttaaaaaatctagttattattagttaataaacctctgcatcaagtcaagtaacactgagataaatatgaagaaaacaagcacatccatttaatctatataatttctaaagagatgaagaaaggcttagaaaaatactacaattttatttctgtggtggttccaacctgtgataactgagaacaatacaaatagagatttgaaattcatgttgaatcatgaatcatatgtctgcatctctcaaaatctccaatagctccaaattccaggtctctgagttcatcctgctgggattcccgggcattcacagctggcaacactggctatctctgcccctggcactactgtatctctcagcacttgctgcaaacaccctcatcctcatcatcatctggcagaacccttctttacagcagcccatgtatattttccttggcatcctctgtatggtagacatgggtctggccactactatcatccctaagatcctggccatcttctggtttgatgccaaggttattagcctccctgagtgctttgctcagatttatgccattcacttctttgtgggcatggagtctggtatcctactctgcatggcttttgatagatatgtggctatttgtcaccctcttcgctatccatcaattgtcaccagttccttaatcttaaaagctaccctgttcatggtgctgagaaatggcttatttgtcactccagtgcctgtgcttgcagcacagcgtgattattgctccaagaatgaaattgaacactgcctgtgctctaaccttggggtcacaagcctggcttgtgatgacaggaggccaaacagcatttgccagttggttctggcatggcttggaatggggagtgatctaagtcttattatactgtcatatattttgattctgtactctgtacttagactgaactcagctgaagctgcagccaaggccctgagcacttgtagttcacatctcaccctcatccttttcttttacactattgttgtagtgatttcagtgactcatctgacagagatgaaggctactttgattccagttctacttaatgtgttgcacaacatcatccccccttccctcaaccctacagtttatgcacttcagaccaaagaacttagggcagccttccaaaaggtgctgtttgcccttacaaaagaaataagatcttagagaccttctccatgatgtacatgaa

SEQ ID NO: 5108 - DNA, 6000 bp, Homo sapiens
aataggccaggtgtggcggcttacgcctgtaatcccaccactttgataggctgaggcaggcagatcagctgaggtcatgagttcaaggccagcctggccttgtctctactaaaaatacaaaaattagccgggcgtggtggtgggcacctgtaatcctagctactcaggaaggtgaggcaggagaatcgcttctacccaagtggtggaggttgcagtgagctgagattgtgccagtgtactccagcctgggaaacagagagagactccatctcaaaaagaagaaagaaaaagaaagaaaagaaaagtagaaaaactaaaatgtaggtaggaatataaatagagattttaaaaacagaacagggtataataatcagagaagactttgggaggctgaggcgagcagatcacgaggtcaggagatcaagacatcaagaccatcctggctaacatggtgaaacctcgtctctactaaaaaaaaaaaaaaaaaaaaaaaaattagccgggcgtggtggcaggcacctgtagtcccagctactcaggaggctgaggcaggagaatggcgtgaacccgagaggtggagcttgcagtgagctgagatagcaccactgcactccaacctgggcgacagagtgggacactgtgtcaaaaaaaaaaaaaaaaaatcagagaagaagaaaaaatttgaatgaaaaattattcagttttcaaatctttgtaactgtaaggatgttacatattaatagagatatgaaatacattgtatgagaaataaggatttaaaggcagcaagtggtgagtacaataaaaagagagggtctggagaaatatttctccttctccctattgaaagtaataatcatgatgatgattacagttatttaaaatccatgtggaaagtaatcacaccacatgtctataacttctaattttcaggacagtccctgcatgatgtggtgatcatgtgattaattttattacccccagcttacatataaaaaattactaatagcagtagctattgagtaagatatagtttttaattccctggcctgaatctcatttacctcctctgtaaatggggacagaagtgccaatttcagaactgctttaatctttaaataaaatcacatttcaaaagcactgaaaaaatacctggcacataatgtcagctagacgttttttccctctaacataaacttagttattattccttttagtaaaagacaaaatgtaaagaattctctgacagatcggatgctggggcaggggatagatgtaaatagaaagataaagctaatttgtggttattagtgggtgaaaggtattgatactgactcttttgtattgtaaacataacttttttatttttagacattcaaggggatacacgtgcaggtttgttacctgggcatattgcataatgctggggcataggcttctagtgaacccatcacccaaatagtgaacattgtacccaaaaggtagtttttcaactcttgcctctctacctccctccccacctttgtagtctctagtgtctgttgtttccatctttatgtccatgtgtacccattgtttatctcccacttataagtgagaacatatgctatttggttttctgtttctgcatgaattcacttagaataatggcttccagctgcattcatattgctgcaagggacattattctttgttatggctgtgtacttttctatggtgtatacgtcccacattttatttacccaatctaccactgatggacacttaggttgatttcatgactgctattgtgaatagtgctgtgataagcaaatcagtgcaggtgtatttttgatcagtccattttcctttgggtagatatccaatagcgggattcctagaaataatgatagttctatttttagttccttgggaaattttcatactgttttccatggaggttgagctaataaatccctaatactgtgtaagtgttcctttttctccacatccttaccaacatctgttattttttcactttttaataataaccattctgactggtgtgagatggtttctcactgtgtttttgtttttgttgttgtttgtctgcttgttcatttttgagccagagtctcattctgtcacccaggctggagtgaagtagcacaatcacggctcactgcagtcttgacctcccaggttccagtgatcttctcacctcaccctcctgagtagctgtaaccataggcgcacaccaccacaccaagctaattttttttttttttagatgaagtctccctatgtttcccaggctgatctggaattcctgggctcaagttatcctcccacctcggcctcccaaaatgctaggattacaggcataagccactgcacctggcctcattgtggttttaagttgcacttttttgatgattaatgatgatgaacattttttcatatgcttgttagctgtttgtgtgtctttttttgagaaatgtctattcaacctttgcccacgttttaattgggttttgtcttttgcttaattatttaagtccttattggttcttgatattagtcttctgtcagatgcatagtttgcaaatattttctcccattttgtaggttgtctgtttactctgtgaattgtttattttggctgcacagaatctttttagtgtaagtaaatcccatttgtttatttttgttttcattttcattgcatttgcttttgaagtctcaatcataaattatttgcctagggccaatgtccagaaaagtttttcctaggtcttttaggatttttgtagtttgaggcctcatattcaagtttttagtccattttgagttaattttgtatatggtaagaagtaggggtccagttttattcttctacatatggctagacaatttccctagcacatttactgaataagatatccttacccagttgattgtttttgttgactttaccaaagatcagttcgttgtaggtgtgtggctttacttctaggttctctattctgttccactgatttttgtgtcatgtttccagcaatgccatgctgttttggctactgcagccttggagtataatttgaagttgggtagtgtgatgcctttggctttgttctttttgcttaggattgctctgtctatttgggctcttttttggttccatattaattttagaatagttttttctaatttgaaaaaatggctttgggaatttcataggaatttcatagaatctgtagattgctttgggtcattttactgatagtgattcttccagattatgagtgtgaaatgtctttccgttagtttgcgttatctgtgatttctttcattggtgttttttagttctccttgtagagatctttcacctccttggttaaatgtatttctacatattttattattgtgtggctattttaaatgggtttgagttcttgatttggttctcagcttgaagaatactggtatatagaaatgctactcatctttgtatgttgattttgtgatactaactttcctataatcagatcccataaggagaaaaagatgattaatacaactcaggaaatgatcatatcataaagtatcttccctccctttagcagaatcgtgacatatcttgggaagcaattccacaccatgaaattggacagaatctgagaagatacaaacccaaatacacataccactatacttccaaagcagttctttgggcctgcattatagccaagtcatagggatagtttttctttaggattagtagcaccatattagaaatcattgcactcaaatgagcatcaaagtaatttgacccatggcactgatatggatatggcactgcccgaatctgactaacccaataactgaatgtattccatccatggcccagagcctaccacagaatacaccctgtagcagcaaagtttctaatcaagtcctagtctcatttgcacacacccaagcaccctacaggcctattatgttgcagattgcatccattgcacagagccagttacaaaccagactcaaccacaaggcacaccagaaagactcaattgtgacggtaaactagcctgctgtgaacttaaacatatcactgtccatcaatataccagggaaactattacagcattaatacaaactagactgtccccaatctgaggcaagtatctgacctcagtatcttttaaaaagatagagacaattacactgccactatctaggtggcattatgaagcgattgcccatttatataatgcgaaatggagaagacagaaaagatcataaatcacaaaaggcactgcaaagtatctgagagcatccagtgttttctattcaggaaagaaaacataatatagtgaagggcctttgaagttgtaagagggagcattgtttttctggaattatgcaatagttaccctatgtatctaaatttaaaaattttatttattatctcaaatccaaacaccaactaaccaatcctccacctttactgagtctcctctcacagagaatattcttaatttctcagatctaatttgcaagaatgtatcattcctcttatcattttcctcctcaatctcagtccagtgacattttacacacacacacacacacacacacacacttcaccttggctactctttacatcctgattaacaagtataattagcaataaatatatgctaatttaatgccatatggaagttttttcttagagactgaagggaggaaagacatgggaagtgcaggattgctatattttggaaactttctgcatggtttcctgtgtaagtgaggcaaatatttaaaagtgagagtgtctttttaactatatttcatattccctctctaggtctcttatgctatattatggagttaaagaatggattttctgtttccccaagaaatagacaccatgctgtgaaagaagttatggtttctcactggaagcaagaaaactcatgcaagaaatgtgtctgtagggaatggccaccaatatgcttcataccaacaatacacagtttcacccttccaccttcctcgtagtgggggtcccagggctggaagatgtgcatgtatggattggcttccccttctttgcagtgtatctaacagcccttctagggaacatcattatcctgtttgtgatacagactgaacagagcctccaccaacccatgttttacttcctagccatgttggccggcactgatctgggcttgtctacagcaaccatccccaagatgctgggaattttctggtttaatcttggagagattgcatttggtgcctgcatcacacagatgtataccattcatatatgcactggcctggagtctgtggtactgacagtcacgggcatagatcgctatattgccatctgcaaccccctgagatatagcatgatccttaccaacaaggtaatagccattctgggcatagtcatcattgtcaggactttggtatttgtgactccattcacatttctcatcctgagattgcctttctgtggtgtccggattatccctcatacctattgtgaacacatgggcttggcaaagttagcttgtgccagtattaatgttatatatggattgattgccttctcagtgggatacattgacatttctgtgattggattttcctatgtccagatcctccgagctgtcttccatctcccagcctgggatgcccggcctaaggcactcagcacatgtggctctcacgtctgtgttatgttggctttctacctgccagccctcttttccttcatgacacaccgctttggccacaacatccctcattacatccacattcttctggccaatctgtatgtggtttttccccctgctcttaactctgttatctatggggtcaaaacaaaacagatacgagagcaggtacttaggatactcaaccctaaaagcttttggcattttgaccccaagaggatcttccacaacaattcagttagacaataatgagatcataacaaaa

SEQ ID NO: 5109 - DNA, 6000 bp, Homo sapiens
aataaataaagactgcaccctgtctcaggtaaagaggcttatgtgctctgggaccttctctcttttgccatcctctgggtgcttggtggtagcagaaatgcaggaaagttgcaatttgtctatagaagattaacaggcagtatgagagctaaaaagtgcataatttggagccaagtaaagaaaatttggagttttcaactctgaatatggaaatttagtggcttgaaaacaaagaatatgcctaccagtgtctgaattataaagttagaattacattagtttctataacttcagaggttgaagacaaagaccacagttcaggaccagtggaagtcaggaagtagttcaaaatatttctgatcaaaattgctaaaatctacttctgacaagaacagaaaactacgcccagaagagcagctagctacctgtcactggatgcactgaataatatctgaaactacacctgagagaggtatcttacaggcctgcctgaattttaccaagatagaaccctagcaactcttttactttttaaaacagggtttctttggcactattctgtgggcctatcttgcaacctgggaaagcctaggctgatggtctctcctttagtctttgagcttcaacttctttggctttctcatcttgttcctggctggaactggaaaccattagctccagttcctaagccctagtgtgccattggcaagttttgattacaaaccaagattgaataatgaaaggagaaaaggagcaaatgtgtttccagatgctttacttctagggatgagtactttattgatgcttgttgaatgattgaaaaacatgcagaaacattagagaaaatagaaggaaaaaggaaaagtcagtgagttagaaaaataaaataatcctcccatgtaatcctcagaaatttcatcttagtgctaaaaataattatcccaaagctcttcaagagacagaaaatatactttttcctctaggcttctctatggatactcatgcctaagtcactagatcttccatttggctctaccctgcaaaggtcatttcaagattttctctacttccaagcacaaaacatttaattccttctaggagtcctttgtgacccctggagaagaaaagctacttggaaaggtaagatttggggctgtgattttctttaaaaaaaaaaaaaaaaaaaccaccttatttgcttcaggttttttaaaataaaataaaacatttctgaagtttaagtccccttcatacactgcaaaaggctcctagaacagataaaggactccaggatacaaaatcaatgtacaaaacttagtagcatttctgtacgccaataaagttcaagctaagagctgaatcaagaatgcaatcctagttacaagtgccacaaaaagaataaaatacctgagaatacaactaaccaagaggctgtgatttttaactgtaaaaattttgcagaaagtaggatcagaggatgcaatgagcaaaggaataaatgacaagaaagtaatgcagaagatagtgtttaaagggaatatgtggaatttaacagcctatagttgtacttgctgtgggtgcaaagttaattggggttgggtcaattatgccaagttctaggcttagaaggtcttactggtttttgttccacacttacaagttaatgtattcaaagacagagaaggaaaagaagtgaatgaacatagtgcccagggcatgaagaagggtcgttagtcaccaactggaggctggaagttttgttctaggggttattatcttgaggacctcctgtaactccagtatgtcttactctcagtgagccactctatcaaggaaaatggcaaaaatattagaaaagagaaagtaagattggagggtggcaggtatgaagtgcatagagaatgattttataatctttatttaaccttgaaggggttgttccttaagagtcaaaaccaggaatacaataaaagacacaatacaaaaggggaataaggagggaattggagcctatgagctgtgggaagcaggagtcggagttgcaagaggaaggaagagggagaatctccagactgctgaaaaacagcccttagaattgtatgtgtatggagagtgtgggtggaaaagaaaaacctacaaaatatataaaacaaaatcccaaataacataaacatgtatgcatcactatggtgacacagggcacaggcgtattcctattttcactggcttggacctgaatgaattatttagacctttattttctccacagctgaaccctgagaaactgtaggaagacatgtaaaaccactaaaatatgatttgcctatgtgaaagataactgctaaaataatcaacttaccctacctacttcaaagtattatgaatcacaaatgaaacggtatgtttaaaattcattttgaacttatcaggtcattactaatataccctattatttacaggagaaaagaattgggagaatatctaaatctcttctatatatgaggtgaagggccatgcctggcagactacatggggaatcagaggatcaagaggagtgaagagaggatccctggaggaatgcccgtcctccctccactgacagcagccacagttactaacagggtctttctgatgaggagaatctgacaggacccagttgagcaaggactggaactgcttttggggaataggaaagacaactgaaaacaaaaagcctacctgaacctcttccaaaaagtatgtttccatcagtaggaaaatatcatacagtttggagttcacagtttaattataacttccttccttgtcaccctgtccctaccccaaaacttttttcctcgacagattcaattcttaaaactatcaattgtgttttgggtaaagtttgttttcttttttataggatcagtggggcaaatacgtataatagagttatttattgggtttggccgggcacggtggctcacacctgtaatcccagcactttgggaggctgaggtgggtggatctcgaggtcaggagatcgagaccatcctggccaacatggtgaaaccccatctctactacaaccacaaaaacaaacaaaattaactgggtgtggtggcgtgtgcctgtaatcccagctactctggaggctgaggcgggagaatcgcttgaacctgggaggcggaggttgcagtgagcagagatcacgccattgcactccagtctggcaacagagctagaccccatataaaaaaaaaaaaaaaaaaaaaaaattatttcttgggtctgaaggaaccctagaaattaatccaacccaacctctatattaggtaagattaggattagaataataacatatgggcagttaagaacctggattttgaaatatcacttcccttgtttgtaagtggtgataatgaaacatatttcacagaatgttgaataactaaatgggatgaagtgctaaaacagagcacagttcccagcaagtagaaagaattacaaaaataaccatataattttgttatattagtgagccaaagtgtgagaaacagggcatttcttaaacatttgatgaaaaggaatttcacacacttgatcttagccaaaaggctgagaagcgatagaaaggaatttttaaacctacaaaataacatctgaacagaaacctctgtcccagtagacagaaatatgcacaataaaactgcatgatttggagggccccctgaagacctgacctacacccttgccaagctacagtgttctttctatgggctgtctttcacaatgcaggggaggggaatcttagaatcctttacctttaatgtaaatgtgggtaccacatcaccctatttataatgatatttttccagcctatcccctatgtcacactcaactctcctctgcagtctcctaataatttgtgcatatctctgacattgctcatatcattcattctcgttacacccatcatctcccagagtagttataggtttgttttagtgaaaataaggacagtttcttattaaattttgtgatgctggtacctaacagaatgccagggaagagggttaaatgataagggaataatggcaacactgaactactgtcaggagagagggaaatgtgtggctatatcattacagtcaagatggaaaaggaaactggaaggagacggaaggactttaaaggtgaacttcgtcaccctcacacaattacaataagaagaaccaatttttcatcatgtctaatgacaagcatttctccctgttagctatgtggaagtgcccactctccttttaaagctgtttctcccaaaagttaggaagcctaaaaatatgaacatctaaaaaatagagagatattaaggcaattatttggtggaacctatgcctactaaataaaaatgaacttttagacaaaatacaagttaactaaatttattttagatgtatgatttaaaaaatctctaagcaaaataagtgcagcagaaaggttagaataaggatgtcatggggacatggggactagggacatttatctgagtcccttccttgtgccaggctctgctatttatttgagcttattgcaatagtcaacttgtagatatggtaggctatgtgtacattaaaaagaaaattgtgaagaagaaacctatgggtagaaatttagagtctcacctgtcacactaaagttgtttcctaagtgttttctcctttttagtttctctaaaaaaaacaattctattgaaaatggacattgaataaagtaaacatgtatagaggaatcatgtcacctcagacagctgtactgtttaaagtgataggaataccccagtgacatgacactgaggaaaaacagatgaattcgcttggctctacataacctgctagaaaccacaagttgtacctatgacaaacaaattgtgctatctttgtgtatcaagaatccacagctagtttgtaatcataattttccagatcactgaaagaaagcagtaaaatatatgggaaaatatgacaacacaccgaaatgacaccctctccactgaagcttcagacttcctcttgaattgttttgtcagatcccccagctggcagcactggctgtccctgcccctcagcctccttttcctcttggccgtaggggccaacaccaccctcctgatgaccatctggctggaggcctctctgcaccagcccctgtactacctgctcagcctcctctccctgctggacatcgtgctctgcctcactgtcatccccaaggtcctgaccatcttctggtttgacctcaggcccatcagcttccctgcctgcttcctccagatgtacatcatgaattgtttcctagccatggagtcttgcacattcatggtcatggcctatgatcgttatgtagccatctgccacccactgagatatccatcaatcatcactgatcactttgtagtcaaggctgccatgtttattttgaccagaaatgtgcttatgactctgcccatccccatcctttcagcacaactccgttattgtggaagaaatgtcattgagaactgcatctgtgccaatatgtctgtttccagactctcctgcgatgatgtcaccatcaatcacctttaccaatttgctggaggctggactctgctaggatctgacctcatccttatcttcctctcctacaccttcattctgcgagctgtgctgagactcaaggcagagggtgccgtggcaaaggccctaagcacatgtggctcccacttcatgctcatcctcttcttcagcaccatccttctggtttttgtcctcacacatgtggctaagaagaaagtctcccctgatgtgccagtcttgctcaatgttctccaccatgtcattcctgcagcccttaaccccatcatttacggggtgagaacccaagaaattaagcagggaatgcagaggttgttgaagaaagggtgctaacaaggaccactggatctctgaatatctaaaataagataatttattaatcact

SEQ ID NO: 5110 - DNA, 6000 bp, Homo sapiens
agaacagtgattaagatattattgagcatatttccataaattttgttgtatagtaagaaatactttaagtttaaaattattagctcaataatttttattttttgctagcattttgtctatcatttctctactttgatctgccattctatgttcctagaaatttatctatttttatttcctgaattttttatttactctataatttttatcatttcatagtattcctcaatttctcaaacattctcttaattcagtttccttcagtatccaggactgtttttcacagtcttaatttcctaatgaattgttttatttccaggtgtatttttcttacaatatattgaacatatttatgactacctattcaacagtattttgttttatgctgttggtagtacagataacagatgtttacatgtttttcctattacttactttttttttcagaagagggccatctcctttgatatcttagatatgtcccattagtttaaattgttacattcctatctcccatgactttaccgtttattctgaagtacaaaagtctagatcgtcttataataaaacagcagtttctaattgatatactgtgtttactaatatcattgatccttttgttttattcaaaattttataggtttctttgtgtgtgtgtgtgtgcatgcctgtgtgtgagagacagagggagaaagagagagagcttgagcattacacttgctaaaatctccaatattttcctcaaaattataaattttggttttttacttgttagtgccacagagcagtccaatttcagtgtgatatgtattattttaagaaatatttttttctgcatagattctgcaatgttttgaatatattcttggaaaccaaactgttcatgggggcacactggttgttagtcattctttgattttgcctgttgcttcatgagttcttgctattatctaattgatttctctttgcttagtaacatcttcattatctttcttactatttattattccagctccatttgtttggctcactttttcagggacattaattatttgttagactgttttctgcttttaatttttaatttttatcttatattcatctatttccccattttctgcatcttataggagagcacttcaagcctttccatgtaagttttctattttaggcagagtcagagtcaaatccattctttactgttttcagtaaaagttttgtttctgctattgcagttcagtttcattacaatactttcataattacatatagcatcctgtttatgcctattttttaaaggactgcccaaaatctaattttatttttgcattctttataaaaaaaagcaactgataatcattttcctcttaactttgatgaccatattttcaggaactactgaaagacttcaagtatgttgtttgtaaggaatagtttataattactgaattttacatttttgcttaacatacaaaatttctgcttaatgtattaagcatatttttgcttaatatgttttgtaaactatagttaactctcagaatgtctaaagcaagctacctttattttcattaataaaaatgagtaatttaaaactccatgcacatgtaacattttaaatacccaacttccttaacataaggtaaaacagtctcaggcaggctgccactggtttttttttttttttttttaaattagaggcagggtctcaccatgttgcccaggttgatctcgaactcctgggctcaagcaatcctcccatctcagcctcccaaaatgttgagattacaagtgtgagccaccactcctggcctgggaaatttttttaaatgtatgtggtaatacacagtatagatcacatttagtatatggccaagttaattaagaagtcaaaaaacacattaaatttaagaacaaatagactggttgtggtggctcacgactgtaatcccagcactttgggaggccaaggcaagtggaccacccgaagccaggagttctagactagcctggccaacatggcaaaactttgtctctattaaaaatacaaaaagtagttaggcatggtggggcgcccgtgatcccagctacctgggaggctgaggcatgagattgcttaaacttggtgggcagaggttgcagtgagctgagattgcgccactgctctcccccctgggcaacagaccgagtctctgtctcaaaaaaaaaaaaagtacaaatagttatttgaaaaacttctgacatttatttacttctggacaaacaaataagtgggaagagctgtcagtataaacctcttttaattttagtctttatcattaaaattgcctgagttcttagaacacagaacaaacaaatttgaatgcatttgtgacagtttaataatttgtatgtctcattatgatcttttaataggaagttttaaagccaaagcataatttactgcaaagataaattagaaaaggcaaataaactttttaataatatgttatagtgacctggacaaaactgattattaactagtaatacaataattagaatatgcaaccgattgagaaattaaatcctgtgctatatactcgtaagtattttgtcagacatgatatatatttaaatgtttctatcaattgcattccttttgctgcatatatcagtttttatttaaaacaagaaaacaattctctttcctccagattctcatgttaatcagtgcaaaatattgcaattttagtaaaaattgtttattacaatgttattttagaacggcttattccttaaactatcgaaaatgtacttaaaaaatccaaattatgagaatgatcaacttcaatggcttcctcgacatccagcttggcttctccatgtccttcctgtgacttatcaagagaggccagggcctcatttttgtcacttgtaaaagtttctcatgatatatcatcatcttgaaaatttagacttttaatagcttatttcattttttcattgtgttctcttcctagcagctttttaattttcatattccttttgattttctatgtagaaaacatccttaatttgttccttgctgatactaggagtgtttttcaagagattcagaaaatctccacctggtgttctcttcaactactattcattataaagaggccaccattttgttctacttcagcagtttccagcagaacaattgccttttgttcccaataatcctcactgcttgagccatcggatctttctttggttcctgtaacctgaataacatttcatcagccactttctcttgggaatcttcctctgtgatctcgtatcaacctttatagttcatttttggttctggtctgttccctagcctgtctttgacaggtcatttccttttgagatgaccttgccccttttcctcttcctttgatcccatttttttgtttgtttgtttttgccaccatgcatatattcagctagttgtttgtctagccctttcgtatgctctagagattccctcttaagtttcttagcaagcaaacaatcataggtctcggattgtctgcttctgtcaatagtgccctccattcccaagataccaagttcagtggccactgcatcttaattctgttcctgcagtacagcaccccatatgttgttaaccttctttcctccagaaacaggtggtttctgactgctctggccaaactgaaaagactctggtttgggaggagagtttacatatttccatcacttccacttccaaagacagctatcatcatctgaatcagaaaaactctcttcacttgaatccacactttcaacaactcggtaatgtgatactggtgcacatgcagtcgccctgctctggaaggcccttataagcactgtccccacctagcactttccacacttgctgcagcctgttgctgggtgtgaccattatgtcggaatctgagtcaggttggaaagctgcccatcttccatgtcgctggcctccaacaccatcttcccgtggtgcctatgcctatattttagccaacattattttcatctctgttgcctagaaagcctttaaagatgatgttatgtgtccctgtgcccctttaaggtactatgtatttttgtattttgactttcattgtgatgtgttataattgattatttaaatattttatctattaaattctaagcttcagtgaataatcattgtatcatcagtgctgccatagaaattgaataaatacagactttccttttatatcatttaagattctatctcgtttcataactttttatccatgaatgttttcctttgaaacttcactctaatgtttcttatattttttatagtttttttttgtgggagtctgttttattttttccaattttcctgttcttgaaagggaagtagtcagaatctccttggacacagtcactttccacagaattgtagtacaatactcctctccgatcttaattttgagagtcagtggattatgcaggtactaagaatcagttgccaattatagatatgctggaccaaagaggaaactgctaacattgtttcccacagtctgatttggcaagaaagaataagtattacgtgatttgaagtggtctacaattcttacggtgagtgagggggaaagtgcattaaaacaaccacaccctataaacattctcactcatccattcccctctattatttctactttgaataacttcaaaataaaatacgatacaagatcagatttgttttagtaaataggctaacaagatataaaatggaacgtaaaagagaggagaaaggtgacctattgctcatttcactgcttaggttctgaccacgttttattgtgtctttattcttagccaacacaagacccttcctcttccagctgaggtgctgaccttgcctctatccctgacattaagagaaaatctgaaaaacagattgagaatctgacttccaatcaagaatctctctccaggaccacagctggggatttatgcccatacttatggctataggaaactggacagaaataagtgaatttatcctcatgagcttctcttccctacctactgaaatacagtcattgctcttcctgacatttctaactatctatttggttactctgaagggaaacagcctcatcattctggttaccctagctgaccccatgctacacagccccatgtacttcttcctcagaaacttatctttcctggagattggcttcaacctagtcattgtgcccaaaatgctggggaccctgcttgcccaggacacaaccatctccttccttggctgtgccactcagatgtatttcttcttcttctttggggtagctgaatgcttcctcctggctaccatggcatatgaccgctatgtggccatctgcagtcccttgcactacccagtcatcatgaaccaaaggacacgggccaaactggctgctgcttcctggttcccaggctttcctgtagctactgtgcagaccacatggctcttcagttttccattctgtggcaccaacaaggtgaaccacttcttctgtgacagcccgcctgtgctgaagctggtctgtgcagacacagcactgtttgagatctacgccatcgtcggaaccattctggtggtcatgatcccctgcttgctgatcttgtgttcctatactcgcattgctgctgctatcctcaagatcccatcagctaaagggaagcataaagccttctctacgtgctcctcacacctccttgttgtctctcttttctatatatcttctagcctcacctacttctggcctaaatcaaataattctcctgagagcaagaagttgttatcattatcctacactgttgtgactcccatgttgaaccccattatctacagcttgagaaatagcgaggtgaagaatgccctcagcaggaccttccacaaggtcctagccctcagaaactgtatcccatagaccttaggaagtaaggctaaattctattgaatgacaattagtttca

SEQ ID NO: 5111 - DNA, 6000 bp, Homo sapiens
agcctcctgccccctatcctgtggacctcaccttggccagctgccttgaggaatgttaaccatccttggctgctgacacccaggaccagggagcagaaaatgatgccagtggagagcttcatcctgctgcagggccaaggaaacacaaccaaggataatacacattctgtttcaagtttttattttttgtaatgttagtccattctttcattccaagaaaaaaacccactcggttttacacacgcacacacacacacacacacacacacacaggtgtatgtgtatagataaaagatagaaggtcagagggtctacgtctccatttccatttgtctcattggaatcccagtatctgacagaagaggagcagtgacccaggataaagcaaatagacaaaagtcacaccatgtttgagaatcattattttagattagagcctgccaaaattaggaattatgcctctttctgggttctgagcatattttaggcacagtaaaatgaaagttataaggcagatagctgtcagaggatttccctgtccctttggttcttatctaaggcaatgctaagcaacatttgaatattccctacacaacttccattccttggaaaaggtgggattccctgtggtcagtgtagtatctgagctggcgtggctcacttggtcccaggagtagacagtagaagagggggaagaggaggggagttgtcaaccatccacagccactggtcatggtgtacttggaggagctgcttcataaagcagggcatgtgatgtccagacctcctttttcctactcttcttcaggcagaaattgagggccaatgatcacatcctgtcacaattattttactccctttggaaccattcaatgctggaaatctactttctcgttttattcaagtcattctcttctttgatagaagttgatatggtttggatctgtgtccccacccaaatttcatgttcaattgtaattcccaatgttgggagtggagcctagagggcggtgattgaatcaggaaggctgtttctcatgaaaggtttaacagcatcccccttggtactgtcgtcgtgatagtgagtgaattcttttgagatctggttatttaaaagtgtgcagtacctcccccctcactctcttttgtccttgctcccaccatatgagatgcctcactcccgctctgcctttgccatattgaaagtttcctgaggcttccccagaagcagaagccactatgcttcctgtacagactaaagaaccatgaaccaatataacctcttttctttataaagtacccagtttcagtcatttctttatggcagtatgagaacggactaatacagaagtattagaaagcaagtggcgtggagacactggctcatgcttataataccagcactttgggaggctgaggcagaaggatcactcgaggccaggaactcaagaccaacctgggaaacatagcaagaccccatctccactatatatctgtatatatattttttaaattagcggggtgtggtagtatgcacctgtggtcccagctactcaggaggctgaggcaggaggactgcttgagcccaggagttggaggctatggtgagccataatcacaccactgcactctagcctgggtgacaaagtgacacactgactcacaggaaaaagagcaagaaagcgagtatgatttctagataccaagaggaactcctcacagggactttgacaagccttgcctgttttcttcctttgttacttaatgtattctgccttccgggaaggtacacgcagtttcttatggtgccaagctgagaataatagacaataacggcagtcagttcttttcacttgtttctcctgaaaaagaaagatttcctgtcatgatatcagagtccccaggccttaaagggattttccaacagtctcttacaagtgactacgtgtgctggtttgcatgagatcagtgtctattgtccaagcttaatagtggcacatcttttcattgtctacaatggcctggattgaacagtaaatcagatggtagcactactctgataaccttgtgtgaccaggctgattgagaggcccaagacacctccattcttttaagttacaattaatttaagtagaagaggagaatactaaggcttaattctattaggaattagaaaaacaaaaatcagaaaagcccaaaagtccacaggtatcatgactaagaatgacatctcagacctaagccccagtcttagaagaccagcgggaagaactttatattccctaaatataaaatgaagaaaataatgatacaaaatcactaccctcaaaaaattcacatttaatgaatcctagttaccagaatagtagatataggaaggatgcagaaaaatacaactcccttgtagggttgttgtgaggattaaatgattaatgctgacagggacttgggttaattctgggcacgtgtaaagcatttaattaattttagagcttccaccttaaccaagaaaacgcataataatttatattttccaggagacagaaatattaattacaatattgttaccaaggcaacctattattaagacattagtaagtaagattaccaattagaactacagttataaggaccaaggtttattttcacatagtgtcagagacgtttgaaccagagcgactctatttggcatgagggctaggaaaatgaggctgagattgctaggctgcgtgctcagaaagttaggcattcctaacctctagatgtttacagttaagggaacaaattcgtaatgtttactaaacagacccagacttgggagtgtgcaaatatcccaatatttggagaacaaagacattcctaatttttctttgaagataataacattggccgggcgcggtggctcacgcctgtaatcccagcaattttgaaggcccaggtgggtggatcacgaggtcaggagttcgagagcagcctgggcaaaatggtgaaaccccatctctactaaaaatacaaaaagcaaaattagctgagtgtggtggcacgcgcttgtagtccgagctacttgggaggctgaagcaggagaattgcttgaatccaggaggtggaggttgcagtgagccgtgattgtgccactgcactccagcgtgggtgacagagtgagactccatctcaaaaaaaaaaaaaaagataataatattgattcttgcaaaatatagtaattaagaaaacagggctgggtgcgggggctcacgcctgtaatcccagcacttcgggaggccaaggcggtggatcacctgaggtcaggaattcaagaccaacctgcccaacatggcaaaaccctgtctttactaaaaatacaaaaattagctgtgcgtggtggtgggcacctgtaatcccagctacttgggaggctgaggcaggagaatcgcttgaacttggtgggcagaggttgcagcgagctgagattgtgccacttcactacagcctaggcaacaaagcaagactttgtctcaaaaaaaaaaaaaaaagaaagaaagaaagaaaagaaaaagaaaaagaaaagaagaaatctgttatcacaaacccttgtagcagaacacatctccccatgtatacaagcaattgtgcctagggtggacacgttccttttctgactttcaggaacgttctactctgtctatggagtagctgtccttttgtcactttactttcttaataaatgtgcttttactttgcactgtggactcgccctgaattctttcttgtgcaagatccaagaaccctctcttgggggtctggatcctgagccctgtcctgtaacaataggacataaaatcatctttgaagtctgggtgaaagacttgaaagaaaaatctttcggtaatctcacgagtcagctagggaaaaggtgctgaggctgaactccatcagacacacacgctgggtggtcagtggtatggaatttctgggttcttgccctacctctctgcttctagccagtgatgtgattttgggaaggtctctccatctccaaaaggctcagttttctgagccttttagatctattaaatcactggagtagactacagtatataatgtttttagtccctatttcttctaccgttttctctctctctttctttctttctttcttttttttcttttcctttttctttctttctttttttttttttttgagacagggttttgctatgttgcccaggctggtctcaaacccctgggcacaaagtgatcctcctaccttggctttccaaagcgctgcaattacaggcatgagccaccatgcctggcctttttctaattttttttttaattgaggtgaaattcaccaaatataaaattaattattttaaagtttacaattcggggtatttagttaattcataatgttatacccacctctatctagttccaaaacattttcatcaccacaaaagaaaatcctggacttccctctccctctccctctccctctccctcctctccctctccctcctctccctctccccacggtctccctctaatgccgagccgaagctggactgtactgccgccatctcggctcactgcaacctccctgcctgattctcctgcctcagcctgccgagtgcctgcgattgcaggcgcacgccgccacgcctgactggttttcgtatttttttggtggagacggggtttcgctgtgttggccgggctggcctccagctcctaaccgcgagtgatccgccagcctcggcctccggaggtgccgggattgcagacggtgtctggttcactcagtgctcaatggtgcccaggctggagtgcagtggcgtgatctcggctcggtacaaccttccacctccccagccgctgccttggcctcccaaagtgccgagattgcagcctctgcccggccgccaccccttctaggaagtgaggagcgtctctgcctggccgcccatcgtctgggatgttaggagcccctctgcctggctgcccagtctggaaagtgaggagcgtctttgcccggccgccatcccatctaggaagtgaggagcgcctcttcccggccgccatcccatctaggaagtgaggagcgtctctgcccggccgcccatcgtctgagatgtggggagtgcctttgccccgccgccccgtctgggatgtgaggagcgcctctgcccggtcgcgaccccgtctgggaggtgaggagcgtctctgcccagccgccccatctgagaagggaggagaccctccacctggcaaccgccccgtttgagaagtgaggagcccctccgcccggcagccaccccgtctgggaagtgaggagcgtctccgcccggcagccgccctgtccgggagggaggtgggggtcagccccccgcctggccagccgccccgtccgggaggtgaggggcgccactgcccagctgcccctactgggaagtgaggagcccctctgccaggccacacgctccgaccgggagggaggtgggggggttagccccccgcccggccagccgccccgtctgggaggtgtgcccaacagctcattgagaacgggccaggatgacaatggcgcctttgtggaatagaaaggcgggaaaggtggggaaaagattgagaaatcggatggttgccgtgtctgtgtggaaagaagtagacatgggagacttttcattttgttctgtacaaagaaagattcttctgccttgggatcctgttgatctgtgaccttacccccaaccctgtgctctctgaaacatgtgctgtgtccactcagggttaaatggattaagggcggtgaaagatgtgctttgttaaacagacgcttgaaggcagcatgctcgttaagagtcatcaccactccctaatctcaagtacccagggacacaaacactgcggaaggcctcagggtcctctgcctaggaaaaccagagacctttgttcacttgtttatctgctgaccttccctccactattgtcctatgaccc

SEQ ID NO: 5112 - DNA, 6000 bp, Homo sapiens
ctcagaaatggaaaaccaaacatcatatattctcacttacaagtgagagctaaactgtgaggatgtaaatgcatagaataatataatgaactatggggacttcaggggaaggatggaagaggggtgagggataaaagactacacattgggtatagtgtacactgctcaggtgatgggtgccccaaaatctcagaaattaccactaaagaacttatccatgtaagcaaacaccacctgttcccccaaaacccattgaaataaaaataataacaacaaatgatttaatttcacagaacttttaaaaagtttaatgttcagagttgataataataaaagaagttagaaaaaaatgtgtagcaagtggtagcctctggacaatgacattctagattttcactttgcatacacttctctaccacttggaaagaaagcatacacatgaatatatcaccactatgataaagaaaacaccgaaacatggtgtcaggccattttcagccttgatgatcctatgatctacttatttctttagttaaaaagcctcataacgaaagttcacattacttaatctgatatctaggcccataattgattttcaaaatcaggacagcaattacttacaggaagctgaacaagatgggacatgatgggagaggctgatatgtattggatatgggacagaggccaagaatcatctcagttaggatttgtgcctcaaatacctctggcctctgatttgtccatagtcctcatacaggaaataacaagactgtccagcatcttcataagcctggattgctaaccagctttcatttcagctcctgtaggcatctcctgaattaagcaacacagaaaagtcctctgaagacactgaatcccagaaaggctctctacctttagcacaagggaggtcttcaccacaggacaaaagaaggaaagataagggtaagtaccaagaactgtcttcttccatggtcagttatggtttttgctatcagatcatgtcctgtgcttccaccttggtgctacatgcagggggtcatgagcttgtttcaggaaaagacaggagacacgaagcttcgttttggaaactgagtgctgccagcccaaactgtgtgagttccaaatggggtcccccttctgatttatctccccgtatcatctccttcattccaatcattcaatctgctctcctggagagaatgctgcctcttacattcatttaaggagccagaagacatgaagacatttcttcccagagttgaactgctgtagggccggttttattgtttcacttactttttaaatttattcttctttgcctatctggaaaggaccaaggaagttatagatagtccaaactgaaataattaaggagtgtttcgtgaggaaagtatttacaaagatgcgcagggttaagggaaagagatgaggcatggcaaagcacctcaagcagcaatacataggggagcactacttcctcccctaggctgaaaggcacagggaaggagcagttaccattgtcgccatagccatagttgtagccataggggtgggagagcacgagcaggcaggtggagaagccctgcacagccaacacacaaccacacaggccgatatggtttggatctgtgtccctacccaaatctcatgttgattgtaattcccattgttggagggagggcctggtgggatgattattagatcatggggatgattttgcatgaatgtttcaacaccatccccttttggtattattgttttgatactgataagttctcatgaaatctaattgtttaaaagtgtgtagcacctcctccctctctctcttgctcctgctctcaccatgtgagatgccttgctccccctttgcctttcatcaggattggaagctttctgaagcctcccctaaagcagaagctgctatgcttcctgcatagcctgtagagccatgagccaattaaacctgttttcctcataaatttcccagtctcaggtatttctttttatcaatgcaagaaggaactaatatgcaggcagagagccaggagatggaaatcccaagtcactctcctgctgtcttccagtctcctgccagtatgtcccagtgtctcaatttcattagaaaccagaaataaaaagaatcctactaatgtggtacatggaagccactcacttgggatgtcaaacaggatagagaagaacggaaagcaaatcctcatgccaaatgagactattcctcttaccttcttatatcctcctacttcctgaggcttgctctgcctgaaggtgattgattcctgtctcatttcagctccatgagactactttaatgtttggcatgtctttctctactgtcacttttatgcagaaatgtttgcatttgtcaaaaatgcatagaaaataaaatgtaatttaaaaagagaacatatttatttgtttagaatctaagtttggctgctctaaaaaagacatgaagtagaaatatcttaaacaaaaaagtataattgtgtctctgggtcactagattctgaatctgcaaattcaacaaaccacaggtggaaactattccaaaaataagggtatggtggagttgtgtatgtactgaacaggtacaaacttgtttttcctcgtcattatttctgaaaaactacaatataacaagaatttacatagcatttgcatttcgtcagttattctaaataactaaaaatgatttaacatatctgggagaaagtgcataggtatatacaaataccacatagaaggaaatagagcatctgcagattttggtgtgtgctaaagttctggaaaaaatcccctgtgaatacccagaaatgactatctttgaaatctgaagtagaagctccaaggcgtcacacatcagaattccaaaaattggggctcccagtccctagagagttgccctcatctttgtgatcttgcatggtttccagctacatcagcattccagccttatggaaaaggacgaggggaaggagaggctttactccttctattgatcctgtgagcaaggaattgcttacatcactttgtgattcttccacttaacagcacctggtcatacaatgtcatccagcatcaaggaaaactgggatgtgggtctttgtgctgcttttatactctcagaattgttatgtgaccgaagaggaaaatgaatattggggcaatctagcagtctcttcagccctgattgtctctgactctgtgctcacatcaagatttttcaggaactcctcagaaataatgaatgatggggcagagaacagaactggagcctcatgcagggttccagggaccaggggctggtattagacttgctcttcgtgttgtgaactcaggaaaaccctttaattctctatgccttggcttcatcttatgttatatgaggataataccatagatggtctttaaggaacacaggctaaatgttggtgatactacagggaaaatgacaggtatgacttagtccttatggagctttggttttcatgaggaagacaaacatatcataccataaatatagatagagaaactctttagtgccctgagtgtggataacagaggctctccttttcctcccatttcctttctgggccaatcagggctgtggcaccttgcccctctaagagagctcatgatggatgcattcactcctgatgcttctctgtactcccagcaaagggtgcatcttctgtccaccaggaggcctcctgcccctgtgcatcctcaggattccagagcaaatgtgacctctgataggcaaaaaggaactcctgaatttattcctaaatggcattcactcacctctattttgttccctctttgatttgcctctccttctctatgtggagtttgcttaggtcagtttttttttcaatccacaattttggctgccaacttggatttaacttgagaatcactcctctgctttactccctgtaacatatataatcgacacagggtggtgctgggtataaagggctgctccaagactggattgtgagtcagacctgccggactcaaattcatactatgtaatacataacccctgggacaaataattccctttcgttgtgctccaattgcattatctgccatatgggaataataccaattcttacctcctaggctcttcgggtgattaaaagagacaataccttacaaactctcaatcagctgctgttattctcccagattagacctaatcctcattctccagttgaaatctgcatgaatctctctctttacactccaagccctacacatcgcctatttcccctcatggacgcctctcatacaaatgtttgcatcaacaaagaaatgctaccaaagatctcctgaaagagagaaccaaaaagtttacattgtgtatacccagcagaacacttagtagtcccccatagatatttccacacttcaattacctccgtcagttacactcagacctcatcttcacttactctttcctctgttctattgctgagtaattcagctcagacccacaccctacccaaacactgtgtacaaaaatgcttctaggtgttcagcaaagccacactgagtcttcatttcaaaggcacatcagtggtcaatttcaagttttgggcacacatcaagaattcttctcaacacagatacagctttccacaaatagaattctgatgaattaaattttcttcatccagttatacgtgtgtgttctaataccttacattgtgctttcatctttattttccatttcatccaaatctaccagtaccattagtctcatgcatgcattcattcattgaatgaatgtatatgaaaagcacagtgtgctgctcatggaaataggcactgggagtataaaatgtaaaatgtagtcctgtctgcaatgactgacacactgagttatttctcacccaccaggcccagccattttcacacttatcctagcaaaggtcacattttcctctagttcataatgcatggtcttccttcctgtccatggatgaccagtcctagtcacgagtgtgtcacaaccacctctttgtgtatctgaattcctccacctgaaagaaaatttcagacccaggatagattaatcatcgggtccaaagccctggccggatgagtgggggtgttttgatcctaatgttattcccatgtcagcacagaacttgtgtggcagtagagagatgtcaggcttcagagtcaacaagaactggatttcaaactggatttgaggacccccacctttggtaagtgacttattatctgcgagcctctgtttctctcttctttaaatgaggacagtaaatcccatacggcagggtggtggggagaatcagagatgatacagctggtgatcacatctggtttgtgttcccaggggcaccagactagggtttctgagcatggatccaaccgtcccagtcttcggtacaaaactgacaccaatcaacggacgtgaggagactccttgctacaatcagaccctgagcttcacggtgctgacgtgcatcatttcccttgtcggactgacaggaaacgcggttgtgctctggctcctgggctaccgcatgcgcaggaacgctgtctccatctacatcctcaacctggccgcagcagacttcctcttcctcagcttccagattatacgtttgccattacgcctcatcaatatcagccatctcatccgcaaaatcctcgtttctgtgatgacctttccctactttacaggcctgagtatgctgagcgccatcagcaccgagcgctgcctgtctgttctgtggcccatctggtaccgctgccgccgccccacacacctgtcagcggtcgtgtgtgtcctgctctggggcctgtccctgctgtttagtatgctggagtggaggttctgtgacttcctgtttagtggtgctgattctagttggtgtgaaacgtcagatttcatcccagtcgcgtggctgatttttttatgtgtggttctctgtgttt

SEQ ID NO: 5113 - DNA, 6000 bp, Homo sapiens
tgagtaagataaaggaggtgaagggcacatgggctttggattgactggtttgcatatcagaagcattcactgggacatgctgatttttatatctaagaattagctggctccaggaggagcagtcttgaggattagtaaggcccccaagatgttaaagtatcataaaatacagaaaattttaaaaataacatgattaataccatctccaacaatattctgagtatagcctaaaaaattattcatgatctcatctaacctcattcctattgtttccttcaatacactcggtacaccaggcagctctgacaaatttccaaccattcctccaccctacactccactgactgcttctgcaccttgaaagttgtggtttcttttgccagaatgccttcctaccacatggggcagatgtcttttttctataaaagggataaacttgacatacaaagttattgtgtatcatgtgccttcctgaagtctacagacacttattttcctgctccaccaaataaccctctcaaagcagtgagattagtctgataggaattgtttttggtgagccaatgaaagttactagagtcagagatcttctttttttttaatagaaaaaaaatggggaaagagctcacacatttttcaagcatagaggcatgttttctcctcctatgtaaaacctctcatagcacacaaaatgctgatcttgccactcccagcagggtctccactctggcctgcttcccaccatctggtatgaaaattttctcaagacctattgcagtagctgttttcaaaaaaatttcatttctcccgataaactacctcctccttgggactagaacccatgctttagtcttatctcttgtccccagtgcctttcagagtatctagaacacagtaattctagaaagatatgcagttcttgggacaagtgatgagcattagaaagactggttttgaatcatggctctgccacttttaatattatgcccttgaacaatgtatgtacaatcatttttatgtctcaggtaactcatctgtaaaataagaaccataattacaagattattttgaagtctaaatgagatgacacttaaatcacttagcagggtatctggcacataatacatgctcaataaatattactatggggaaagctgacaagttgttttagccagtgtgacaccttggttaaaattgccacattaaccaaagttgtcacattagctaatatgataattttcttgtcacttcaaaattaagtaatgagtcgagaactgagaatgcatatgtttcttgcaaaatatacctctctggacactcaggataagtaaaatccatttgtaaaggcatgtagtaataagtaaattgataatcaaagattatgcttctctaaagcgccattggtgtaggggaaaaaccatgaattctataatgagattgccttgggttcaaatcctaatttcacttacttctgaatttactttgggcaagttaatgctggtctagatatattttcttgtctggaatatgaactgtaatacgtacttcaaagaattatttaacaaagaaaattcccaggggggcattttgcaaagaatagattcccaatatataacagttattatcattatttttaaatcatttccttcttctgcactgagcaacaaaataaagtaagccacttttttttttattaattgccttttcagagaccttcaaaactatcaactcctgaggtgtttaaggaatcaaatacactgggaaccctgaacaggtataaatcacctggatccaccatgtgatcctctgttgtttgtgactgtgacagttgcagataagtgttctggtactgagtggaaataacacaatgcttctgtactcatattcaaggttggctgtaaatataagagacatagcaaacaattgagccagtgcttggaaacatttattgacctcacatatataaagtacttactagtgacaaaatgtgaatctctcagcattatcctactggtttggggttaggtgttataaccaaaaagagggggacccatggagcccaacagcaactgctaacctaacatcaagtatgaaagaaggtggcttactgttaagtattacatcctctgagaaagacaacaccacttaccaattgtgtaataactagctacttattaaacctcaatttggtcttgtgtaaaattattgctgttaatcttgaaacatagctatgatgggtgttgcgaggaataaataaatataacatgtgaaacactaagcacagtactagatttagagtgaagtgttcttaaatgatagttattgcttttataaatgatccaatccccgaatcatcattagagagaatattagaatcagaagatgttgagtccagcagttttcaaattttttcttcaagaaaccccttggagttcccttggttccatgttttcaaagatgttgcctcatccaaaaaattgttctaattttgtatgaagtaatcaatttaagacaaacagcccatatggccacagaatgaaactacaaatcaaaatgatttaacattaaaatgatacatgttttccaacaaatgcagatggaaaaagagcattttctaatgaagggaaaataacagaagttaaactaatgagacgtaatataagataacaagcagagctacaagacaacagtgaagtaggaaagggacataagaatttcagggaagtaggttgcaatatggtgatcagggaacaactttagaagccgttaagaactgagaaatgtgagggaactggctataaagactcctaaggggaagagcattgcaacaacagcgtggagtgaaggcaaggcattgctcataccatggtattctagaaactgaattatagaatcatactatgttattctagaaactgaattctagatcataccatgttattctagaaaccctttggaatggattgaacaaagaggaaaagagtaggagacacaagcaagtgagtaaagagggcaaaagcacaaagatcttgcacatctttgtaagagtctaacttttactctgaataagtggaaaagtcattggatggagttcttagaagagaaaactaacatgatctaactggcattttaacaggaccattttggctgccatgtggaaagactcaagtgggataagaataaaagcaggaagaccaattagaggccaatcatggccccatgtagagtgaaaacactggagctgggagaaactagtcatgttctagatgcattttgaaggtagaatctaggagatgttgctaattaataagcgacagagtgtaagaaagagagtggtcaagaataatataaaacgactctccctaacatggaataatgccatttactgcagtggagaagactgaatgaggatcaggttagggaggattgttagtaaaatttttttcttaatgataacacttaagcaaataatatagctcttagaatacaatgataaaacagtattccctgtgaactcaattttcttaagatgcccaggagacattagggaagaaatattaattgggcattggaatccatgagtctcacttcagggaggaggcatagtcaggggaggtaacattggagtcatgtgcatatggaagcatttaaagtcatcagattggatgagattaccagaaactgatggcagatggagaagaccagtggttcaagcgctgattctggggacactccaaagttcaaaagtctgttctgtagcactgagacacatgcagcaagagaagtagaagcaaaccagacaggtatgacaacctgaaaaccaagtaaagattttccagcagagaaggagtgagaaactatgacaaacgctgcaggtagatctaatcagaagagaacttcatcattcggtttaatcatgtgagatcattgcaacttgaatggagtagaggtagcaaaagctcaagtggaacaatcttatattgttctatatttactcagaaataacactgtttactaacattgatgtttattaatgctaatattgagagttgagtgtgaactgagtgtttttcctaggtcccaagaggaagatcatacaaatacaaatcatgtacacttgaattttaacttatttacctacaaaatgacttaggttaatgagaagttagtctgtcaagaattgtctttacagtgtaagacagatgtatgctagatatattttgctctacccatttcaatagaacatttgtagttctatatgaagagaatcctgaagagagtgggtagattttcaagtcatcataagaaatactgtagtatacataaattacatttaaaactggtgtttcaattattgttattattgtgtttattatagaatatgtgtaaaatatagtaaatactgtgtacttcgtaatttcatcattgtatatcattcttctgtacacattttccccaaaacattgtatctattctcttttccctttatacttttcttagtattttcttaggcctatatataatattatgagatatgaatttataatgctttcataatgtttcaatgcatagaaactagaggaaaaatactttattctttttaaactatatttaaaagagggatgcccagtattttaaagacaaacaagtgatacttaaaaatagaaatgtacacatttagcaaaagagaaaattgacaaaaggaagaggatcaaagtataagaaaaatagcaattataagtacatcttttcttcacttgaacagtcattcctaaaggaaaaacataattaaacaacttaagaaatttagaattgaatacataattgcaaagcctgattgttgcaaaatgaagactttctaaaacaaacaattagattgttggttctagacttcacgaaacactgcaaatgtgatcttatgtaacataattctacatattcatgacagtaatgcaaactgagctcattttctttccccataggtgagattccttacagccatgcagaggagcaatcatacagtgactgagtttatactgctgggcttcaccacagacccaggaatgcagctgggcctcttcgtggtgttcctgggcgtgtactctctcactgtggtaggaaatagcaccctcatcgtgttgatctgtaatgactcctgcctccacacacccatgtattttttcactggaaatctgtcgtttctggatctctggtattcttctgtctacaccccaaagatcctagtgacctgcatctctgaagacaaaagcatctcctttgctggctgcctgtgtcagttcttcttctctgcagggctggcctatagtgagtgctacctgctggctgccgtggcttatgaccgctacgtggccatctccaagcccctgctttatgcccaggccatgtccataaagctgtgtgcattgctggtagcagtctcatattgtggtggctttattaactcttcaatcatcaccaagaaaacgttttcctttaacttctgccgtgaaaacatcattgatgactttttctgtgatttgcttcccttggtggagctggcctgtggcgagaagggcggctataaaattatgatgtacttcctgctggcctccaatgtcatctgccccgcagtgctcatcctggcctcctacctctttatcatcaccagtgtcttgaggatctcctcctccaagggctacctcaaagccttctccacatgctcctcccacctgacctctgtcactttatactatggctccattctctacatctacgctctccccagatctagctattcttttgatatggacaaaatagtttctacattttacactgtggtattccccatgttgaatctcatgatctacagcctaaggaataaggatgtgaaagaggctctgaaaaaacttctcccataaatcaagattatctccaccagaggagaaacaaagacgaccttagatggagtgttgtgtatttcaaacagagttaccattgtgc

SEQ ID NO: 5114 - DNA, 6000 bp, Homo sapiens
gaggggagggtgcaagggtgatgggactgaaaacaaacagaaggcctcaactgtatctacatttttatctgtctatcatcgatttatctatctatcttcaccattataatcatgatcatcatcatctattaatatatatatgtctttgtttctctcagtctatcaatcatatttttacaaaaaaaggatgtggaataattattgccaaaagttaataattgataaagctggatagcagtaaacattatattatgttccttcttgtgtataaagttgattatttcatgataaaaatacaatgaaaagaaatgcctgcaaaaaatactgtgccagactctgtttctgaatgctgttaaggctgaaaaacaacatgttgagattgagcctctactgtggaatgagatttatatatgatcttgtagacctcatcatcatcatcataatatattaaaattggaagtacagtgaatgatttcaaatctcttctcagaggggtggtgaaggttcttggctttttgttctagtctgtgttcttcctttgccagtgttggttctgtagccccacttcctttgccagtggggttctgtagccccaacattggaggttgggatatttgattcctcgggcaagaggaaaataataggaatatgatcattcaaagcctcttttattactttcacacacacaggagaattctgcctttaattgctcagtttctgaacttttgtgatgtgaaactgggacaacagatagagtggcaaaactcaaggagctatcaaggctgtactggtttacactgtaaagccagaaagacatagtgttccagaaaggagaggagaaaggcaggaaccagtggggcctgggctggagagcagaggtttggagtttgcctctatttcctttgttctccaggtggctgtttccctctgaatgtccttggcctgaagacatggtgttcttcctagttgcttttgatcagccttacatgtgaatgcagaagaggattttttaatttttaaattttttttattttttagatttgcagagtgagagtcattgacagattgggtcagagctgcaaagaggtttttccattgagtgggaatgcagatacggcacggttcaacatccttcctgcctagagcagcctgaagtgtcgtggtataatgatcttatgtctactgtcaggtggacaaagccctcaactttgtttccttatttatctctaagtacatccttgtcatgtagttttattttcctaattttagaaaggtagcaggtctatgaagaggcttatgtaggattcaagtccaagtgttaaagcaaactaaatatggcctgagaaggactctgtacttctatagctgagtcctcgtggatgagctgtaacctagcgtaatagattacagtggaacaacaattatatacaattttgtagacctcatcatcataatatataaaattgaaaacctaacttactagtgtgcacctgtaacaatagctgcgtgttggctaatcctagcggccatacttcaaccactcacagactgttgaatattactgccttcaaataaggcaaacgtccagctgtaaccaatctcactgtttctcacttccgatttctgtatatcactttaccttttttgtctatacatttgttctgatcacgaggcacccctagagtctctgtgaatctgctgtgattctgggggctacccaatccacgaattgttcattgctcaactaaactcctttaaatttaattcagctaaagtttttcttttatcacaagtctgtgatgttttacactgagcagtactgcactaggctttttgggaatgcagaaaatataagacatggccctgtggtaaaagatctttattgtttagttgggaagacaagatatttgcacctgatacattaaggctggacccaagtcatacaaaatcaaagaaaatgatcctatgcgttgaagatgtgttaaagaacaagtcatctatattgcctttgggctttgccagctttggtccagctgccttctgtgatcaaacacagtggatactcaccatccttgatgttctttttgctttatattgaaataacactgtatttcccttttggagaaaacaattgcccagcctgtaaacaatcatcaaatgccccagattaactctttgaaaggaaggcaatttggcacagcaacattcaggttaaaagtgaccctaagtcacagcctctatggaattgtgagctccttaagggttgaagctggtacttcacatctatattgcacagagcctggcccagagtggctactcagtaatgtctggtgttatcattgcagattattttccagaagtgggggatagggggcaggtaggtggatggtgatatctgacccactctattgaggaaggcctcactgcatctgtgataaatctgaactctatagatttcgtgtcaccatattctagagtagtttggagtcagagaccttggcaaagagtctagctgtcacggaatcttccctggttggcccctcatcctccactctgaggcatccgtcgtcctaatctacagatttggaactcccacgtagcttctgcataccctctgggacaaagtttttcataatttattattttcttttctttgttgtctgagagctttaaacctccatggagaaatggtcccatgggtcacccctgggagagttacaggcacatacgtggagtatgaggcatcttatagccagctacaattcttgttacttctctttccagttcagccagtggcagatctgtgccctctacctttggttcagagaaactgtgctccttgaatttggggtctctgttcttcagtgggattcaataacctgtcctggccaccagttccaaggttctgggcatgcttggccttggtgtttcacccagagaagacactaggaaactagagaagcagtgggaggcaggtacgtggctcctctagaggcctatatccaaagagcatgcaaggcgtggtgtatggaaggaatgttatcaatcaaatggataccaaatctagaggtatgattcctgactttggtatagcccaatcttttcttcagagttttcccagtttgtaatctcattttttgttgttcaaaacctcttttttttttttaaaaaaaattatttattttatttatttttgagtcagagtctcattctgtcacccaggctggagtgcagtggtgtgatatcggctcactgcaacctccacctcctgggttcaagcaattctgcctcagcctcctgagtagctgggattaccatgtgtatgccatcatgcctggctagttttggtatttttagtagagacagggtttcaccatgttggccaggctggtctcgaactcctgacctcaagtgatccacccacctcggcctcccaaagtgctggggttacaggtatgagccaccacacccggcccaaaagctcttttacagagtcattgtggttttaaatatcaattcagttttcaagtgagaaaatggaggcacacagaattcaactgatttgcttaagctcttatagagtaggggtgccgagggactttgtggggttttagttctccttcatctccatctgcctcctcaagccacctcaaacctacaatctaaacaaaatcaatttgcttttgttattccagggcagcttcatgaccattcccagagtcccaccagatggccattcccatgctgtccctttattgaaattctgtggtcatcgcatagtccataagcaatagaagcaaaagagtaagcaggttttaccagagtgtacctttaaagtttcaaagaacccgcacatccactatctcatcaattcacagaatgttctgagagacaacaagaatagatattattgctgcctagagattaagagctagaagctcagaaagcttgattctcaccttggttcctgtctgctatagtggactctctggcttggtttgggtctggggtctctgtcacatatatggctggagaagcctcccacttattttcttatacctcagtttcccatttgttcccatcataggcagactatatgtcagtagctttgaggaacagattgtatctgctcagtattgaagtcctggaataatgagagaagcgcccagttaattgatcagattttattttaggaatatcaccctccctggggaggtggtatgatggaaagatggtgggctctggagtcagactgggctggattctcatctggactctgtcacttactagctggttgaagcagggattttgagagccccacatactaggtcctttcctcttcccagctacctggcaactaagcaaacctagggcttggtggaacagagtttgaaaacagctgatagagtacagctttccgggaaatttagaattaaattctgtagctaagaaaaagaaattatatgtagaaatcaattcaatttgcctcccacccaaggccatgagagcaggctgctccagatatacaagacatcattcctgcaggcattgtcagtcttgtagtccgttgacagtaattgcatggacaacacccaaattgattgacttttctgtaagtattgttgaacttccttttccttaaatttccttaaaaacaggtagctagaaatggaaaggaaactaagtacgctgccaacgtacaatcaggagcatgcagccacccttttattacatcagtatatatttattgcatgtagactacatgtcagtgactttggcattagcaacacagtaatgaacaaacaaacaaaggcactatcttcaaggagcttccttttgtgtgtgtgtgtgtgtgtgtgtgcgtgatgttatagacaaacaaataaatatctaccagatggcaatgaagctgtgacccaaaaaatcaaactgagaagagggtcagagagtgaaaggaactgcgttttcagataggtggtcagaaagggcctctctgttaaggtggcccttgtgcagggaattgaagaagtgcaggaggatgccacacagagatggtagagggagcgaaaggagcaaaggccctaactttcccttaatgatgtctccttccatctttagtccagcccagcaatgtacatgttatccttcccgtttgaagatgaagacactgaggctcagaaagatcaaacgcctttcccaaactcacagctacggcctgacggaggtagggtcaaatgcagctccactgatttcagagacggtgctgttaacacagggggctgtctgcatgttggaaagtgagatgtgctgttgctgtcacgttgcagtgggagtggggaagcaggctgtgatgagctagacccaagaggaatcagagagcaggtctccgggcttcatcctgggcatctcctagccccgctgtctgtctcataacacccacccactgcgcctgctcacctcggtttgttggctgtttttttttgaaatcatttcctggatcttagtaagtttattttccagttcctttcactttttgggactaggcccccagatgccaggtggagagaactgaaagagggagaaatccagcgtttctcaccaggcttgtcacgtagctacacaagcaaatagctacaggaaccaagtttcaattttcgtgcatgggcctcaaactgtttttccatatttgttagggaaaatcttggccagggagcaccgtcttttgaggacaccaaattgggccaagttcctgtgcggcctttctccttatttagtgattgccccgtgtgaccctctcctctctggctgacctcttttttcctgcatggcacttggtggataaagttccctgaaccttggagaggaagcggatgctgttaatagccctgggagtgtgactgtgctttgcagctcactggagcctgtgggatattcctccagccttggcggggctccgagctgcagggaaattaacctcagagtcagggcagggagccaggg

SEQ ID NO: 5115 - DNA, 6000 bp, Homo sapiens
ttttcttttgctgctttcaaaattctcactttgcccttgacctttgataatttatcataatgtatctcagtgtggatatcttggtatcatcttatttggggtccactgggcatcgtaggtgcccattaggggatttctagatgcccttagatttggaaaatttcctttattattttttgaataagctttctttttctctcccttctttttccgagaatcctataatttctatactgacccacttaatggtgtcccataagtcctttatgctttttcttttttttttttttttgagacagagtctcactccgttgcccaggctggagtgcagtggcacaatctcggctcactgcaagctctgcctcctgagttcatgccattctcttgcctcagcctcctgaggagctgggactacaggcgcctgccaccacgcctggctaatttttttttttgtatttttaggagagatggggtttcaccgtgttagccaggatggtctctatctcctgaccttgtgatctgcccgtctcagcctcccaaagtgctgggattacaggcatgaaccaccaagcccagcccttttaagctttttttttactctttttattcttttcatttctgtagataatttcaataaactttcttcaagttcactgacctttacttctgcttgctctagtctgctgtagaacctacctagtgaatttcatttcaactattgtgttcttcagctctatgatttctattagatacttttaaatctttctatgtctcttgaaattctcatattcatgcatgttctcctgaccttattttgcatgtttacgatggttattttgatttctctgtcaggtatatcacatatctttgtatccttgcggtcagtttctggaaacttattctattttttggagcatatttttctgtttcttcgttgtccttgactcttgtgttgatgtttgcacaatagtctcatagaatggactcatataggagaagcacttcaccaatctgccagtccagacattctgggagcatctcaagtccagatgctatctcagactgttatttctgttctcagtggttcccaggcatttggaatatggcaggacccataaatgctctgagacagttgaggtagagccagtgccttgggcagccctcagaaaaatcagactgttgaacatatggttctctctttttctttcccttctcagggagctgggttttttttttgtttttttttttttggaaagggagcagttgtggttcagtgttgttctgtttgttttgcctatttgctttgccctgagctggaagcggggaatgtggcatgtagtagcttgctattcaaactgcagcctttgttcttaatgatgcccctgtgtctagggtatgccaggtcctgtctgccattgcctgagataggtaaaacagaagtaaacgccctggcagcccccagaaaaattagaatgctggacttatggcccagtgttttcattccttcaccaaggagaagcttgaggaattgccacactgtcttccacaatggttgaactaatttatactcccaagcgttcctatttctttgcatccttgccagcatctgttcagtttccagactttttaatgatcaccattctaattggcgcaagatggtatctcatcgtggttttgatttgcatttctctaatgaccagtgatgatgagcttttttacatgtgtttgttggtcacataaatgtcttcttttgcgaagtgtgtgttcatatcctttgcccacttttcgatggggttgtttatgtttttttcttgtaaatttgtttaagttccttgtagattctggatattagaactttgtcagatggatagattgcaaaaattttctcccattctgtagtttgcctgttcactctgatgatagtttcttttgctgagcagaagctctttagtttaattagatcccatttgtcaattttgccttttgttgcatttgcttttggtgttttagtcatgaagtctttgcccatgcctatgccctgaatggtattgcctaggttttcttccagggtttttatggttttaggttttacttttaaggctttaatctgagacagcataaatttcaacttgtagcatgcaaattcatgcatatttattttaagtaaattgagcattcagtttgagaaaacaattgttaatggatacaaaagcaaattttttgtcagtttcaagaaagaaatctagtatgtaacttaaagaggaaaccttgcttgtcaaagaggaagccagagatgtggggtgggtgaaaggcatgtgcaaagaccgtgctagaggaggaaagatacatggtagggaaggggtgttagctctgttatctcttcctttcaggtagcagcatagttaaaactcatcttgataattttgcctcaccaaaaaagccagtcattttgtcatatgtttcaatgttcattattgtgaaagatgataaaacatggctgaagggaaccaaagtgtgggcatagaagataataggtaacttacgaaggggcaaggaggtggttgtgaaaattggaataggaaacaatttggaggccgtaaggtatgacaggttctgatttgcattttgcaaggttctgttgacagttctcacaaaacagcatcgtgtgcaaacaccaaagaccatcttcagtttgtttccagtctaaatctcaagttcaattagtgattatttgctgcacaaataattaactactataagctactagaaaacgccacacagaaccatgacttcaggacttttcccagcaggtgtggggtaatttcactaagaaggaggcaataaggctgggtgccggggctcacgcctgtaatcccagcactttgggaggccgaggcgggtggatcacctgagatctggagttcaatctagcctgaccaacatggagaaaccctatctctactaaaaatacaaaatcagccgggcgtggtggcgcatgcctgtaatcccagctactccggagactcaggcaggtgaatcgcttgaatccaggaggtggagtttgcggtgagccgagatcgcgccattgcactccagcttgggcaacaagagcgaaactccgtcaaaaaaaaaaaaaaaaaaaaaaaaaaagaaaagaaaagaaaaagaaagataaaatgaaaattcgtggctgggcgcagtggctcactcctgtaatctcagcactttgggaggccgaggtgagtgagtcacctgaggacaggagttcaagaccagcctggccaacatggtgaaaccccttctctactaaaaattcaaaaaaattagcccagtgttgctgcacactcctgtagtcccagctacttgggaggctgaggcaggagaattgcttgaatctgggaggcggaggttgcagtgagccattgccctccagcctgggtgacagagtgagactctgtctcaaaaaaaaaaagaaaaaaaaagaaaatagaaaattatcgaggctatcattttaattttaagtctgctctcaaatgttaccttgtctgggaattccttccctgaactctacatatcccctatcaggcagaattgttttacccttctatgtgttccaacatcctctggcctccaacatattgggtaataatatatcatttatctttgttctattctgcttgattgtggactagaaggacctgggattttggcattcatctgtgcatgcacagtgataagggcagtgcctggcatggaacactaagttctttttggatgaacgtataagtgagaaagttctattccttaattccaatagcaccttgtttaggtccaccaattcctgaagacaccatgggaagatgacacctgagttaataaacttagatacaaaagctataccaatatgtcttttagtatactctgtttatgcaaatatcttagtttcctgcaaaaagattttctttttcaccccccacccccaccaaaaaaaccacacatgattagaggtgtgatttttagtatcttaaatattattgaaagccattcaaggttatgtttataattaaactgaaataaaagagattaaaaccttctctgaattttatctgtactgattttgctatggtctagctagttatggtatttcaatgatcacatggtttagccctaattctaatttaggcatactactcaatccaatgctgtttagatttgctcatgggatttgttataaagttcatgtctctcagtgttctcactatcccattcttgccactgtaaagatctaagcaccatcagtctaataatttagcagacaatggagtcttcttagcttttacacactatcaggtatggttcacagcagttagaatgcagcctgttgtatttccaagaccatctgctgcagcgaatcatgtaaacagtttccaaaagacggaaagagagagaaagatgatagatattaaagtcagagatggatctggagatttagagactaacacatactcactcacatacaacagcacttcagttttgggtctatgtgtgaaaccaagcatgccttaaacaaggaagacaagcttttcaaaggtgcaattggataacttctgccatagaaatggctgaattgggacacaagtggggacaattccagaagaagggcacatctctttcttttctgcagttctttctcaccttctcaactcctactaaaatgtctcattttcaggttctgtaaatcctgctagtctcaggcaaaattatgctccaggagtctcaaattttcttatttcatattagtctttatttagtagacttcttaatttttctattcatcacaagtaaaagcctgttgatcttaatcagccaagaaacttatctgtctggcaaatgacttatgtataaagagaatcatcaatgtcatgaggtaacccatttcaactgcctattcagagcatgcagtaagaggaaatccaccaagtctcaatataataatattctttattcctggacagctcggttaatgaaaaaatggacacagaaagtaataggagagcaaatcttgctctcccacaggagccttccaggtaggtacaaggtattatttttttctaccctcagtcacttagtggcaggggaagtcatagtcacggtgcttaggagatgaaactttattgatttaggcatggatccatctagtttaattaatatattgggtatgaggaagctacttgctgtactttccatgtggttctctctccctggagaggaacatttttactcagcttgcaaactggaaatagattttctcacattagaagctcattttctgggtatgagacaggagagttcatactgtgtatgtagatctctggcttctgggtctgacatgtgctgagggacacatatccttcacacatgcttttataaatacttgataaagtaacctgcttcttgattggtctttataatccataagctgtgggatgcttctctgaagatgaaaatagtaatagagtcccatctagctattcaaagccattccttcattgtattctgtgcacatgaagttggggtttgttactgacaaaatatattcagatacatttctatgttaaaaggattgtgagatgcataggtaaatgtgtttattttcagttttacttgtcaacatagatgaatgagaaagaacttgaaagtaacactggattaagaataggaaaatttggcatggattttgctccattttgtcccatctaatcacttggatagtgttcaggtgttcttggtcagttacttggatgctctgagctttagtttcttggtgattacaatgaagatttgaattacaggatggctttgaaaaaataaacaaaactcccctttctgtctgtcgagaatgttgcacagggagttacagaatgttctcatgactgaattgcttttaaatttcacagtgtgcctgcatttgaagtcttggaaatatctccccaggaagta

SEQ ID NO: 5116 - DNA, 6000 bp, Homo sapiens
gggctcacgccattctcctgcctcagcctccagagtagctgggactacaggcgcccaccaccacgcccagagaattttttgtatttttagtggagacggggttcaccgtgttagccagaatggtctctatctcctgacctcatgatctgcccacctcgaactaccaaagtgctgggattataggcgtgagccaccgcgcccagcctaatagtttttttaaaattccttggcatcatcctgactcctctctttccctcgcaccccacatccagtccatcagcagatcctgccagttctgctttaaaaataaatccagggatcagctacttctcaccacctccctggtgactctctgaatgtctaaatctgaccatgctgcctctgctcaaatcctttccaggtttttactcaaaggcaatgccagagtccttagaatgaccttcaactttaggtctccaaataccctttcctaaaccccctcccctaggcccaccctagccaggagcaggtgttgccctcgaggccttaccatctgcccttctctctgcctggaactctcttcccatcatccctgtggccttggctccagtggtgcttctcaccaaggtgagtgctgaccacctctgctaccatcactccccccgcccctgtgactccggattctcttaactcttttttttgagatgagtctcactctgtcgccaggctggagtgcagtggcacgatcttggctcactgcaacctccgcctcccgggttcaagcgattctcctgcctcagcctcccgagtagctgggactataggtgcgcgccaccatgcccagctaatttttgtatttttggtagagatggggtttcaccatgttggccaggatggtctccatctcttcaccttgtgatacgcccacctaggcctcccaaagtgttggaattacaggcgtgagccaccgcgcccggcctctcttaactcttttacatgctgcccccatacaaatcttctcacgcatgataggatgcttttgtgcttgtttgctcatggccccaccagctcactagaaggtaagctccacaagggcaaggattcctgacgcttgggttcaccgaggccccctagcaactggaacagcctgtgtcacacggtgagcactcactgtgtggcgcgagtgaatgctgagtgtgtgtggggggcagagagcaggggaagtttgtgagcagaaaaatggccaagtgcaagctcaggaagttaaagaaagctgtggaggctgagcatggtggctcacgccagtaatctcaacagtctgggaggccaaggtgagaggattgcttgggcccaggaattcgagacaagactgggcaacaaagcaagaccccacctctacaaaaaataaaaaatgagctggtgtggtggcatgcacctgtggtcccagctgttctggaggctgaggcaggaggatcgtttgagcccaggagtttgaggcctgcctgggcaacaaaaggagaccccgcccctgccctcatctcatgaaaatgtgaaaaatgctgggcatggtggctcacgcctgtaatcccaacactgttgggaggctgaggcgggtggattacgaggtcaggaaatggagaccaccctggctaacacggtgaaaccccatctctaataaaaatacaagaaattagcccggcatggtgacacgcgcctgtagtcccagctactctggaggctgaggcaggagaactgcttgaacccaggaggcagaggttgcagtgagccgagattgcaccactgcaccccagcctgggcagcagagtgagactccgtctcaggaaaaaaaaaaaaaaaaaaagaaaaagtaaaaaataaattaactgggtgtggtccacacacctgtattcccagttacgtgggaggatcacttaagcccagaagttccgggctgcagtgagctgagatcgcacctctgtactccctcctgggtgatagagcgagaccctgtctcaaaacaaaacaaaacaaacagaaaaaaagaaagcaagctatggggtccaatctgagagaatcgagtgtgggtgtttatccgtaagagagcgaggggaaagaggcctcttaagccttcttaatcctgaaaatggggaggaggtcttttaagctgcagtgccagagtgacatgacctagttttctatttttagagatggggtctggctatgttgcccaggctggtcttgaattcctgggctcaagccagcctcctgagttgctgggactacagacatgtgccaccccacccagcttgacctggtttttgtgttcagaagatatctgttgttgttccaggtgccaaggccagtgctgggcacaggggtgctagagcctactgagaaatggacatagaaccccagtgtccatccttccatcttggagcctgtgcttctcaccccacacagccctgctgtctgggaggactgtctgccccttgaggtcatctgcccctggccactgtgccaggacagtcctgctgtgggtacgagccacagggcaagaaagaacacatctgggagctggaaggcctaatcccagggaaagcatgtagcctggggcagggcaccaaggaggcttccagcccccacattctaaggaaagaaacaccaggaaggtgtggccttaggcaggccccttttccttttcggatcactgcctgcctgtcactgatttctgtcctaaccccacactaatagctgctatatatatatatatgtattttaagagctggagtctccctaagtcactcaggctggccttgaacttctgggctcaagcgatcctcctgccttggcctcccaaagtgctgagattacaggtgtgagccaccacgcccggcagcaaccattttttagctttaatgtgcaccagctctgtaatcaagtgcatcctatatgttcctgctaattaactcaacagtcctacaatggtggttattaattgctgttttacgaaagaggaaactggggctctgagagtttggggaccgacccaaagcattcagtgcctgtggatgcaactgggatgcagggagccagtgggctgggggtgaggtgtcccggcaggtggaggtggtggggtacttacctccatgatggctgctgctggttggctgctcctgctggtgactggcgtcccacaggaggcctggggcctggcgatgatgcttgccggagcctgagggcccgtcccctgcggggctggggcccaggcccctctctgcagagctggagtcttcctgctcactcggctcaaactctgggatctggaacatgctctgggctgtgaggacaagatgttacgtagtcaaggcacagctggggccaacggtggccctggaaggcagaggcaggtacccctggcttcctctcccaccgtagcgcccccaggcccgccaggcctcctgggccctcatctgtctgccgggtctggcctggcagggagctgaggctgtcggctcaggacctcagtctcccctcagaaccccggtggacccaggccccgccccgcccgtggtgacggcgcacaggtctcaccccaagcccgatctcgaggcccctgacccgggcctgccgcctccctccagcaccccgggctccgggccctagttgcttgggcaacgggaactgtcagcgacctggcccaatcacctctcggaacgtcactcgggtaggtccagaggcggggtcaacccggcccggccccgcccccccgccggatccaaggctcctcgtccgcatcctttttcctccctccttcggccccggggctcacatcctcgctgcctcacaccttgggcgtgtgtgggagcaggagagggattctctggggtccccatttggaacctggagacccacttctgccaacaagtccttcagcccctctgggccttagtttccccccagtgaagtggggatagtgacagctcccccgggagccagtgaaaactttgtgaagggagtgattactgcgggcgaaggcgcttggcacagccacaactgaagctcagccgtcggatgtgattattgttgctattgttaccgctccgcctggactgggtgcccggtcggaaagtcccgctccccgctcctcctcccaggcgcggaagcttcgcgccgcccgcctcgggggacacctcccgcgccatctcgggggcactggagataaggaaaggaacctcctccctggctgggatggctgcccgggcgcgggaggagggccggggacccggtgagggaggaccgtagggcccgtgggggcttcacgcctggcaggcggccggccaggtgagcagggccgcgggcgcgccggggcgaggggcgggcccgcgcgggggattcggggctccgcgggttcaggcccgggggcggggcccgggggccatcttggctatgggcggaagttttcttcagagaccgagggacgggaatccgttgccgcccccggccgggcggcacgaccccgatttgggtataggagagaggagcgtgggaactggcggacccccatacaagtaaaggcgggcggcacggggcacggcccacccggggaccccctggatgcggcacggcccccgcaactcggccgccctcctgccgcctcccgtaaccccgggcgcccgccagcggcgcagctcgcgccaattctcgtacggtttcacgccgggtgcggcgctggactgcggagccagccgggccgctgcgcaatttgcgtagcgaacggcgcccgcgcaggcgcggagggggaggggggcggagcagcgggagccggggagccggagccccgggtccccacgacctgagccggctctcccatcagcggcctgaggacctggcgtccgcctcctccctccccttgaggctggagcgtggacgcggtgggggagggtggggcgggggcagctttcgagaattacgaggacaggaggcagaggccctccccatccgcattattggaggagagagagcctcccccagcttggggagggggagagcggggcattgggcgcccctcgcagcggccgctgccctgacccgacgggtatcagccggctctccccctccacccaggacgacatgaacgaccgaggccagggagtcctctccttgggcctctgcatccccccatccttggctctggggtaggcccagggaggagacacccccaacccctatccggtctgtcctggagaaaagagactgcccttccatgcccctgagtgaggggcctggggcccaggctgcctgtgttccccaagggcaagggtctctctgttgaggaggaggggcctgtcagccacaacttctttcctcctgagcgccccatctccctctctgcaccctgcaattcccacccctccgtatttatttccctggtcccgccgacagtccctccttgtctgtctccgggattcaggcctccctccctgacatggagagtaacctgtctggcctggtgcctgctgccgggctggtgcctgcgctgccacctgctgtgaccctggggctgacagctgcctacaccaccctgtatgccctgctcttcttctccgtctatgcccagctctggctggtgcttctgtatgggcacaagcgtctcagctatcagacggtgttcctggccctctgtctgctctgggccgccttgcgtaccaccctcttctccttctacttccgagatactccccgcgccaaccgcctggggcccttgcccttctggcttctctactgctgccccgtctgcctgcagttcttcaccttgacgcttatgaacctctactttgcccaggtaaccaactgtggtcccgggtggggggcgggaggtggcaagcctcaaggacccacaggagtgaagggcatctctgctcctaggtggtgttcaaggccaaggtgaagcgtcggccggagatgagccgaggcttgtaagtactcgggacactggtgggctcagcctccaggtcaggggca

SEQ ID NO: 5117 - DNA, 6000 bp, Homo sapiens; identical to SEQ ID NO: 596

SEQ ID NO: 5118 - DNA, 6000 bp, Homo sapiens
gtagaggcagtaactctctgagccttctcaaaacaatattagaactcacggttgctgggcatggtggctcatgcctgtaatcccagcactttgggagtctgaggcaggcggatcggttgagcctaggagttcaaggccagcctgggcaacatggtgaaactctgtcttgacaaaaaacataaaattagccaggtgaggtggcatgtgcctgtagtcccagcaactcgggaggctgaggcaggaagatggcttgagctcaggaggtcaaggctgcagtgagccatgatcgtaccactgccctccagcctgggtgatgaaatgagatcctgtctcaaaaaaaaaaaaaaagaaaaagaaaaagcctcaaggtcagaaggtatttaccactgggggcaaactgagttgactatcaaaggtcagaggctaacacaagtagaccctgggaagctgtagtgtgttcaccatctggagagaagaatgggatctctgaataggcccaaaaagtcaaagacttcaggtgacagtcacagatgtgtctaatgtgtgacgcctgagtcagccatagagaagctggtaggctacctctctgctgcccaaaccatcatagctgaaactactggccagagcctgctgctatagcacctgggaagcagtcttaagcctcccccaaaactctttttctaggcctacagcacatgtggaaaatatagagaactgtggaaagagtaggagaggagaaggccataagagcagctcctaccttgtccagtacatgctccaaccacttccttgctcctccccctgccctatctcatcatcattattgccatagccacaccaccatacacagaaggcccatgatgtgccaggcacaaggtaattctttttttttttttttttttgagacggagtcttactctgtcaccaggctggagtgcagtggtgccatctcggctcactacaacctccgcctcccaggttcaagtgattcttctgcctcagcctcctgagtagctgggactacaggtgcccaccaccacacccagctaatttttgtatttttagtagagacggcgtttcaccatgttggccaggatggtctcaatcccttgacctcgtgatctgcccacctcagcctcccaaagtgccgggattacaggtgtgagccactgcacccggccatgcccgggtagttctgtcgcccgcactggagtgtggtggcgcaatctctgctcactgcaagctccgcctcccgggttcacgccattctcctgcctcaacctcccaagtagctgggactacaggcacccaccaccacgcctggctaattttttgtatatttagtagagacggggtttcaccatgttagccaggatggtcttgaactcctgacctcgtgatccacccacctcagcctcccaaagtgctgggattacaggcgtgagccactgcgcccggccagataattctttctacacattttttccaagcagttctcatcatgtcccacactgtccaccctgtccccctctccaggcacaccaagccttcactctctccaagcctccagtggccaagacttccatgaagtctttcctgacctttgggtatagtaagtctctaatggcatgaagcagggttctggttttggcttcatcctgtcaatatttgccatcaggacttggatagacccaaggatgactaatctatgttgttatcacatcaccagatgacagaattgggatcagaaaaatttccctttataggttgcaacaatggcccagaaccttcaaaatgaaatcctttaggcatgttattaagaggagtaggaccctgcaggaaagtccaattgtattgtagttacatagttatagaagtatggaatcttttttttttttttttttgagtgtcaccaaggctagagggcagtggtgtgatcatggctcattgcagcctcaacctcctgggctcaagcgatccgcctatctcagcctcctgagtagctgggactacaggtgtgtgccaccatgcccagctaatttttgaattttttgtagagacgaggtttcaccatgttgcccaggctagtctcaaattcctgggctcaaaggattctcccatcttgacctcccaaagtgctgggattacaggcatgagcaaccacgccctgccaagtatagagtcttgaacaaggaaatgcatatcgtcctatattttttcctagtcagataatatctagaccattaaccagaaatcacccagaggtcaaaaaacagggcgtcaaaggacccagaaaccaagtctgcaaataacgactgaagacactgtggaagtgtgtttgggagacaacaagactctcaggatgtgctggctgtcttcagaggatgcttattggaagaggagtcagacagtccagacagaaggcacagccaggacctctggagaggagttacaggaagacatattttgactcatcataaggaataagtttctaatcatgaaaccatcctccactgaaacatgatctattgaaaggagcaaatgtctcaccttcattgatgttcgtattcattgattctgggtgatcatctgataaggatgcagtgacgagaatcttgcatttgctgggggtgggggtgtggttgaggatagtctggtttatattccaaagttcctttcaattcctctatgattctatacgctgtactccttcctgatcaatgtccctagccagggtggccaaggctaagtcaagtatgctaagggattggaggggcagggatattgagaatagggtgaatggaaggatgaggagttcccagcaagcttgggacacaggaaaccttggggcagcttcctcctggaggtttcaggactgtacgtgctggagaagaagtgtgatgccttgtcctgaaagccgtcttctttgaaagcagcttctaaaggcagtgaatggagaagagcgaggaaacgaccccaataccaccaacagaggctggaaactcctcaggctgtttaatcctaagaatgatgcatctgttggccgggcacggtggttcacatctgtaatcctagcactttgggaggctgaggcaggcggatcaccttaggtcaggaattcaagaccagactgaccaacatggagaaaccccatttctactaaaaatacaaaattagccgggcgtggtagcgcatgcctgtaatcccagctactcgggaggctgaagcaggagaattgcttgaatccgggaggtggagtttgtggtgagctgagatctcgccattgcactccagcctgggcaacgagagcaaaattctgtctcaaaataaataaataaaaatacaaaattagccgggcgtggtggtgcatgcctgtaatcccagatgctcgggaggctgaggcaggagaatcgcttgaacctgggaggtggaggttgtggtgagccaagatcatgccattgcactccagcctgggcaagaagtgcaaaactctgtctcaaaaaaaaaaaaaaaaaaaaaaaaaaagaatgatgcatctgttggggatgcagtggggtaagcatcttcagtaagcaaggtgtgaagaggggaaagagggaaggtgaatatggaggagagggtgaaggagggcactggaaagggtagtaggatcccagcaaagggcgatttggctgaaagggagcgtgataacaagggtgggggtggggccaagaagcagccaccatgtgtgggtgcctctgtgcgtgcagtcatctttctcacatcattgtggatcaagagaggaaatgcccacttctggaagaaaaagccacaaaatgagacttggaagggaaattgatcaacatctacaaaacggcttcttaaaggaagcggccctcagacaggacagagttgagggaaaggacagaggttatgagtgcctgcaagagtggcagcctggagtagagaaaacactaaaggtggagtcaaaagacctgagttcaagtcccagctctgccactggttagctgtgggatctcgggtaagttgctctccctctcggcctcacggacctcctgaataaaaattgagggttagactggatgatctctgaagccatctctagcttggtagtttatgaggttaataatttatgagcaaacaaagttaatttatagatagaacatcattatttttgagtcagaaaatgactctgtaactatgtgcttttcttggtgatttcactttttttttttcttttagagacatggtcttgctatgttgcccaggctggtatccaactcctggcctcaagccatcctcctgcctcggccttccaaagttgatttcatttttgtcttccagtattgttttactgttgttccctttgaaaaattctaacctatcttttctgaacttgagctgagaagggaaggggttttgcctctgttgggcaaaaggatggtggcaagtagtgtgaccaagtgccctaacttgccaggacttaggggtttcccaagtcaagggacttttcagtccttggcagactggaatggttgatcaccctagtggtgaggaaaatgaaggtttggaggtggcttggaggagaggttgctgggagagctcttctcctgttctctgttgatcaggagtttccctcatcaacctgctgactttgcgtggtggtttcattacaagttgtgagccccttattgggggtatagggaggagaagtgagggcagcctttaaactagtcataggccccagttgagacaattattgccgggaaagaagctgaaatgcttgactagcactgatgctgtgggggattttccctctttcttcaaaaaaacagaaaagacccagtggaaaaaaaaaaaaaagtgatgagttgtgaggcaggtcgcggccctactgcctcaggagacgatgcgcagctcatttgcttaaatttgcagctgacggctgccacctctctagaggcacctggcggggagcctctcaacataagacagtgaccagtctggtgactcacagccggcacagccatgaactacccgctaacgctggaaatggacctcgagaacctggaggacctggtgagtagacacgggtagcttcctgtcgccgaggccctgtctggaattctaacatcctttgccagagtccgagggagaggggacagtgtgggaatcctctcccactgtggatctgtaaaatctagacaggtcagtcagctcccgccctttaagagtttattttccattctgtggaagaagcagataaggagagctgctgtccttaggagacatcctttagaggaagctggaagacacgggttcaggccctgcatcctcctctgagttgctatgtgactgggaacaggatacttcacctctccattctttctctccttttctcttagggtcggaatatggaactagacaggaaagtactttggaggttttcttaccgtaaggaggctggcattgctaatcagtcaatgaatgcatagctgttcgtctctggccatatgattatgtcatcagggcactacattctgtgttgggtggagaagttgaggacctggtctttgccctcaaatagcttctgctctggccagagaaaaaaatcactcactggaagctattaggcaacaattatgtgctaaactgagggaatgtgagaccagatggtagcaaggaagaggatcccagcaggctggagtcagggagcagggtgagaaaactgttaatctgacaaatgtcttggaacctgttgtagaatctctagagataaggtattcttggaaaggtttcttgggtgggctaagaaaatggtctccagcactacgctgccaccactcaagtctctccagtgaagcgtagtggtgcagttgacttggttgtcactgggctcccagaagatgtgtgtgtgtgtggagcagctcaaccagagaaacacagggttccttgtgagccgacggcagaggctggttgtaagggtttcttggaaacttc

SEQ ID NO: 5119 - DNA, 6000 bp, Homo sapiens
gaaaatggtatggagtgtgaaggctagcacatttatgataaccaccttgagtttctggagtacaatataacgtattgagatccagtatcttaattctactcccatatcgggctaaattgaattttttccataaatctgaagagattaccagaagtagccaatgatcccttcagtgctttgttggtgtcttaacatattgatgatctgtttaaatgttctgttcaggaactgtattatgttgagtctatccataagtttgagagaattaatatctttgcaacactgagtcattaaattatgaacaggaaaaattcttaaccttattaagaatttctttttttttaaattattagtattatactttaagttttagggtacatgtgcacaatgtgcaggttagttacatatgtatacatgtgccatgctggtgtgctggacccattaactcgtcatttagcattaggtatatctcctaatgctatccctccccgctccccccaccccactacagtctccaaagtgtgatgttccccttcctgtgtccatgtgttctcattgttcaattcccacctatgagtgagaatatgtggtgtttggttttttgttcttgcgatagtttactgagaatgatgatttccaatttcatccatgtccctacaaagggtatgaactcatcattttttatggctgcatagtattccatggtgtatatgtgccacattttcttaatccagtctatcactgttggacatttggactggttgcaagtctttgctattgtgaatagtgctgcaataaacatacgtgtgcatgtgtctttatagcagcatgatttatagtcctttgggtatatacccagtaatgggatggctgggtcaaatggtatttctagttctagatccctgaggaatggccacactgacttccacaagggttgaactagtttacagtcccaccaacagtgtaaaagtgttcctatttctccacatcctctccagcacctgttgtttcctgactttttaatgattgccattctaactggtgtgagatggtatctcattgtggttttgatttgcatttctctgatggccagtgatggtgagcattttatcacgtgttttttggctgcataaatgtcttcttttgagaagtgtctgttcatgtccttcacccactgtttgatggggttgtttgtttttttcttgtaaatttgttttgagttcattgtagattcgggatattagccctttgtcagatgagtaggttgcaaaaattttctcccattttgtaggttgcctgttcactctgatggtagtttcttttgctgtgcagaagctctttagtttaattagatcccatttgtcaattttggcttttgttgccattgcttttggtgttttaggcatgaagtccttgcccatgcctatgtcctgaatggtaatgcctaggttttcttctagggtttttatggttttatgtctaacattcaagtctttaatccatcttgaattaatttttgtataaggtgtaagggagggatccagtttctttaatttctctcagaaatatttggaagtttcattctataaacattacatgtattttgttaattttattcctaggtatttgatgctagcttattgctattttacgtgatactatttttaaatttgtattttatttgtagcttcttaaaaatacattttaatgtaaagatacctaaagatcaaatggaagagaatggagaataatgtgatttgcaaacactatcagtgatgatatactatcagaaaaaggaaagtttaggcaagatacattactaaatcgtaattgataaggggttagatccaaggattgaacaattaaaggaagaagtataaaaatcagaaattttagtgggagacattgacatacctcactaaatagctattggaatagtaaacaagagaaaaaaaacactatgcacaagaaaaatctaaacaacataattaatgcattagatataattgaaatatatatatcacatgaccctccaaagacagacaacatattctttaagatgtactgaaatatttacaaaaattgaccatatgctgtattataaagtctcagtaatttgcaatgatttacataattcagattgtattcattgattacaatgaaattacaacagatgtatttttgaaagaaatagctaaaaaaaaaagccccacatctgtaatgataacaattcacttctgtataatccttggaacgatgaaaaaactgaaacaaaaattataaaatattttaaacttaataatattgtaaattttgtataccaaaccttgcgagatccagctaaagtggggttcagatggaaatttataacttatatgtacacattagaaaagaataaaagttgaattgttgattcaagcttccacttcaagaggttagggaaaaaaataggaaatcatactaaagaaatgtgttaagaatataataaagtttttagaaacaactaaagtagaaataaatatatcactcataaaattaacatacccaaaagttaatttactttatttgagtaatacaattggaaaatttctagaatgattgatcgagacaaaaatggaaccataaattactgattttaggaatcagaaaaaagaaatcgctgcatagtctacaattatgtttagatgttaaagaaacaattaccaaaaaagaagaagaatacaatatatttgatcatttgcaaagtgggcaagcattttcaaatttaaatttaggaaagttgagaagaaagataagatctgaatagtaatatctattaaataaattcaatccattactaaaaactcgcacagagagaaaaccgtaagtctagattgctatactggtgaatacttccaaacatttaaggtattttggggcaatctattccaaaaaatatgtttttgagatttgtgttattgcatgtatttgtgatatgttccttttaaaatatagagtaatattttatgtgtgtgtgcatataagacagagagagagaggaagagagagagggagagagaattgtagtataggtgtatactacatctcatttatgtattcatctgttgataatgttttggttttttccagtttggggctcttatgaataaggctgtcatgaacatttttgtataaatcttcatgtagacaaacgtttacatttttcttgagtaagtactgaggagcagaattattatattgcacagtgtctgtttaaatttatactaaattgccaacatcttttccaaagtggttggacaattttacacctcccccaaattttataagtccagttacttcacaccaacatttggtattgttggagttgtttcatttaacccattccaatacaggtgtgcagagctgtatcactatggttttaactttcatttctttgatgactgacattgagcatattttcatatacttaaggactattcatacatatttttgtaaggaatttgttcggatattttcctgtttttaaaattttcttgccttcatattaattgtaaatattatttatgtattttgaataaaagccctttttcagatatatgtatttccatagaattgccttctcattttcttaatactatcttttgaagaacagcttttaattttgatgacatacaaattaagtatttgtatggttttttgtttgtttgctttgggttttatttatgtgtgtctgtgtgtgtgtgtgtatcctttctaagaaagcttaaattttaaaatctcaaagaatttctctagcattttcttccagatattttatagtttagcctttctgtttatatctgtattttagtttttttatagaagtaagatatacatttttaggttttccatatataatattctttgtaatttaactctaagccatttggaattttactttggcacatgcaatgagtaatttgcctgatcatagtttaacagaataaataactatattttaaattccatatattctaaatgtatgcctgttttttgtacttcttcctaattcacaaaagttaaaagaagagaaaaaaaatggaggtatttatatctgtttctgtaatttgaatgagtaaaatggcttattttccaattgacaggatatgaataggtaacaatacaatgatgatcttgcttactttctgattaataagtctgccaattttattaataggtaggtaatatttttatttatctttcacagatttggagtcaagacacaaacgggttatttaacttatccacgggtatcattagtaaatgatagagtcagaaagcaaacataggcactttgagtttaaagcctgtccatttaaccactactaacacagcttccctcaaataatggcagaagtgcttggtccagagaccataaaccagataactgtgggccagtccagctcgtgttaaatttatacaattattgttatagagattgtttcatagtaataacattttaaaatatgaaaattttatgtataaatcgagatttcttgataattacattaaaaatggaaaaatctgacagtaatatctctgttcacccctcccagaaattagtttcaggtaattaaagtttaccatccttaggcagggtttgttctctccaaggtttcatgagttcaactcatttatattggcttatattaatatttaagttagtgagtctaaacttagaaatattggcttaaaatcactgaaatatttaaaagaaagggatacttagaaagtgttcaatgataaaaatggctaaaatattttacatgaaacacatttattatatttgaaaataagattaaataaatattatttgaggtaaactttacttactcaaaggagatacctaaagcatgaatatctgggaaccttttctaaatgaagaataataaagtccctcccacaaccatggggtttttttgttttgttttttctcttcctgcagaaactgactggaggagatgtcaggagaaaataattcctcagtgactgagttcattctggctgggctctcagaacagccagagctccagctgcccctcttcctcctgttcttaggaatctatgtggtcacagtggtgggcaacctgggcatgaccacactgatttggctcagttctcacctgcacacccctatgtactatttcctcagcagtctgtccttcattgacttctgccattccactgtcattacccctaagatgctggtgaactttgtgacagagaagaacatcatctcctaccctgaatgcatgactcagctctacttcttcctcgtttttgctattgcagagtgtcacatgttggctgcaatggcgtatgaccgttacatggccatctgtagccccttgctgtacagtgtcatcatatccaataaggcttgcttttctctgattttaggggtgtatataataggcctggtttgtgcatcagttcatacaggctgtatgtttagggttcaattctgcaaatttgatttgattaaccattatttctgtgatcttcttcccctcctaaagctctcttgctctagtatctatgtcaacaaactacttattctatgtgttggtgcatttaacatccttgtccccagcctgaccatcctttgctcttacatctttattattgccagcatcctccacattcgctccactgagggcaggtccaaagccttcagcacttgtagctcccacatgttggcggttgtaatcttttttggatctgcagcattcatgtagttgcagccatcttcaatcagctccatggaccaggggaaagtatcctctgtgttttatactattattgtgcccatgttgaaccctctgagctacatatgtttttaaatctaatctaatttaatttatatttcaagttgattaaaatttactttagaaggttcttcaagaatctataatataactggtaacattctgacctattatatgctaagatgtatgtgta

SEQ ID NO: 5120 - DNA, 6000 bp, Homo sapiens
ccactatgctagattgtggaggtacagacacggttcttcccctcaagggactcgtggtataattaaggaaactgaaaagaaaagaaataactaatgcttagtttacacatagtatgacagaggtgggtacatacagaatgttacggggagcaaaaaggaggtgcaccaaactcagctttgaagaagaaaaggaggagcagaaaacgtccttgagcaggtgacacttgaaccaagtcttaaatactgagtcagctgtggatgagggggaaaggcaatctgggtagaaggaaggagatatttaaaggctatcagctataggccaaggcatagaattgattcatatttatttcccataccacaagggttctaacgcatatattaaatcagggccattccattataaagtattcaccactctgatttgcaattaaaacaacaacaacagaggcaatgtattaagttgccaaaaagttatgttatccaatttttttatttctttttttttttttttttttttttgagacagagtcttgctctgtcgcccaggctggagtgcagtggcgcgatcttggctcactgcaagctccacctcccgggttcatgccattctcctgcctcggcctcccgagtagctgggactacaggcacctgccaccacgcccggtaaatttttttgtattttttttttagtagagacggggtttcactgtgttagccaggatgatctggatctcctgacctcatgatctgccggtcttggcctcccaaagtgctgggattataggcgagagccaccgcccacggcctcaatttttaaatttcaaaagatgactatcctgactttgttgttgttaaatgttgtttctttagtgagatggtggtgataatacagttacgttttaatttaatgcattatttggaaaacaaaacaaaacaaaaacaactgggaactttgttattccacttaagaagtgtttttcacagtccatgatattcaagaattaagtaaccactatgccagagcagcagttctcatgaatattagtgggttagaattatctagagagctttaaaagtgtataccaatttctttcttttttttttttttgagacagagttttgctctgtcgcccagggtggagtgcaatggcgcgatctcagctcactgcaacctctgcctcccgggttcaagcaattctcctgcctcaaggcgcccaccaccatgcccggctaatttttctatttttagtagagacagggtttcatcatgttggccagcctggtgtcgaacacctgacctcaggtaatccacccgcctcggcctcccaaagtgctgggattacaggcataagccgctgggcctggtggaaaaatgtataccaatttcttgaggtcaccctagcactagagatttagaatttctgacattgggttttaaaatgtgccttttaaaaataaactccttgctgggcatggtggctcattcctctaatcccttttgggaggccaaggcaataggatcatttgaactccgaagtttgacatcagcttgggcaacatagtgttaaaaaaaaaaaaattagctgggcgtggtggtgtatgtggctggagaattgcctgatcccaggaggtcaaagcttcagtgagctgtgattatgccgctgcactccagcttgggcgatagagtgagactgtctcaaaaataaaataaaaatacacttcgtagttgattttgaaaagcatcctgatttgggagcaattatcctagccaactgtacctagcctgaataggtattggataaataagtatcaaattaatgtgagggttctcctcatgttaagtatacatttaggaaaatcaactttgttttttttcaacaaggaaatgcacacatcttaagtgtgcatagaagagagctgatttaggagaaagtctgattcttaagaaggtagaagaaacatgaggttattttattttactttatgttatttttatttttgtgagacaagagtctcgctctgctacccaggctggagtgcagtggcacaatctcggttcactgcaacctacgcctcctgggctcaagcaattctcctgcctcagcctccgaagtagctgggactacaggcgcctgccaccacgcccagctttttttttttttttttttttttttttgtatttttagtagagacagggtttcatcatgttggccaggctggtctggaactcctgacttcaggtgatccacccgcttcggtctcccaaagtgctaggattacaggtgtgagccactgtgcccagccaggaggttattttaggtccttttgcttttatgcataaaagataataaaatgaaaacatactactcataagccttggtcactgacatgagcatatttggaatgaaaaattattgagaattgcaagaccaggtatgttcctgtcagtgtcatttaataaaaagaccataacattttaaagtacagaatgttgatgaatggggctatcaactcttagtaacgatccttccataacttgaaaatgcaaataaacttctttcaagacctaagtttagactgaaggccctctaaattatgttcctgtatttccttgtactatcccatgatattaaagctcagtcttgaagatacagtctccaaagcatgaatatccacgccactgaactcagatatctcacttgcttttccctgagttcaaggccctgattttgtaggtgaggtaacaggccccagaggggctacatgtcctaccctaggctcaacaactcaatgaggatttaggtagtcacttgatacttttcccacatacttgcagatgaacctgcacttagtaatacatcgctttaccctcctaccccttacatttaagtcacttcatgcttttcactattgtacattcattttaagttcaatcacacaaagcggtgcagtgagacaggttttaatattcacatttgacagagaagaaaagagagtcccaagcgatggaggaacttgccggtgatcatgcggctgtgtcagtcagctccggctgctgcaacaaaataacataggctggggggcttcaacaacagggatttatttttcacagttcttgaagcctgggaagtccaagctcaaggtgccactttggcccctcagtgatggacctcttcctggtttgcagatggcggccttcttgctgtgttcgcacatggaggagggaggtgagggctgaggttgggggtaggggacagagagtgtgagagaaaagcaagctctttggtgtctctcctaataaaggcactcatcccatcatgacctgctacctccatgacctcatccaaatccgattacctcccaaaggccccatttacaaataaccatcacactggggttcagcgcttcggcacacacattaggggtggggacaaaattcggtccatagcaagagccaaattcatgccagttccagaactagtatcagcacccaagataactgggttcaataacactgggcaaacatttatcgaggactgcactgtgaggggcactgcggcatgacagacccaagtcttgtcagtgacctgagagaggtatggaataactagggagcgagtgccacagtgggaaacatccctctgagcaatcagaagcgatatttcagccgactgagccgaggaacagtgaaaacgcttccaacaggcagatgttggggagaggacattgcaggcgcagaagagtgttaggaagggctgtgaaatggaaaggtgtcgtcttggaggaatcgggcagagccagtttacccacagggaactgggcatgtaggggagagtggtgcagaataaggctggaaaatcccgagttcttacaggcgcactcgtctactccgcggacagtctcttcctttctattgtcagcgtcctgggggtagggttgtgttatgcatttagttgaacctgaagggactagtccaggtctctcagaaggcagtacctaactcacaggcgactgaaaggaaacaaggccagcggagccctggcggtggcgaggctgtgccaattgctaaatggggcagcaggacgtttttctctactgaagtggcaatgccgcggagcaggaaggcagagtagcaggtctcccgctagtgcgtctcaaccgaagaagcggcgtgatctcttcctaaaacacacgaggaagggggcctgggctgtgaggccggcgtggttcttgcacccctggtctctatccctgcctgggcaactgctgggaaggaagggtcggcaagaggcctaaagaccggaggccaagggtgcggagcgcggccggactcagaggcgaggacccggcggagaggcctgggcggagcagggcgggagaggcgcgccctgagtagggctcgggggaggacgatggctgcctcctgcggtcctccccctgcctcgggggacggcccttggcagaccgtcccggactcctaattcatcctgtttttaataaaaccatttccagaatcaaaaagagggcggtacccaaaggagtctgaagaatgcccagcaggggcaggggagcggggcgtgcccgtatcgggaggctgaaggctgacggaccagcgcagcagggacagataaccgcgccggggggcggaggccagagccagccccgcgcccacagggttgcggccccagacccgccgcgcgcacgcccccgcgcctggcggccacagggtccggagcgggggcggggccatccgcggccgggggcggggccgggcggggggcgcgcggttggaccgggcgggaggagcaggctcttccatctcctgattgggtctggaccgcaagggggcggggtcttgaggggttctgcgggccggcattgggagccgcagaaggagggcgtggtaatatgaagtcagttccggttggtgtaaaacccccggggcggcggcgaactggctttagatgcttctgggtcgcggtgtgctaagcgaggagtccgagtgtgtgagcttgagagccgcgcgctagagcgacccggcgagggatggcggccaccgggaccgcggccgccgcagccacgggcaggctcctgcttctgctgctggtggggctcacggcgcctgccttggcgctggccggctacatcgaggtggggaccgggcgaacgccggagagtcgtctccttcgcccgccggaggagcgcggactgcgggcgggcagcggggtccgcggcagggcgggccggcggtgcggcgccgggggtccggctctgcggcgggtctggcgcgccctcccccgcccgtccctgcttggcgcagtgcttagcgctggaggtcgggctgcctcagccgccgcagaggccaaatgaaaggcgtcggggctgctgggggcggccgtccgcctcggccgacccagcccccaacccgcccgcggcgccgccacctcctccggggacccagtgcccccgggcgcccgccccgccctcccccgggacaatgccagggcgctcctctcccgccggagtccgcggctgggctttctccaggggcggccccgcgcggaccccgtacgctccctcgcgcggcaccggggcctcggctccgggcctcccacctgcgagcggcgggcttcgcctttgttgccaggtggacgcggccccggccttcgcgcgcggcagggatgctgcgagccccgggggagctcccgcgccaggccgcccgctgctccctctgccgcctggggccgggtcgcggacgcgcattttttaagtggcgctgtttgcctgcgtccgtagaccgaggaaacccgctctgggtgcgttgaccgctttcgtgagggtttcagtgagtagggaaggtgcccgcgaaggcgtgtaaactgttggaaaaatcgtcctcttcgggtgtcagaattccatcagtggttgtgcttcgaggtcgcaccctgagcatccccgctgcgagaaaggcgaagcggcagggccgggggttggggaggc

SEQ ID NO: 5121 - DNA, 6000 bp, Homo sapiens
gggagcgtttttgttcttctttgaaggggctgaggctggcggatgtgccggcttcatgagtgggtgattccacagggaccgagggtgtcttcagaaaaaagcatttcggcccgctgtcctctccactctggtcccagggaggctggaagcagcctgtgtttgctgttccctttttccagtccagcaatgtgaaccaaaggctccgtctccagcgctcaggcctttatagcacaggcatgtgtcactgatccgcatgatggactgcagtgcttgaaattctcctccactgaacttgcgagtgtcttggggaatggcatttaccaagttatcgattctaatttagttaatctgaaagtgggatattgacacccttttaaaacttatgtagggctcatattcttcatgactttagttgtcgtttttaggtctgttaaatgggcaaataaaagatgcttccgacagaaaaaagttgaactggctggctaatttgtagctgtattcatcaattatatggttgttttaatgtattaaaatgatacaattctagaaattaggtgaatttgcttctgaattaaaaatcagttgaaccttggcattcactctccacttagctctgaaattgtgtcataatctatcaagcaagtccacaccagcttgggaaatcttgcatgaattaggctagtaagtgttaccttaggtatgtcttgagaggctgactgagtaaacttgtcatctcagtcctttcccttatcaggctaaattccatcgtgcagagacttgcttgggccccatgagagattatgcccatccagcagtcgggggtgctccaatgggcctgtgctctggggaacgcttgggaagccctattggtcagtgtcatggatcaaaaagccctatcttcatatcggtgaaaggtgtccttgtcaaatagagcaactcagttttatccttgttggttctgtcactgatggtggggctaagagtccttcactgatactgaaaactcaaaattatagctggagtgatggggactttctctacccagcgtatatgcaaagaacattcacttgagcctgttttctgttgtaaattaagactcaaagatagccagaagagcagaggtacctgagtaataaatttctttaaaaataaggaattgcataaaagtgcctctacagggtctgattcctgcccttgtctctgttcagatgctcagttacgagcaataaggtagctattgtttaggtttccagggttcgagcactgaagggaaggtatagaagaaaccacctctttttcagccctgaggtcttaagtagatgcctcactggtgctgaagctgccaataaattgctgtattagcgtgggctgacatggttgatgaatattgtgtaaggaagattgcccactgtaatctaaccaagtgaagtcttggcagatagcagcaccctgcacttagagaatgccacaaaacaaattgagtccatcctgcaggtcctgagctgggttttcttcctagagcacagtgcatctgatcccaaagagaactccctctgtaattttgtttcagttcctccaactcctctgccaaccaatgatgttgatgtgtatttcgagacctctgcagatgataatgagcatgctcgcttccagaaggctaaggagcagctggagattcggcaccgcaaccgaatggacagggtaaaccttgacaatttcttcatcttcatggtacttggctttgggtagcatggttctcatagctgaagaaaagtaatagcttctccctagattgtcatgctgatgtataaggactggtgagtcaggagagagttaccagtggagctgccttctgggtggacttcttcaccacctgcatccagataatatataatataattatcctctgagcacttcctataccattatctgccctttttttttttttttttgccattaacttgctttaaaatttctttattttaaagaaggaaactttatatcactgttatcaataaaaagctagtaccatttgccgtgagaagaaagtgaccaaccatacaaatatattagatgaaagcaaacatgtactaatacatgctagctagatactgctgtctctggaaggttctgagtctcagagatgtttcttttcctttaaaagggttataagagagcagcaggaacaccaaagtgcaacttttcttctggatttactcaggattgaagagaattgaaaagggaatgccttgctaggcctaagctccaccccaaatcccacacagtcccatgttgggcttacagtttgcaaaatgcttattgttttatccacatcagctctgaaaagtaggtattaacctcaatttttttggtgaggagactaaggcacagagacttttaaataacttactcaaggttatgtaacaaagaggtcatggaattgaggctccatctggggatagttgaggcctggaaccttctgaggcagtaacaatgctaagctcctaagagattgtgtgattggtttccttttgcagtttcctgtgagatttagcatctgacagtgtttttagcaaatggaggagttgtttcggggtattaatcactgctgacggcgtttttgacctttgttctaggtaaagaaggaatgggaagaggcagagcttcaagctaagaacctccccaaagcagagaggcagactctgattcaggtaagatgccttctctggggacatagctttcagcctgaccattggaaaatacggtcagagccccattcccaacgaaattaggattggacaccacctccttttaggtgagggcttacaaggaagttgtaactggcctgtttttctttttcacctcaagtattgctaacctatggtagaaggaaaccaaacccccaccagagcacacctaattcatgccagaaggtaaccttagctcagctgcctttcgttaattctgctttcctggcaaaagtcctctgccattttcagtcttagactgtgacttgtttttcagcagtactgaattttttttaagactaattgaaagtcaaaggatagaaaataaagatctctgatacaattcatctctaactttgtagactataactaaaatcatagcagcaaactgcattccccttcagtagaagagtgttgctaggaatagggatagcaatttccaggactgatttggtttttacaaaactgattttgtaaattttaaatcattttatgtttagctgaaatgcctttcctcctaatgtaacactttaataaagtgttaaaaataatcttaaaaggcttttttattgatcacttagaaaatctaacagttttaattcctacagaagtcagtgcatcttgttcagggaaatgtagttcagcaggcttaaactgtacctgtaaacctggctggatacctcacggataacttgcccttcatgactttattgatagtaatggcaaaaatcacaattacttttgcactaacctaatgacaggaatacttcaacagaacttaccacataactcccattggtcagtggtctcagagtttggaagttagtgccttgctgcaatgtgggaaggacagtgttctttttttatagtgcatattgagaaaccaggccttgggcttgcaggcactagcacttgtagttacacagatactaaggaggccctttgacactgaggtttaacttgctctctttaaagaaggaagtaattctcctgatagaagtagaatgaaggtaggatgaagtagactttggatcttacccttgctccactctccgaacctgttactgtctcgcatgggcactgacaggagaagcactggggtctcagggtgcttgcttaggcttcctctgggtgccacaaatcatgtgtggttcctgctttcttggtttagcacttccaagccatggttaaagctttagagaaggaagcagccagtgagaagcagcagctggtggagacccacctggcccgagtggaagctatgctgaatgaccgccgtcggatggctctggagaactacctggctgccttgcagtctgacccgccacgggtgagtcctgcccctagcactgcctgccctgaggtggtatatgtaggggaccaatgtatgacactcaggtcagtaaaagtgacatttgtatgacaagttctggcaaagctgaagctaaggaaagatgatgagggaggaaaaggtattacattctaatatctgtgtatataagctaagcatgacatcgctttatgcctgcgtataccacctgtgatgtgaaagtgttttacgctggaaaagtataacctcgcgaaattgatgggtaattatccagttattgaacttcctttcaaagaatgaaaacatgctattcatgaagacttttgaacaagttacattataaataagattatgaagaaaggggtaaagtaatttcttctgaaactcttgtgtgagtggtctcaaatgattttgtcccttaacactaacctgccttgctttgggggatggaaagtattgggaggatatttgtgtccttaagtaagccggttaaagtcttctctctttgggtgacacaggagactatctagcttataggtgtcagaggctgagccaggaaaaaggacagatcagaagagaacgggagtgggcaggagattctggaaaatactgtatgttaaggagccagtataactttggaacttagttttgctattttacctagacagtttttttgttacttggtaagctaaaaaagccttccagttacagctttcattcttgtgcctagctgagctttacattcttaagtgaactttttaagcttttgttttcctgcctattttcaattctctagtctctggatattaaaacaactgttctctcttgcagcctcatcgcattctccaggccttacggcgttatgtccgtgctgagaacaaagatcgcttacataccatccgtcattaccagcatgtgttggctgttgacccagaaaaggcggcccagatgaaatcccaggtacagtagatgtagtagaaattgctgccgtgagggcatttccagtggggaacataatgccttgactaatggttgaccagcactgctagttgcatttgctactagtccttagaaaatgagttttgatttccgaagacattcggtacgtgaactggtttttgcaaggtcactgtttttaaaacatctttttaaatacttttttatattaactgctttatacttaaacaatttctgaattttttatatcatttatttctgatttagggtattgccagaaccaatattcaagatccttttctaggtatatttatcaagcagatcttaaaaattggtctcttgttttgtgcagtatagtttttgtttagacagacacttttacattcctaggttttgtccagctttactttcatctacagaggtttgtttctggttcctacttctaatattggtgttgttcatatattaacttgagttttacttttttgtattcataaaaatgagcttgcctacaagactgctagcttccgtttaaaccaggaagtctcctagctcagccttagttttcctagagggccttatagtaacaacgctgatcttacttgatttcctctcatattgtaaatacagtgctgtgctgattgtgagtgtcagggtacatgggctcacttactgcacgggtgctggcctgtcagcccagaaaccctccttccccacagctgctatgagtgtgaagatgaaaaggtaatgtgcctaaaggcctaaaggcctttggagtattggagctgagctgctccatttgtggagctgggggtctgtctcagtgccagactccacactggcattcagtgctgccgggttgactcccttgagtgcccttgagcagctcacacgctagtgtagagataataactgtaaaggtgaagagcaggtgtttttttgtctgtttgtttgagatggagtccc

SEQ ID NO: 5122 - DNA, 6000 bp, Homo sapiens
gaggaagaggaagaggaagatgaagaggaagactatgatgtttataaaaggtaactcttctactttgaactgtgaagtcgttttgcctttttgttagcccttctgtaaagacggctgttggctgctagtccctcacttctggataaactgggcattcctttgttctgctagagttgattaagcttgcatttcattctagccattgccaatcacaggagtacctgtgatttttgtgtttacatcattctgagctgttattttctgcaggttactatgatattttttaagagtccgtgtcatttgtttaacataatatccctgaatttggatttgtcttattgttgtatcatgattagattcaaatgttcacaaatacttcccgtttgctgatgtagctgggccccagggcttagtggcacggtgaaatgtgcgttgagcttatttcctgcctctgtttttgtgtttcagaatagagaagggacccattgttgtgctttgcacataggagctattaaccttcctttttttctattttggccttcagtgaatttcctactgaagcagatctggaagacttcacagaagcagctgtggatgaggatgatgaggatgaggaagaaggggaggaagtggtggaggaccgagattactactatgacaccttcaaaggagatgactacaatgaggagaatcctactgaacccggcagcgacggcaccatgtcagacaaggaaattactcatgatgtcaaaggtaaccccatgtagagccatggctttgaaatccatgtggtaattattcacttagacttttgcattgcgtctgtcacaggtaagtcagtcacagaaggaaaggtgtggtacctctgcactgaaggtgagttcagctctccagtgcagtgatgggatggtgccgtcttaacaaagtgggcaggcaggcacatccagggagagatgtaggattgaattagagaacggggactagagagtaagagagacaacgtagtccgcccttcagcaggattcttccacattcatcctaaaatgttccctccccaaggggagctcccctcttcgataccactcaagttctggcctcctagaatagaaatggttttcttggtttttcttttcctgcttgtcttctaatctgtaggctgccctatttgtccagatgttttagttgggagggtgaaatttattgacctgctggtaacagattggggcctgcagttttttttttttctcatcttgccaattaaaacacgaaaaggttgcagtagttccagagccattaacatgcagcctcctgctgatcgtatatttgaaaccaattaagatgcgaagaattatttaggacccaagttgggggaaattacttaaccagttgagaagtttgtgatttgccttagagaacataaaagtgggaaacaattgtccgttctaggtgcttgtctttactacgggtatcaccacttaaagcagcctttccactcacactgtctcctgaatagacaaactaggcagatacctccactgaacagatcagaaatgtgaggctctcgcagctgtgagacaaaggaattgctctacgtcaatctaaactcagatctagactccagagggtgccaaaaaaatatttatcccagttcctaaatgtctctactctgtggggaagcaacttgtcctcagcaaggctggcctgagctggagctttcggccaccgggcctccaggctccgtccagtctcaggcctcccccagcccatcccccagctcgccagcctgtagcattttgaagcatttgacgtcactgcctctgtcctgctgacactctgaccattttcacacagctgtctgctcccaggaggcgatgacggggccctgccgggccgtgatgcctcgttggtacttcgacctctccaagggaaagtgcgtgcgctttatatatggtggctgcggcggcaacaggaacaattttgagtctgaggattattgtatggctgtgtgtaaagcgatgagtaagtcctgcctcgcgctggtcccgtgcggcagcaccgtcctgtctggcgtccgtctccctgccgtcttcgtggctgcatctgtgtggtgtccctgcccactcgggtgtttgctgtcggtcgtcttcccctcatctttgtgctttctagatctaggctttgctctcctgccggcagtggtaagctcagttctcgtgtcctgtgctcaccgtgtgtctggtggtgcttggtggtgatggtgcgtacccaccttggtatagcgggcagcacagccaggggcttgttctttcttgtctggctttggagtctgcaggtccccaggccactgtagtattggtggggaaggcagctgtcccctgggctggctctagcttagaggcactgaacattcctgtctttgaactgccctgtcactgacccctgtgatgcatgccagctcatggggcgcctcctctcgaaaggagtgacagtgaagtactttgggcagtctagaatattgaaatatcttgcataatgcactctagagagagctagcagccaagtggtagtgactcactctgtttcttcaatattttgcaaccgggtcacacagctttaggaagtgagaggatttcagttggtgtgtgctttggtgtgacaggaaggtcagtggttcagttgagttgggtttatgctggacgttggtagaaagagtttctaccaagagttttcccttttctccatggctactcctttttctcgttaagaccttcagtctctcaccttgcagcactaacctacacattaggaaaatcctcaggccagacagtttttcttggttcctactctggaatttgttggagtaataatttgctatgaagaatttggctatagcttctgacggtttttcattcacatgccttcatgttccctcttccttccttctaccaaaagatctttcaaatcttaatgtaatatggcagtgccttgagtgcttcccttccagctccaggaaagctgtttttattcggtaacagttgaaaggtgaaagaaaaggaggccttagggaaccttggtgaataaactttgcgttttcaggaaagatttagaaatagaaattattgtgatacttactgctttgtaaaacttggactgaagcctgaggaatcccactgagtgtggaggtggtgatctctacccgaagggtcagctgggtggtgctgtgagacatgatggagtggcaggtctgtaaaactcccgtttgctgtggcttggatgagatttgcctcggagaagctttgtgttcatgttcttgtggggcctctgcctggagggctttgcaggttgagaagcatcaagtttacttccagtgggagcgtttttgttcttctttgaaggggctgaggctggcggatgtgccggcttcatgagtgggtgattccacagggaccgagggtgtcttcagaaaaaagcatttcggcccgctgtcctctccactctggtcccagggaggctggaagcagcctgtgtttgctgttccctttttccagtccagcaatgtgaaccaaaggctccgtctccagcgctcaggcctttatagcacaggcatgtgtcactgatccgcatgatggactgcagtgcttgaaattctcctccactgaacttgcgagtgtcttggggaatggcatttaccaagttatcgattctaatttagttaatctgaaagtgggatattgacacccttttaaaacttatgtagggctcatattcttcatgactttagttgtcgtttttaggtctgttaaatgggcaaataaaagatgcttccgacagaaaaaagttgaactggctggctaatttgtagctgtattcatcaattatatggttgttttaatgtattaaaatgatacaattctagaaattaggtgaatttgcttctgaattaaaaatcagttgaaccttggcattcactctccacttagctctgaaattgtgtcataatctatcaagcaagtccacaccagcttgggaaatcttgcatgaattaggctagtaagtgttaccttaggtatgtcttgagaggctgactgagtaaacttgtcatctcagtcctttcccttatcaggctaaattccatcgtgcagagacttgcttgggccccatgagagattatgcccatccagcagtcgggggtgctccaatgggcctgtgctctggggaacgcttgggaagccctattggtcagtgtcatggatcaaaaagccctatcttcatatcggtgaaaggtgtccttgtcaaatagagcaactcagttttatccttgttggttctgtcactgatggtggggctaagagtccttcactgatactgaaaactcaaaattatagctggagtgatggggactttctctacccagcgtatatgcaaagaacattcacttgagcctgttttctgttgtaaattaagactcaaagatagccagaagagcagaggtacctgagtaataaatttctttaaaaataaggaattgcataaaagtgcctctacagggtctgattcctgcccttgtctctgttcagatgctcagttacgagcaataaggtagctattgtttaggtttccagggttcgagcactgaagggaaggtatagaagaaaccacctctttttcagccctgaggtcttaagtagatgcctcactggtgctgaagctgccaataaattgctgtattagcgtgggctgacatggttgatgaatattgtgtaaggaagattgcccactgtaatctaaccaagtgaagtcttggcagatagcagcaccctgcacttagagaatgccacaaaacaaattgagtccatcctgcaggtcctgagctgggttttcttcctagagcacagtgcatctgatcccaaagagaactccctctgtaattttgtttcagttcctccaactcctctgccaaccaatgatgttgatgtgtatttcgagacctctgcagatgataatgagcatgctcgcttccagaaggctaaggagcagctggagattcggcaccgcaaccgaatggacagggtaaaccttgacaatttcttcatcttcatggtacttggctttgggtagcatggttctcatagctgaagaaaagtaatagcttctccctagattgtcatgctgatgtataaggactggtgagtcaggagagagttaccagtggagctgccttctgggtggacttcttcaccacctgcatccagataatatataatataattatcctctgagcacttcctataccattatctgccctttttttttttttttttgccattaacttgctttaaaatttctttattttaaagaaggaaactttatatcactgttatcaataaaaagctagtaccatttgccgtgagaagaaagtgaccaaccatacaaatatattagatgaaagcaaacatgtactaatacatgctagctagatactgctgtctctggaaggttctgagtctcagagatgtttcttttcctttaaaagggttataagagagcagcaggaacaccaaagtgcaacttttcttctggatttactcaggattgaagagaattgaaaagggaatgccttgctaggcctaagctccaccccaaatcccacacagtcccatgttgggcttacagtttgcaaaatgcttattgttttatccacatcagctctgaaaagtaggtattaacctcaatttttttggtgaggagactaaggcacagagacttttaaataacttactcaaggttatgtaacaaagaggtcatggaattgaggctccatctggggatagttgaggcctggaaccttctgaggcagtaacaatgctaagctcctaagagattgtgtgattggtttccttttgcagtttcctgtgagatttagcatctgacagtgtttttagcaaatggaggagttgtttcggggtattaatcactgctgacggcgtttttgacctttgt

SEQ ID NO: 5123 - DNA, 6000 bp, Homo sapiens
tgaactgccctgtcactgacccctgtgatgcatgccagctcatggggcgcctcctctcgaaaggagtgacagtgaagtactttgggcagtctagaatattgaaatatcttgcataatgcactctagagagagctagcagccaagtggtagtgactcactctgtttcttcaatattttgcaaccgggtcacacagctttaggaagtgagaggatttcagttggtgtgtgctttggtgtgacaggaaggtcagtggttcagttgagttgggtttatgctggacgttggtagaaagagtttctaccaagagttttcccttttctccatggctactcctttttctcgttaagaccttcagtctctcaccttgcagcactaacctacacattaggaaaatcctcaggccagacagtttttcttggttcctactctggaatttgttggagtaataatttgctatgaagaatttggctatagcttctgacggtttttcattcacatgccttcatgttccctcttccttccttctaccaaaagatctttcaaatcttaatgtaatatggcagtgccttgagtgcttcccttccagctccaggaaagctgtttttattcggtaacagttgaaaggtgaaagaaaaggaggccttagggaaccttggtgaataaactttgcgttttcaggaaagatttagaaatagaaattattgtgatacttactgctttgtaaaacttggactgaagcctgaggaatcccactgagtgtggaggtggtgatctctacccgaagggtcagctgggtggtgctgtgagacatgatggagtggcaggtctgtaaaactcccgtttgctgtggcttggatgagatttgcctcggagaagctttgtgttcatgttcttgtggggcctctgcctggagggctttgcaggttgagaagcatcaagtttacttccagtgggagcgtttttgttcttctttgaaggggctgaggctggcggatgtgccggcttcatgagtgggtgattccacagggaccgagggtgtcttcagaaaaaagcatttcggcccgctgtcctctccactctggtcccagggaggctggaagcagcctgtgtttgctgttccctttttccagtccagcaatgtgaaccaaaggctccgtctccagcgctcaggcctttatagcacaggcatgtgtcactgatccgcatgatggactgcagtgcttgaaattctcctccactgaacttgcgagtgtcttggggaatggcatttaccaagttatcgattctaatttagttaatctgaaagtgggatattgacacccttttaaaacttatgtagggctcatattcttcatgactttagttgtcgtttttaggtctgttaaatgggcaaataaaagatgcttccgacagaaaaaagttgaactggctggctaatttgtagctgtattcatcaattatatggttgttttaatgtattaaaatgatacaattctagaaattaggtgaatttgcttctgaattaaaaatcagttgaaccttggcattcactctccacttagctctgaaattgtgtcataatctatcaagcaagtccacaccagcttgggaaatcttgcatgaattaggctagtaagtgttaccttaggtatgtcttgagaggctgactgagtaaacttgtcatctcagtcctttcccttatcaggctaaattccatcgtgcagagacttgcttgggccccatgagagattatgcccatccagcagtcgggggtgctccaatgggcctgtgctctggggaacgcttgggaagccctattggtcagtgtcatggatcaaaaagccctatcttcatatcggtgaaaggtgtccttgtcaaatagagcaactcagttttatccttgttggttctgtcactgatggtggggctaagagtccttcactgatactgaaaactcaaaattatagctggagtgatggggactttctctacccagcgtatatgcaaagaacattcacttgagcctgttttctgttgtaaattaagactcaaagatagccagaagagcagaggtacctgagtaataaatttctttaaaaataaggaattgcataaaagtgcctctacagggtctgattcctgcccttgtctctgttcagatgctcagttacgagcaataaggtagctattgtttaggtttccagggttcgagcactgaagggaaggtatagaagaaaccacctctttttcagccctgaggtcttaagtagatgcctcactggtgctgaagctgccaataaattgctgtattagcgtgggctgacatggttgatgaatattgtgtaaggaagattgcccactgtaatctaaccaagtgaagtcttggcagatagcagcaccctgcacttagagaatgccacaaaacaaattgagtccatcctgcaggtcctgagctgggttttcttcctagagcacagtgcatctgatcccaaagagaactccctctgtaattttgtttcagttcctccaactcctctgccaaccaatgatgttgatgtgtatttcgagacctctgcagatgataatgagcatgctcgcttccagaaggctaaggagcagctggagattcggcaccgcaaccgaatggacagggtaaaccttgacaatttcttcatcttcatggtacttggctttgggtagcatggttctcatagctgaagaaaagtaatagcttctccctagattgtcatgctgatgtataaggactggtgagtcaggagagagttaccagtggagctgccttctgggtggacttcttcaccacctgcatccagataatatataatataattatcctctgagcacttcctataccattatctgccctttttttttttttttttgccattaacttgctttaaaatttctttattttaaagaaggaaactttatatcactgttatcaataaaaagctagtaccatttgccgtgagaagaaagtgaccaaccatacaaatatattagatgaaagcaaacatgtactaatacatgctagctagatactgctgtctctggaaggttctgagtctcagagatgtttcttttcctttaaaagggttataagagagcagcaggaacaccaaagtgcaacttttcttctggatttactcaggattgaagagaattgaaaagggaatgccttgctaggcctaagctccaccccaaatcccacacagtcccatgttgggcttacagtttgcaaaatgcttattgttttatccacatcagctctgaaaagtaggtattaacctcaatttttttggtgaggagactaaggcacagagacttttaaataacttactcaaggttatgtaacaaagaggtcatggaattgaggctccatctggggatagttgaggcctggaaccttctgaggcagtaacaatgctaagctcctaagagattgtgtgattggtttccttttgcagtttcctgtgagatttagcatctgacagtgtttttagcaaatggaggagttgtttcggggtattaatcactgctgacggcgtttttgacctttgttctaggtaaagaaggaatgggaagaggcagagcttcaagctaagaacctccccaaagcagagaggcagactctgattcaggtaagatgccttctctggggacatagctttcagcctgaccattggaaaatacggtcagagccccattcccaacgaaattaggattggacaccacctccttttaggtgagggcttacaaggaagttgtaactggcctgtttttctttttcacctcaagtattgctaacctatggtagaaggaaaccaaacccccaccagagcacacctaattcatgccagaaggtaaccttagctcagctgcctttcgttaattctgctttcctggcaaaagtcctctgccattttcagtcttagactgtgacttgtttttcagcagtactgaattttttttaagactaattgaaagtcaaaggatagaaaataaagatctctgatacaattcatctctaactttgtagactataactaaaatcatagcagcaaactgcattccccttcagtagaagagtgttgctaggaatagggatagcaatttccaggactgatttggtttttacaaaactgattttgtaaattttaaatcattttatgtttagctgaaatgcctttcctcctaatgtaacactttaataaagtgttaaaaataatcttaaaaggcttttttattgatcacttagaaaatctaacagttttaattcctacagaagtcagtgcatcttgttcagggaaatgtagttcagcaggcttaaactgtacctgtaaacctggctggatacctcacggataacttgcccttcatgactttattgatagtaatggcaaaaatcacaattacttttgcactaacctaatgacaggaatacttcaacagaacttaccacataactcccattggtcagtggtctcagagtttggaagttagtgccttgctgcaatgtgggaaggacagtgttctttttttatagtgcatattgagaaaccaggccttgggcttgcaggcactagcacttgtagttacacagatactaaggaggccctttgacactgaggtttaacttgctctctttaaagaaggaagtaattctcctgatagaagtagaatgaaggtaggatgaagtagactttggatcttacccttgctccactctccgaacctgttactgtctcgcatgggcactgacaggagaagcactggggtctcagggtgcttgcttaggcttcctctgggtgccacaaatcatgtgtggttcctgctttcttggtttagcacttccaagccatggttaaagctttagagaaggaagcagccagtgagaagcagcagctggtggagacccacctggcccgagtggaagctatgctgaatgaccgccgtcggatggctctggagaactacctggctgccttgcagtctgacccgccacgggtgagtcctgcccctagcactgcctgccctgaggtggtatatgtaggggaccaatgtatgacactcaggtcagtaaaagtgacatttgtatgacaagttctggcaaagctgaagctaaggaaagatgatgagggaggaaaaggtattacattctaatatctgtgtatataagctaagcatgacatcgctttatgcctgcgtataccacctgtgatgtgaaagtgttttacgctggaaaagtataacctcgcgaaattgatgggtaattatccagttattgaacttcctttcaaagaatgaaaacatgctattcatgaagacttttgaacaagttacattataaataagattatgaagaaaggggtaaagtaatttcttctgaaactcttgtgtgagtggtctcaaatgattttgtcccttaacactaacctgccttgctttgggggatggaaagtattgggaggatatttgtgtccttaagtaagccggttaaagtcttctctctttgggtgacacaggagactatctagcttataggtgtcagaggctgagccaggaaaaaggacagatcagaagagaacgggagtgggcaggagattctggaaaatactgtatgttaaggagccagtataactttggaacttagttttgctattttacctagacagtttttttgttacttggtaagctaaaaaagccttccagttacagctttcattcttgtgcctagctgagctttacattcttaagtgaactttttaagcttttgttttcctgcctattttcaattctctagtctctggatattaaaacaactgttctctcttgcagcctcatcgcattctccaggccttacggcgttatgtccgtgctgagaacaaagatcgcttacataccatccgtcattaccagcatgtgttggctgttgacccagaaaaggcggcccagatgaaatcccaggtacagtagat

SEQ ID NO: 5124 - DNA, 6000 bp, Homo sapiens
tttttaacttatcaaaacccattacatcatttgtaaaatgaaggtaataaaataatacagttcaaacatcccaaattcaaaaattaaaaatctgaaatcctccaaaattgcagcatgtttgagtactcatgtgacactcaaaggaaattcttattggaatatttccaatttcacattttaggatttggaacgctcaagcagtaagtaagtgtaatgtaactattccaaaatctgaaagattctgtatctgaattttggtcctaagcattttgtgtaggggttgttcaacctgtacctacattttagagttgttataaggattcttggtatacatatgccacacatacagacacactcaaaaacatagccaatgtgtcagaaatcttcagtgtatagaatgtacatggaatatagtatcttccatgtgaatcggatacgtttttctctgaaatatataagtcttgcatatgtctttaaaaataaagtacctaaaacattcttttttgccctctatgacgtcatttactctcactttatcttactttttgggttgactccttttcatagctggcttttccaaaatctggcccctcagcagagcttattttttagctgtacctttgcaatatttatacttcctctccaggcgatttcatgcattctaaatattttatatattgatgaccctcaatttgcatgtctaaaccaaaactctcccctgagtccaaccttacatattcactttcctgtttgacatctttacatggatatctccaaggcatctcaaattttgcatttgcaaaagaagatcattaattttcttctgcccctcacgtgtttatgtgctagtctaccctatctgtattaatgctgtcaaaatgcactaggctgtcaaactagaagctaggagtagaccctgattcctctctctaccttactactcacatctagtctatcagcaaatacagttgattcaacttggaaaatatatctgactgtgaccacttttctcaatatctactgtcgccaatcatagagaagtcaccatcatttcttgctagattattacaggtttctttataagatttcttcaattgattatccaggaaaatgagcagccagaataatcctttctaagattgaattgttccagtcatttgcttaaatctcctcaatggctttctgttgtaattaacattattattattatcttttcttgagacggagtatcactctttcacccaggctggagtgcagtggcacaatcttggttcactgcatcctcctcctcccaggttcaagcgattctcctgcctcagcctcctgagtagctgggattacaggcgtgcaccaccacatccagctaatttttctctttttggtagagacggggtttcaccatgttggtcaggctggtcttgaaagcctgacctcaagtgaactgcccgcctcggcctcccaaagtgctgggattacaggcgtgagccaccgcgcctggccaacattaaattttttttataagagcctgcaacatcctgcatggcctggacctttcttgcctttccatcttcagcttgtatcatcatgcctcccatgttcttcatgttgtaggcatattttttacgtgactgcctttatttcattcttctgtatatttttctttttcttttttgtgagacggagtctctctgccgcccaggctggagtgcagtggcgcaatctccactcactgcaagccctgcctctcgggttcacgccattctcctgcttcagcctcccgagtagctgggactatcttttctttttttaactttaattttaagtatttaaaattaaaaattcaggggcacatgtgcaggtttgttacataaactggtgtcatggggatttgttgtacgtattatttcatcacccatgtatgaagtcaagtattcaccggttatctttcctgatcctctgtctcctcccaccctccagcaggccccagagtatgttgttccccactatgtatacatgtgttctcatcattcacctctgatttacatgtgagaacctgcagtatttggttttctgtccctgtgttaacttgctaaggttaatggcctccagctccatccatgtccatgcagaaaacatgatctcattttttatggctgtatagtattccgtggtgtatatgtaccacattttctttatccagtctatcactgatgggcatttaagttgattttatgtttttgctattgtgagtaatgttgcaatgagcatgtgtctttataatggaatgatttatattcctttgggtatatagccagtaatgggattgcagggttgaatagaatttctgcagtgggagtataaattagttcaatcattgtggaagtcagcgtggtgattcctcaaagacctaaagacagaaataccatttgatctttatttttctttgtattcaccaggtttcagctaaagttaccctttagaatacaaatatgtaaggcccacaagtatagggagcttgtatattttgctcatacttgaatattcaattcccaggacagaattatagcatatacataccataaatatttgttaagtgagttaatgaatagatggggcatgttaggtgctcaatgaaagataataatgatacttaccaatgtatattattacagttctttgttacactagtctctttcactgaatagttaataattttttgttaaataagtaacaaacttcgcataccttcaaaaggcaatatcttagtgttttaacatgtatactgtatctcaatatgtaggggtttcataaaacaacttaaatgaataaaatgcatgggattgatatttcagccacacgagcctgacaggacaccaggtctctcatatcactttgatgttcttacataaaaaatgagtcgtgttttgttatttgttcactcgctaacattctgatttaataagaaattgtgctttctttaactttagatatttctttttgtctgcagcagaattcacatgaccatgagaataattattttaagcttgggtctaaggaaagtgaaagaaaggtttggtaatattcaaatgacttgccaatgaaaaatctaacagtcttcatttcttcctctgtatctacaatgccaacttttgtaccaaaactatttttttctatatattcccaaatgtctagttattctggaacatctggttatttgatgaaatattaaaaagtttagcttttgtcactgtacataggaagactttctctgttgccataggaaacagtagaaggaaatagtgaaaatgatggtaggagtgattagaaacatgattcaagttacattcattttgtgtctggacttaactttttgtagatttgatgacctttgaaaccattagtattcttgtaaaagtgcgatatttacatacattcctgaagaaacatcacctgtatttgaaagttggtgcttagaaagttagtcactttaaaataatttgagatccttggctggcaaagttgataacaaagtaagtctcttacacaattcccctaagtgatcaaatcactaatttgtcaattctcttttacaaattatgctagaatttgccatggaaaatttgggacaaaatttctttcttcccaggaatttaaattgaaatagatgatgacattcatagctatactaaatttctacctggcagaatagttccaaacatacatccttttagcctttgagccttagtgatgtggaatgtttttctggatcagggctagaggactgattactgtgaaatgtattgcaagactgtgtaattactttgaagactctctggaggaccaagtaggttgccagagaattttctgtcttcatgacctagccacaaaatgcccttgaaaatttaataacaacaagatgttgttttgaatatatatagcactttttaacttgtaaagcgtttatttcgttgatatcttgtattgattcccataagggacagcctagcacatagtatccccatttttcaggtgagcaaattctggtaccaagaggttaaacagtttactaatacttcttaatataagaacagggattgaaatgtgaatattcttttctctaaaaattggtgctaatttgactcttccttgcagcctatttgggggatgttgtactctataattccccaaccttttcctttctcttctacagtttatttaacatgaaacacccacctttcttcatttgtttttattatatcttccacattaattagacaatacttatttattcctgagaagattattcaacttgcttgacattgtatttggagagagaatatgtgaggtatttttgaaaagataattttatttttgtaattgcataattaattacatgctcaaggctaaagatttcaaaagaaaagaaagcctaatgaaaatttaacaacagttatccacactttcattaccaagagatcaccaatgtttaatattctggggtgcatacttcttgaagttttctgttcatggcgtagttttgcttctaggatgctctgtcatctctgcctgagattacaatacagttctgcctgccacactcaagatttagttttgtgtattgcaggtgaacaaaaaaagactattaatctaagcaaggcagggtcaagaagctacatcagctgcttcatcaaatcacaaaggaagcagacaaaggaaagtcagaaacgtttttgaattttttttcttcgttatctgcatcatcaaaatattttctctgctaacatggattatagaacttccccaaactagttgcatttatgtttgttaaagacccatgttattttttttttttcaggtttagaagatcatgaccacatggatcatctaactaaatggtacatggggacaaaatggtcctttagaaaatacatctgaattgctggctaatttcttgatttgcgactcaacgtaggacatcgcttgttcgtagctatcagaaccctcctgaattttccccaccatgctatctttattggcttgaactcctttcctaaaatggtccttctgttgatcctgtcagtcttacttttgaaagaagatgtccgtgggagtgcacagtccagtgagaggagggtggtggctcacatgccgggtgacatcattattggagctctcttttctgttcatcaccagcctactgtggacaaagttcatgagaggaagtgtggggcggtccgtgaacagtatggcattcagagagtggaggccatgctgcataccctggaaaggatcaattcagaccccacactcttgcccaacatcacactgggctgtgagataagggactcctgctggcattcggctgtggccctagagcagagcattgagttcataagagattccctcatttcttcagaagaggaagaaggcttggtacgctgtgtggatggctcctcctcttccttccgctccaagaagcccatagtaggggtcattgggcctggctccagttctgtagccattcaggtccagaatttgctccagcttttcaacatacctcagattgcttactcagcaaccagcatggatctgagtgacaagactctgttcaaatatttcatgagggttgtgccttcagatgctcagcaggcaagggccatggtggacatagtgaagaggtacaactggacctatgtatcagccgtgcacacagaaggtaagtttcctttgcatacatcgagtatatattattatgcactcaacagttacaatttcaggtttgggaagagtaaactattcctaattattttggatattttgaattgtccgagttataccagtactataagaacagactggatggcatatatctagagagacaaagacttaaactacagaagggtgtatgtggccaatatttggtgaaatataattttgttttcattgtgaattacattatttacttctgctatactgatgctatattatacttctactcta

SEQ ID NO: 5125 - DNA, 6000 bp, Homo sapiens
tgcagtgagctgagatggtgccactgcactccagcctgggcgacagagcaagactccatgtcaaaaataaaataaaataataataataataataataataatttttttttttgagacggagtcttgctctgtcgcccaggctggagtgcagtggcaccatctcggctcactgcaagctctgcctcccgggttcatgccattctcctgcctcagcctcccgagtagctgggactataggcacccaccaccacgcccggctaattttttgtatttttagtagagacggggtttcaccgtgttagccaggatggtcttgatctcctgacctcgtgatccgcccgcctcggcctcccaaagtgctgggattacaggcgtgagccaccgcgcctggcctaatttattttatttttatttattttttgttttttgagacggactcttgctctgtcacccaggctggagtgcagtggcaggatttcagctcactgcgacctccacctcctgggttcaagtgattctcctgcctcagcctctcaggtagctgggattacaggcgcccaccaccacatccagctaatttgtgtatttgtagtagagacaggatttcaccaagttggccaggctgttcttgaactcctgacctcaagtgatctgcctgcctcagcctcccgatgtgctgggattacaggtgtgagccaccacgcccggccaataataattttttttttgagacggaatcttgctctgtcacccaggctggagtgcagtggtgcaatctctgctcactgcaagctccgcctcccgggctcacgccattctcctgcctcagcctccagagtagctgggactacaggcgcccaccaccacgcccagagaattttttgtatttttagtggagacggggttcaccgtgttagccagaatggtctctatctcctgacctcatgatctgcccacctcgaactaccaaagtgctgggattataggcgtgagccaccgcgcccagcctaatagtttttttaaaattccttggcatcatcctgactcctctctttccctcgcaccccacatccagtccatcagcagatcctgccagttctgctttaaaaataaatccagggatcagctacttctcaccacctccctggtgactctctgaatgtctaaatctgaccatgctgcctctgctcaaatcctttccaggtttttactcaaaggcaatgccagagtccttagaatgaccttcaactttaggtctccaaataccctttcctaaaccccctcccctaggcccaccctagccaggagcaggtgttgccctcgaggccttaccatctgcccttctctctgcctggaactctcttcccatcatccctgtggccttggctccagtggtgcttctcaccaaggtgagtgctgaccacctctgctaccatcactccccccgcccctgtgactccggattctcttaactcttttttttgagatgagtctcactctgtcgccaggctggagtgcagtggcacgatcttggctcactgcaacctccgcctcccgggttcaagcgattctcctgcctcagcctcccgagtagctgggactataggtgcgcgccaccatgcccagctaatttttgtatttttggtagagatggggtttcaccatgttggccaggatggtctccatctcttcaccttgtgatacgcccacctaggcctcccaaagtgttggaattacaggcgtgagccaccgcgcccggcctctcttaactcttttacatgctgcccccatacaaatcttctcacgcatgataggatgcttttgtgcttgtttgctcatggccccaccagctcactagaaggtaagctccacaagggcaaggattcctgacgcttgggttcaccgaggccccctagcaactggaacagcctgtgtcacacggtgagcactcactgtgtggcgcgagtgaatgctgagtgtgtgtggggggcagagagcaggggaagtttgtgagcagaaaaatggccaagtgcaagctcaggaagttaaagaaagctgtggaggctgagcatggtggctcacgccagtaatctcaacagtctgggaggccaaggtgagaggattgcttgggcccaggaattcgagacaagactgggcaacaaagcaagaccccacctctacaaaaaataaaaaatgagctggtgtggtggcatgcacctgtggtcccagctgttctggaggctgaggcaggaggatcgtttgagcccaggagtttgaggcctgcctgggcaacaaaaggagaccccgcccctgccctcatctcatgaaaatgtgaaaaatgctgggcatggtggctcacgcctgtaatcccaacactgttgggaggctgaggcgggtggattacgaggtcaggaaatggagaccaccctggctaacacggtgaaaccccatctctaataaaaatacaagaaattagcccggcatggtgacacgcgcctgtagtcccagctactctggaggctgaggcaggagaactgcttgaacccaggaggcagaggttgcagtgagccgagattgcaccactgcaccccagcctgggcagcagagtgagactccgtctcaggaaaaaaaaaaaaaaaaaaagaaaaagtaaaaaataaattaactgggtgtggtccacacacctgtattcccagttacgtgggaggatcacttaagcccagaagttccgggctgcagtgagctgagatcgcacctctgtactccctcctgggtgatagagcgagaccctgtctcaaaacaaaacaaaacaaacagaaaaaaagaaagcaagctatggggtccaatctgagagaatcgagtgtgggtgtttatccgtaagagagcgaggggaaagaggcctcttaagccttcttaatcctgaaaatggggaggaggtcttttaagctgcagtgccagagtgacatgacctagttttctatttttagagatggggtctggctatgttgcccaggctggtcttgaattcctgggctcaagccagcctcctgagttgctgggactacagacatgtgccaccccacccagcttgacctggtttttgtgttcagaagatatctgttgttgttccaggtgccaaggccagtgctgggcacaggggtgctagagcctactgagaaatggacatagaaccccagtgtccatccttccatcttggagcctgtgcttctcaccccacacagccctgctgtctgggaggactgtctgccccttgaggtcatctgcccctggccactgtgccaggacagtcctgctgtgggtacgagccacagggcaagaaagaacacatctgggagctggaaggcctaatcccagggaaagcatgtagcctggggcagggcaccaaggaggcttccagcccccacattctaaggaaagaaacaccaggaaggtgtggccttaggcaggccccttttccttttcggatcactgcctgcctgtcactgatttctgtcctaaccccacactaatagctgctatatatatatatatgtattttaagagctggagtctccctaagtcactcaggctggccttgaacttctgggctcaagcgatcctcctgccttggcctcccaaagtgctgagattacaggtgtgagccaccacgcccggcagcaaccattttttagctttaatgtgcaccagctctgtaatcaagtgcatcctatatgttcctgctaattaactcaacagtcctacaatggtggttattaattgctgttttacgaaagaggaaactggggctctgagagtttggggaccgacccaaagcattcagtgcctgtggatgcaactgggatgcagggagccagtgggctgggggtgaggtgtcccggcaggtggaggtggtggggtacttacctccatgatggctgctgctggttggctgctcctgctggtgactggcgtcccacaggaggcctggggcctggcgatgatgcttgccggagcctgagggcccgtcccctgcggggctggggcccaggcccctctctgcagagctggagtcttcctgctcactcggctcaaactctgggatctggaacatgctctgggctgtgaggacaagatgttacgtagtcaaggcacagctggggccaacggtggccctggaaggcagaggcaggtacccctggcttcctctcccaccgtagcgcccccaggcccgccaggcctcctgggccctcatctgtctgccgggtctggcctggcagggagctgaggctgtcggctcaggacctcagtctcccctcagaaccccggtggacccaggccccgccccgcccgtggtgacggcgcacaggtctcaccccaagcccgatctcgaggcccctgacccgggcctgccgcctccctccagcaccccgggctccgggccctagttgcttgggcaacgggaactgtcagcgacctggcccaatcacctctcggaacgtcactcgggtaggtccagaggcggggtcaacccggcccggccccgcccccccgccggatccaaggctcctcgtccgcatcctttttcctccctccttcggccccggggctcacatcctcgctgcctcacaccttgggcgtgtgtgggagcaggagagggattctctggggtccccatttggaacctggagacccacttctgccaacaagtccttcagcccctctgggccttagtttccccccagtgaagtggggatagtgacagctcccccgggagccagtgaaaactttgtgaagggagtgattactgcgggcgaaggcgcttggcacagccacaactgaagctcagccgtcggatgtgattattgttgctattgttaccgctccgcctggactgggtgcccggtcggaaagtcccgctccccgctcctcctcccaggcgcggaagcttcgcgccgcccgcctcgggggacacctcccgcgccatctcgggggcactggagataaggaaaggaacctcctccctggctgggatggctgcccgggcgcgggaggagggccggggacccggtgagggaggaccgtagggcccgtgggggcttcacgcctggcaggcggccggccaggtgagcagggccgcgggcgcgccggggcgaggggcgggcccgcgcgggggattcggggctccgcgggttcaggcccgggggcggggcccgggggccatcttggctatgggcggaagttttcttcagagaccgagggacgggaatccgttgccgcccccggccgggcggcacgaccccgatttgggtataggagagaggagcgtgggaactggcggacccccatacaagtaaaggcgggcggcacggggcacggcccacccggggaccccctggatgcggcacggcccccgcaactcggccgccctcctgccgcctcccgtaaccccgggcgcccgccagcggcgcagctcgcgccaattctcgtacggtttcacgccgggtgcggcgctggactgcggagccagccgggccgctgcgcaatttgcgtagcgaacggcgcccgcgcaggcgcggagggggaggggggcggagcagcgggagccggggagccggagccccgggtccccacgacctgagccggctctcccatcagcggcctgaggacctggcgtccgcctcctccctccccttgaggctggagcgtggacgcggtgggggagggtggggcgggggcagctttcgagaattacgaggacaggaggcagaggccctccccatccgcattattggaggagagagagcctcccccagcttggggagggggagagcggggcattgggcgcccctcgcagcggccgctgccctgacccgacgggtatcagccggctctccccctccacccaggacgacatgaacgaccgaggccagggagtcctctccttgggcctctgcatccccccatccttggctctggggtaggcccagggaggagacaccc

SEQ ID NO: 5126 - DNA, 6000 bp, Homo sapiens
gagtaatggatgtttttagagagatgcctgtgcttgtctctctctttctctctctctctccctgtctttctgtctgctttttttttttttttttttgagatggagtttcgctcttgttgcccaggctggagtgcaatggtgtgatctctgctcaccgcaacatctgcctcccgggtccaggcagttctcctgcctcagcctcctgagtagctgggactacaggcatgtgccaccacacccggctaattttgtatttttagtagagatggggtttgtccatgttggtcagtctggtctcgaactcccgacctcaggtgatctgcctgccttggcctcccaaagtgctgagattacagatgtgagcccccacgcccggccgatgcctgtgcttttctcgtgcatgtctgcaggagccttgctgttgtaatgttacttctcagctatagcttctgagctgttaatggttagactgcacataaaaggatatgggccaaagacagatcttatggaatagttgattatttttacccaacatgagagaaaattgttcatgaaatcccctttagtgttctgtgtttatgaatgatgccatcacattttgaatcatgggagccaaacttgaaccttcctcttcctcatccctcatatcagttatcacacctaggcctattttaggctctgtggtttcttgaatctctctatccaccactccaccttagcccaagctaccatttattcctctcttggaatgtgcacctccagtgtcctgaatgatttccctgcatacactcatttcctttcagtcggttcttcaccgtgcaactagagaaagcatcagagctttgttatgaaaatagtaactttctgcttaaagcctctcaacacttcagtggtaaggactgaagtcctttcttggtctgcagactcttgtcccggcatgcctctcccaccatctctctgcctcaaaatcaacattgcctccatatgggatgcttaaagcgctactcagctgtcactctctttaggaagcttccttgatcagcttcctacccaagcttaggtcagattcctttttttttttgagatttgagtcttgctctcttgcctaggctggagtgcaattgtgcaatctcggctcactgcaacctctgcctcccgggttcaagcagttttcctgcctcagccccctgagtagctgtgattaccggcatccgccaccacgcctggctaatttgtgtatttttagtagggacggggttttgccatgttggacaggctggtctcgaactctcgacctcgtgatctgcctgccttggcctcccaaaatggtaggattacaggtgtgagccaccgcgcccggcccagattccttttttatgtgctttctcaacactgtgttcttttccttcttaagacatttgggaatgtggtcacactttttgtgagttttaactcttgcattagagccccaagaaagcaggtcatgacttttttgcccactcttatatcctaaacacttagcatgttgctttgcgaaatagtagttgctcagaaaattttcttttgtgggtaaattaagtaaaattattggaattttagtaattctccactttcatgatttggtgtgtgcaaaggattagaaagtagattagcttttacgaggacagactgcagttggattatatgttctaaagttagaagtatcccagatggggattgagggttagatttttcctttgcctaagtctcaggatacaaaatcaatgtgcaaaaatcacaagcattcctatacaccaataacagacagagagccaaatcgtgagtgaactcccattcacaattgcttcaaagagaacaaaatacctgggaatccaacttacaagggatgtgaaggacctcttcaaggagaactagaaaccactgctcaatgaaataaaagaggacacaaacaaatggaagaacattccatgctcatggataggaagaatcaatattgtgaaaatggccatactgcccaaggtaatttgtagattcagtgccatccccatcaagctaccaatgactttcttcacagaattggaaaaaactactttaaagttcatatggaaccaaaaaagagcccgcgttgccaagtcaatcctaagccaaaagaacaaagctggaggcatcacgctacctgacttcaaactatacttcaatgctacagtaagcaaaacagcatggtactggtaccaaagcagaaatacagaccgatggaacagaacagagccctcagaaataacaccacacatctaaaaccatctgatctttgacaaacctgacaaaaacaagaaattgggaaaggattccctatttaataaatggtgctgggaaaactggctagccatatgtagaaagctgaaactggattccttccttacaccttatacaaaaattaattcaagatggattaaagacttaaatgttagacttaaaaccataaaaaccccagaagaaaacctaggcaataccattcaggacataggcatgggcaaggacttcatgtctaaaacaccaaaagcaatggcaaccaaagccaaaattgacaaatgggatctaattaaactaaagagcttctgcacagcaaaagaaactaccatcagagtgaacaggcaaccttgggagaaaatttttacagtctacccatctgacaaagggctaatatccagaatctacaaataacttaaacaaatttacaagaaaaaatcaaccccatcaacaagtgggctaaggatatgaacagacacttctcaaaagaagacatttatgcagccaacagacacatgaagaaatgctcatcatcactggccatcagagaaatgcaaatcaaaaccacaatgagataccatctcataccagttagaatggcagtcattaaaaagtcaggaaacaacaggtgctggagaggatgtggagaaataggaacacttttacactgttggtgggactctaaactagttcaaccattgtagaagacagtgtggtgattcctcaaggatctagaactagaaataccatttggcccagccatcccattactcggtatgtacccaatggattataaatcatgctgctataaagacacatgcacacatatgttcattgcagcactattcacaatagcaaagacttggaaccaacccaaatgtccatcaatgatagactggattaaggagatggcacataccatggaatactatgcagccataaaaaggttgagttcatgtcctttgtagggacctggatgaagctggaaagcatcattctgagcaaactatcgcaaggacagaagaccaaacaccgcatgttctcactcataggtgggaattgaacaatgagaacacttggacacagggtggggaacatcacacactggggcctgtcgtggggtggggagaggggggagggatagcattaggagatatacctaatgtaaatgacaagttaatgggtgcagcacaccaacatggcacatgtctacctgtgtaacaaacctgcacgttgtgcacatgttccctagaacttaaaatataataaataaaataaataaaaaagttttttcctttgcctttcactttgatcatacacatccagaagtcactttttattctgttctagctcctgggaaaaggatttgtttgtgaagatacaaatagtaaataattaaggtttttaaaagatgcattctgtcacatagacctgaatgactgttgcctctgtgctagccttcttggagtaaacctgcaatttttttccctttggtaggctcttgcagccaatgccggaacaggatttgctgttgctgagcctcaaatcgcaatgttttgtgggaagttaaatatgcatgtgaacattcagactgggaaatgggaacctgatccaacaggcaccaagagctgctttgaaacaaaagaagaagttcttcagtactgtcaggaggtaagagtgttgccagtaagttgaaagtgttatttttctggggcagggttgaatctgtttaccttagaaatagatattctgtcattctcttttgacctaagaccaagatgctaatgactggagccccaagccttttgtttctaaatgtgtggcatgactgagacctctcaaaggctttgcctgcgtgttctgtgagctctcagttctttaaggaagggatactgcagaagcctggcaagtgccatgggagtgcagcctgcttctcatcctcccacttgtcttggaagatggaaaacaaaacatgtctccttactgacagaaagccaccagtattgtaaaggatcatctcaggtctgattcaactctgtgttaaagagaaaatgataggagatgttataacttgtatttattttttctgatagagacagggtcttgctacattggccagggtactctcaaactcctggcctcaagccatcctccccagcctcccaaagtgctgggattataggcatcagccaccacttcttaccaagatgagcagacagggccagggtcaagttctgtaatttcattgacagatgtttccatagacttgcctcacggagccatcagttcaacagctaccctacaagcaaacttgacatctcatgaatttgttttgggctaaaagcgtgctgcttttgtttgtccttaaatacatatcccttttgaaaacagaatgcgtggaagtgttcagaaatctaacctgtcaaaactaatacagtatctttttgtttgatgacttcagttagagccagggataatggagtggaactttagatgtatgtaggataagggtggaggctgaataaacttagacactccatccttacttgcaagtgtgtgtctgtctgcagattgatttattgtgtgtgtgtttgttttcttaacagatgtatccagagctacagatcacaaatgtgatggaggcaaaccagcgggttagtattgacaactggtgccggagggacaaaaagcaatgcaagagtcgctttgttacacctttcaagtgtctcggtgagtgttcttggttacttttcaggaagtgccagccccctcccattttaaatttaattttctcttggctcacagtgaaatatttacacctgttaagaagctgagtgtgacatgaatttattggggaggatttctcttaggggtgtttgctggcttcgagtgtcagtggttgacctcctctcagtgatggctaactctgccttcccattgtagacatccttcctcaggactgaataagggtgctacccacagagcaattgcacttacgccctcacattgtttgatatcagtggtttatggtgatagtgctgagtagtattaaagcaagcagccccaggagaagagtcttctgtttcccttactttcatcccacacacgtttgcaccatttgaccaaatttctgctagttttcaggagaaagaaaagtgacttatggcagcctgtggacagtcaagggtaccggggccagggcttataggacctgccattctgaagggtttggggctggtaggggtgttcgtgactctgtgttgctggtgtcaacattcagagccaatttgagtaaaacggtaactgtttgttatgcagaaacagagttgttgcttcaaatgctcagggaatatattcattttaactatttgtgcctgatacattggaattacactcacatatctgtggtctggtgattcaggaacagatttggtcacagaaacttcaaagggcaaaaaaaaatcaattttagattagccctgatgggattaaagtagatacagcattaatgtagacatcctgagtggttctgtagctatatgtaattggaactattaacttattctcctctctcccttctgtaaaacctttccttctgcttctgatggcagcaaaatggaatgtgatactttttctcattctcacgtgtagccaagccacaggaagaagcggtgcccctgaacaacagtgttt

SEQ ID NO: 5127 - DNA, 6000 bp, Homo sapiens
caccccccgcccacctttgctctgccgctcccagaggtggcccccaccccgctggatgagctccgaggtcacaaggctctggtcaagctccggagccggcaagagcgagacctgcgggagctgcgcaagaagcatcagcggaaggcagtcaccctcacccgccgcctgctggatggcctggctcaggcacaggctgagggcaggtgccggctgcggccaggtgccctgtgagtgtctgggccgcctgtgtgctatgtgtgctgggtgtgctgatgtgaacatgggggtcggtgggcatggagagatggcaagagctgctccttgacccccagggaggagggttcagtgcaaggatggaggaggctttccacaccaggcgtccctgtgtcccccagggagtgacatctcttttgaagtccatgaggagcatgttgcccaaacaggctcccatcacttgggtggagctaacaggcctcctggtttgcataacagacctggccccatgggatggtgtctgccatcgcttgccaggatgtgcccccctacacaccctccccatcccagtccatgtgacgggcccaggcatcacccagaggggttctcctcgcagaggtggggccgctgatgtggaggacacgaaggagggggaggacgaggcaaagcggtatcaggagttccagaacagacaggtgcagagcctgctggagctgcgggaggcccaggtggacgcagaggcccagcggaggctggaacacctgagacaggtagggggcctgcagtggccagggaaagcctgctggatagacccgtcgtcagcccggcatcacctgtcagctccctgtgtccacaggctctgcagcggctcagggaggtcgtccttgatgcaaacacaactcagttcaagaggctgaaagagatgaacgagaggtgaaagccgaggattgtctatgggaagggctggggacttctagtaccagaaggagggcagagtctgtgcttctgccgctgacccctcctcttcccctgccggcttctccagggagaagaaggagctgcagaagatcctggacagaaagcgccataacagcatctcggaggccaagatgagggacaagcataagaaggaggcgtaagggcaccgggaccgggggccatctgggtactggggaggcagggcaggtgtctgggccccgagccatcctgcgttgctcccgtgcagggaactgacggagattaaccgtcggcacatcactgagtcagtcaactccatccgtcgggtgagtcaggctcccgggccaccctaccccacctcccttccttcactcatcagacacccatctccatgcctggcctggtgccacgttgccctcaaggttcttctagggcctttctcaagtgcccaacagccccagggtacccacatcatacccaaagccaactgtctgtaccagtgtccctggctttggcgtccttgggcccagtcctctcacaaccctgatacattgccctgggagccttcgcccacctgacttctttttctttgagacagagtctcactctgtcgcccaggctggagtgcagtggcgcgatcttggctcactgcaacctcttgggttcaagcaattctcttgcctcagcctcccgagtagctgggattacaggcatccgccaccatgcctggctaatttttttatttttagtagagatggggtttcaccatgttggccaggctgttctcgaactcctgacctcaggtgatccgcccgccttggcctcccaaagtgctgggattatagatgtgagccactgcacccggcctcgcccacctgacttctatacccagccagagcctcgaggctctagcccctccctcagggcccctcagctgagcccttgcccacccctgtagctggaggaggcccagaagcagcggcatgaccgtcttgtggctgggcagcagcaggtcctgcaacagctggcagaagaggagcccaaggtgaggccatgggcgaacaggtgggcagacggggtgcaaggcagccaggcctcgcctgtgatgcccatccttctcccacagctgctggcccagctggcccaggagtgtcaggagcagcgggcgaggctcccccaggagatccgccggagcctgctgggcgagatgccggaggggctgggggacgggcctctggtggcctgtgccagcaacggtcacgcacccgggagcagcgggcacctgtcgggcgctgactcggagagccaggaggagaacacgcagctctgaactggctgagcgaggtggccacagggccagggcgggcgctgggtggagggcaggaggcaatgacactaatgctttttttttttttttttaactttttatctagaaattttatttttttaaacccggggcaagtacctcagctaactcccttcatcctcctggggcccctccttcctgccctcagtcttaggttagggccttggtcagggctttgctccctgtgacacccacaccctcgagctagcagcgtctcctcccttccccgggagagctggctggagacttggagctccgggaagtaggagtcacatttttttctctattctttggggattttttttacatgaataaaagtggatttcagggaccctgtgtgcagtgtgatttggggtgacaggactctgggccctaagtttcctcatctataaaatggactttgggcatttggtggggttgaggtcacgcctccagccaagggctgctgggttgaacctgagcttgccctgccgagtctgctgagcttccgtggccttctgcttgtgccctctgcccccaagccgctgttcctgttcccccatccccatgactttcgtctctccgaggctctccctgttctctcttttctgaggctcaggcctctgcttcaggaagccttccctgccccgcttcctgtggcctgatatgacccaaacgcctagtatcttccgctggggctgctctgggcccccgacaggcagttgactctatcaggtgatggatcggccagggtggagcagggcagctcagaacctgcccaacaccgggggacctgggtcttcagaaataggtgggcagtaggcctgcctgtgactctgggggaagggaagtggacagtcacagacacgcaggggctgggccacccagcatcccctcatccctgtgagggagatgttatgcctgttttacagatgaggagactgaggcccggagccatctgtcgtgtgctaggccacagctaagtcaagacgtcctgacctggaggcagggcaggcctggaccctccgtggtggactgtcttcagccagcctggacctgtcccatgcctcaagaccagcgaaaagtggcagagagcccacagtgcgggctccagggcggggctgggctcgcagcagggtcggcttggcacctcttcaaggcctctcccagcttcctggctcttcccaggctgcccgcctgcatccctcctccaggggaaggcggcctcttatctgggcttatctcctgccaattgagtatcttctttgctttgtttttgctgcagcctcaggcaaacagatggggtggggaggccagggaaacaggctccggagtagggccctcctccctcagggtcaatgcaatggccccagacttcctcacttcttctgtgggacgctgccctatcccccagttctgctcactccagtgtattccgtatctaggctcctcagcagccaactcccaccttcctgactctagctggtgtccactgagggacacactccaagtcagttcccaggtcctcaaataccagctgaatgtctaacttctgggtgtgacattccagcccctagaagcctggcctctgctgctcccctgtccttccatgggtccactcctccttgcgccgggggggatgaccctcacctcaccttccggtcgcagctctagctgcctcctccctgaagccctctctgactgccctgccgattccgggccctcgggagcttccgcgagcagggccgtggcgcaatgcatctctgtgcccggcaccaagaaccggcccgggttatagggggcgccaataaatctttctggaacggagcccccgctctgtccgggtccccgcatgaagcctcagtttccagcgaccgcgctgctgccagcctggctcagccgctccctcccgccccgcgaggtacccgggcggcgctggccccgggccggccacacagtagctgctggaaagggctgacccaaataggagcgagtgaccctctctggggggccgcggcacggtttgcagagcgcgggatcgggctgccggcagcgctgcggtcccaatgcgcgtgctggggacttggacctgggccgcgcagcccaggcccgcgagccgccgcgaccccttccgtctctgtcgctggatgtcaggcagagcctaagtttccctcgtaagacagcggcctcttttgaaagtatccgtgagagcactaccccggcctgccggagccccagtcgacgcacagaaaagcctcggcggcacagacgcgggctttattaacatttggtagtgagcacggcccccagggcatcgcgggggctcgggtcccggtgacgcaacggttaaacctggctcgcgacttagcgcaggcgcctgggggaaagcccggagcctgagggcggggccacggagccacttccggcggctgtgggcggaaaacccaaaacttccgatgggaccaagccttccgtggcttcacacgcaccggaagggaatctgggtcagccctccctccaaaggagacagcacggatcctctttttgcataggcctgagggaagtacttccgcccatattcaagatggctgcccagggcagtgggaacgggtggagtttcgggatgtggagcgaaggtcactgggagggggcggagcttcccctgcccaagttccgatcccaccaggactggaagactcgcgtccagctggagctttgccgcatctgcgttgctgtgcccgcgctcttcgggcgaggaagtcccttctggtggagggagaaaagggttacatgagttagattaccatggcagctcgagccaggctctccacttccgtgagccttcctctaagtgagatcgggggggagataatgaaggccacaactcccaggaggctccacgccgggcggtcagggacgctcgcgaggacgcatgggcccccaggaatgggaactggttagatcccaggaactccgtgccggagacgggaagagaggatgcctagggccctaaatggaaaggccagagctggagacctagcacccagaagatgagaccgcaattcgagaatcaaagggccgggagcgatggtgagcgcctgtaatcccagcactttgggaggttgaagcgggaggatcctttgaggccaggagttccaggctgcagtgagccgtgatcgcaccactgcactccagcctgggcgacagagcgcacaggtgccagcaaggagcacaaataccagcatgcctggtcttccaagaattcggggaacccaggagctttggcctggagtgggatctagactacagatcccagcatgccctgtgagacacacacacacacacacacacacacacacacgcctggagtgggatctagactacagatcccagcatgccctgtgacacacacacacacacacacacacacacacacacacacgcctggagtgggatctagactacagatcccagcatgccctgtgactgacacacacacacacacacacacacacacctggagtgggatctagactacagatcccagcatgccctgtgactctctcacacacacacacacacacacacacacctggagtgggatctagactacagatcccagcatgccctgtgactcacacacacacacacacacacacacacacacacacacacacgcctggagtgggatctagactacagat

SEQ ID NO: 5128 - DNA, 6000 bp, Homo sapiens
gcatgagcccctgcgtccagacatccttagggtatctttttagaactggaattgttgaatcaaagagtactgttaaaagatatatatatatatttttaggccaggcctggtggcttatgcctgtaatcacagcactttgggaggctgggatgggaggatcatttgagatcaggagttcaagaccagcctgaccaacacggtgaaaccccgtctctactaaaaatagtaaaaattagctgggtgtggtggcgaacgcctgtaatgtcagttactcaggaggctgaagcagaagaattgcttgaacctgggaggcagaggatgcagtgagccaagattgtgccactgtactccagcctgggtgatggtgtgagactccatcttaaaaaaaaaagttaaattttagaatttagtttgttttcaaattcagtggtgttcttttttgatttttagagatcgaacagattgattcagtcatggaatagctgaagattagtggcatttaattttatggtttagcatggaattaattattttattaaatttttggcatttccgaaaaggttttgattttaaactttaattctgaaatattacaccaagcatcctgaagagatgagacataatgtgatggttgctcatatgctcaccctcctgatttcagttcttcagtgttctgtcatgtttgcttcatctccatctttttttttttctgagacggagtctcttgcccaggctggagtgcagtggcatgatctcggctcactgcaacctcagcctcctgagtagctggaattacaggtgcatgccaccatgcctggctaatttttgtatttttagtagaggtggggtgtcaccatgctggccaggctggtctcagttcttttgcaacatttacatgcatctataaacaatgtttttgtgttttaaaatttacattaatggcatcatactgtacctgaccttttacagcttgcttttactttacatcattttttagtttatccaaggtgttgtatagattgagttaaaggttgtatttctgaccaggcgcagtggctcacgcctgtaatcccaacacttggggaggccgaggccggggtggatcacaaggtcagtagatcgagaccatcctggctaacatggtgaaaacccgtctctctactaaaaatacaaaaaaattagacgggcgtggtggcacgtgcctgtagtcccagctacttgggaggctgaggcaggagaatcacttgaacccgggaggcagagtttgtagtgagctgagattgcgccactgcactccagcctgggcagcagagcgagactccatctcaaaaaaaaaaaaaaaaatagttgttgtgtttctatagaatatagattagtagtgaaattgctgctttaaatttttttgatgttgcagttgcacatttaaaagtgaggttttacaaattaaagtgcattaactgttgcttaaatatacattgctttatgagtatggttgaatagttcgtataaaactagttcctcaagacttcactaacattaacatcaatagtgcctaccaggtgtcagtttctgtttttattttaaacaacaaacccacatgtggaacaatagtttctgttctaagcttttcttgttgtatagattatgtcatttagtccccacaagataaagaaaccgagggacagaaaggttaagtaacttggctaaggttactctgctagtaaatgacagtgctgagattgaaccctagcattcaaccctgcatatacttttcctttagcatccacttttgttgctttttgtcataaatgaacaaaaacagcctagttaattcagaataatcacattaaaccatgtgagttggtggttggatgtcagaattgaagtaatttctacttagattgagtatcagggttgttcattctcgtagaggcagattctagcttactgttggtatttttgctatttttaagcaatgcttttaagtctcgttgattgctaaagcctgtttgcaggtactgcctcccctagagcctttggggtcctcaagggtaagcagcatgtcaggctcactttcgcaatcctgcttcagtgtcacattgagctgtgtgatcccaaagtccctgtgctagcagtgctgagaaacctgactgccatttgtaatgcagttttcatgtggggggactgttacactgctacagcttgtcatgtcaggagcccatcttcccctacttacacatcagcaactccctttctcttaccactggggcggtagaaagactgacttcagtgcttgcgcccgaggcccaaggcagaggatcctgagagactcatccatgatggcgaggctgggtgggtctgtgtagacttcccactagctgggccctaagccctttcttagaccacattactttctcatgatattttcagggttttccccccttaacctcagaggttagtctgccagctgcatcttcctgccactgcttcctgcatctcttcctgggctaagcacccttctcgccctctcttcctctccctctacactgtgtggagcacatggcagacgtatgcccagtgtagattactgagccttaccttacactactgatcagagtcttggggtgatcatccagtgatgtgttgtatatttctaactttttattgtggcaaattacaaacatggccaaacaagagacgatgataccgttcaccctcacgtactggttgcccagctttgtaaccaccatcagttcatgagccactcttccaccttctataggcccactccctcacaaccctgattatttggaaacaaatcacataccatcttttccctgtaaataaacagctatgtgtatctttctcccgactttttgggacaagttttagaaaatgtaatagtgaatatctctgtaccctttacctagattctccagttttacctgatgtttttctctctctgcatcttatatgtatatttttgtgttgctaaaccatttgaaagtaagttgggatatcacgacagttcatttctaagtatttcagctggtttctcctaagagccagggacattcttctatatataatgacaatacagttgtcatgtttggaaattttcctaagtgtccaactagtgttttttatagcttcctttttaaaaggatcacatactacatttcatctaggatagttccctagtctttctttagaaacaaaaactttcatgacaatgatattttttaagagtccatgccatttgtttaatgtaatgtccctgagtttggatttgtcttagtgttttagcatgattagattcaaatgataatatattttggcagaaatactgtgtaggtgatatattatttttaggacatcacacacaccagtttgctcgttatcagtggtgttaaattggttatctggctgaggtagtttgccaaggcttcccaccgtaaagacacctttgcccctttgtaattaatcattgattattcttactggattcaattattacatcatgttttgtctaaagattcatctgtacttgagtagaacacctggttttagtttcttgggcatttgattacagaggtgtgggcaggaataaggaaggcagagccatgtggggagagtagctgtgtgtgtctgaggcgggcatggaggtgatcctattatattccccgtcacgtgttgctgtagccctgcagtgggactgcagtcagggggcttttaaaaggtccctggcatcatggctctgacagattggtgagttcttgtggctgcttggctagaactgtaccatccagtcagcctttgaaggtacgagatgtgcatctgctcgtatacatgagactgctcctggctgtgtagactatcatcataaacttcagtgaggggcattttcaccttgaaatcatggtcagatccgctctgacaaagattctcttttccagtgggtgaatttgtaagtgatgtcctgctagttccagaaaagtgccagtttttccacaaagagcggatggaggtgtgtgagaatcaccagcactggcacacggtagtcaaagaggtaagagaactcggggggaaagtcagctgctgttgtatctgttaggagggaagtagcacttttctccaaatctcaccatgcttttaagttagttatgtttcccccattatctccttaaggtttacaattacttctgtcttataagttagaaatatttgggagagaagtaggtatttgtgtaggagagctcagtgttgacagtcagctcctgaagttgaggatgttaaggaggtggctgagcgagaatactgtatgctgctggtgaggctcccaggaaaccatcctaaccctaaggccggcatggaaatcgccagtgatagaaaatataggtctggacatatgcacaggcaggactgcatgccatctcacttttctggtggcaagaagtaccctttcttgtcttctgtaattaggctggctctgctctttggtcagtaatcttcctttggtcaaatactgaagtagtgcttgcaccagtggtgagtatctattaacattgaccaccttatctggctttagtcattattagaaaaaaatgctctcttcctgacttttttccacatttgggatttcagtatttttggaccagatcatgtttccccattgtaaattaaaatttataaatcttacaataatattattacaatttttttttgacagaaaatgtatgtgttcataagagaaagcattgctaagtgatttgataagggtttattttggagggtagagatcggagtgtatttgaccacgtttactctggagtatgttctgatgtggcctgtgggtttcttttaggcatgtctgactcagggaatgaccttatatagctacggcatgctgctcccatgtggggtagaccagttccatggcactgaatatgtgtgctgccctcagacaaagattattggatctgtgtcaaaagaagaggaagaggaagatgaagaggaagaggaagaggaagatgaagaggaagactatgatgtttataaaaggtaactcttctactttgaactgtgaagtcgttttgcctttttgttagcccttctgtaaagacggctgttggctgctagtccctcacttctggataaactgggcattcctttgttctgctagagttgattaagcttgcatttcattctagccattgccaatcacaggagtacctgtgatttttgtgtttacatcattctgagctgttattttctgcaggttactatgatattttttaagagtccgtgtcatttgtttaacataatatccctgaatttggatttgtcttattgttgtatcatgattagattcaaatgttcacaaatacttcccgtttgctgatgtagctgggccccagggcttagtggcacggtgaaatgtgcgttgagcttatttcctgcctctgtttttgtgtttcagaatagagaagggacccattgttgtgctttgcacataggagctattaaccttcctttttttctattttggccttcagtgaatttcctactgaagcagatctggaagacttcacagaagcagctgtggatgaggatgatgaggatgaggaagaaggggaggaagtggtggaggaccgagattactactatgacaccttcaaaggagatgactacaatgaggagaatcctactgaacccggcagcgacggcaccatgtcagacaaggaaattactcatgatgtcaaaggtaaccccatgtagagccatggctttgaaatccatgtggtaattattcacttagacttttgcattgcgtctgtcacaggtaagtcagtcacagaaggaaaggtgtggtacctctgcactgaaggtgagttcagctctccagtgcagtgatgggatggtgccgtcttaacaaagtgggcaggcaggcacatccagggagagatgtaggattgaattagagaacggggactagagagt

SEQ ID NO: 5129 - DNA, 6000 bp, Homo sapiens
ttttttttttctgagacggagtctcttgcccaggctggagtgcagtggcatgatctcggctcactgcaacctcagcctcctgagtagctggaattacaggtgcatgccaccatgcctggctaatttttgtatttttagtagaggtggggtgtcaccatgctggccaggctggtctcagttcttttgcaacatttacatgcatctataaacaatgtttttgtgttttaaaatttacattaatggcatcatactgtacctgaccttttacagcttgcttttactttacatcattttttagtttatccaaggtgttgtatagattgagttaaaggttgtatttctgaccaggcgcagtggctcacgcctgtaatcccaacacttggggaggccgaggccggggtggatcacaaggtcagtagatcgagaccatcctggctaacatggtgaaaacccgtctctctactaaaaatacaaaaaaattagacgggcgtggtggcacgtgcctgtagtcccagctacttgggaggctgaggcaggagaatcacttgaacccgggaggcagagtttgtagtgagctgagattgcgccactgcactccagcctgggcagcagagcgagactccatctcaaaaaaaaaaaaaaaaatagttgttgtgtttctatagaatatagattagtagtgaaattgctgctttaaatttttttgatgttgcagttgcacatttaaaagtgaggttttacaaattaaagtgcattaactgttgcttaaatatacattgctttatgagtatggttgaatagttcgtataaaactagttcctcaagacttcactaacattaacatcaatagtgcctaccaggtgtcagtttctgtttttattttaaacaacaaacccacatgtggaacaatagtttctgttctaagcttttcttgttgtatagattatgtcatttagtccccacaagataaagaaaccgagggacagaaaggttaagtaacttggctaaggttactctgctagtaaatgacagtgctgagattgaaccctagcattcaaccctgcatatacttttcctttagcatccacttttgttgctttttgtcataaatgaacaaaaacagcctagttaattcagaataatcacattaaaccatgtgagttggtggttggatgtcagaattgaagtaatttctacttagattgagtatcagggttgttcattctcgtagaggcagattctagcttactgttggtatttttgctatttttaagcaatgcttttaagtctcgttgattgctaaagcctgtttgcaggtactgcctcccctagagcctttggggtcctcaagggtaagcagcatgtcaggctcactttcgcaatcctgcttcagtgtcacattgagctgtgtgatcccaaagtccctgtgctagcagtgctgagaaacctgactgccatttgtaatgcagttttcatgtggggggactgttacactgctacagcttgtcatgtcaggagcccatcttcccctacttacacatcagcaactccctttctcttaccactggggcggtagaaagactgacttcagtgcttgcgcccgaggcccaaggcagaggatcctgagagactcatccatgatggcgaggctgggtgggtctgtgtagacttcccactagctgggccctaagccctttcttagaccacattactttctcatgatattttcagggttttccccccttaacctcagaggttagtctgccagctgcatcttcctgccactgcttcctgcatctcttcctgggctaagcacccttctcgccctctcttcctctccctctacactgtgtggagcacatggcagacgtatgcccagtgtagattactgagccttaccttacactactgatcagagtcttggggtgatcatccagtgatgtgttgtatatttctaactttttattgtggcaaattacaaacatggccaaacaagagacgatgataccgttcaccctcacgtactggttgcccagctttgtaaccaccatcagttcatgagccactcttccaccttctataggcccactccctcacaaccctgattatttggaaacaaatcacataccatcttttccctgtaaataaacagctatgtgtatctttctcccgactttttgggacaagttttagaaaatgtaatagtgaatatctctgtaccctttacctagattctccagttttacctgatgtttttctctctctgcatcttatatgtatatttttgtgttgctaaaccatttgaaagtaagttgggatatcacgacagttcatttctaagtatttcagctggtttctcctaagagccagggacattcttctatatataatgacaatacagttgtcatgtttggaaattttcctaagtgtccaactagtgttttttatagcttcctttttaaaaggatcacatactacatttcatctaggatagttccctagtctttctttagaaacaaaaactttcatgacaatgatattttttaagagtccatgccatttgtttaatgtaatgtccctgagtttggatttgtcttagtgttttagcatgattagattcaaatgataatatattttggcagaaatactgtgtaggtgatatattatttttaggacatcacacacaccagtttgctcgttatcagtggtgttaaattggttatctggctgaggtagtttgccaaggcttcccaccgtaaagacacctttgcccctttgtaattaatcattgattattcttactggattcaattattacatcatgttttgtctaaagattcatctgtacttgagtagaacacctggttttagtttcttgggcatttgattacagaggtgtgggcaggaataaggaaggcagagccatgtggggagagtagctgtgtgtgtctgaggcgggcatggaggtgatcctattatattccccgtcacgtgttgctgtagccctgcagtgggactgcagtcagggggcttttaaaaggtccctggcatcatggctctgacagattggtgagttcttgtggctgcttggctagaactgtaccatccagtcagcctttgaaggtacgagatgtgcatctgctcgtatacatgagactgctcctggctgtgtagactatcatcataaacttcagtgaggggcattttcaccttgaaatcatggtcagatccgctctgacaaagattctcttttccagtgggtgaatttgtaagtgatgtcctgctagttccagaaaagtgccagtttttccacaaagagcggatggaggtgtgtgagaatcaccagcactggcacacggtagtcaaagaggtaagagaactcggggggaaagtcagctgctgttgtatctgttaggagggaagtagcacttttctccaaatctcaccatgcttttaagttagttatgtttcccccattatctccttaaggtttacaattacttctgtcttataagttagaaatatttgggagagaagtaggtatttgtgtaggagagctcagtgttgacagtcagctcctgaagttgaggatgttaaggaggtggctgagcgagaatactgtatgctgctggtgaggctcccaggaaaccatcctaaccctaaggccggcatggaaatcgccagtgatagaaaatataggtctggacatatgcacaggcaggactgcatgccatctcacttttctggtggcaagaagtaccctttcttgtcttctgtaattaggctggctctgctctttggtcagtaatcttcctttggtcaaatactgaagtagtgcttgcaccagtggtgagtatctattaacattgaccaccttatctggctttagtcattattagaaaaaaatgctctcttcctgacttttttccacatttgggatttcagtatttttggaccagatcatgtttccccattgtaaattaaaatttataaatcttacaataatattattacaatttttttttgacagaaaatgtatgtgttcataagagaaagcattgctaagtgatttgataagggtttattttggagggtagagatcggagtgtatttgaccacgtttactctggagtatgttctgatgtggcctgtgggtttcttttaggcatgtctgactcagggaatgaccttatatagctacggcatgctgctcccatgtggggtagaccagttccatggcactgaatatgtgtgctgccctcagacaaagattattggatctgtgtcaaaagaagaggaagaggaagatgaagaggaagaggaagaggaagatgaagaggaagactatgatgtttataaaaggtaactcttctactttgaactgtgaagtcgttttgcctttttgttagcccttctgtaaagacggctgttggctgctagtccctcacttctggataaactgggcattcctttgttctgctagagttgattaagcttgcatttcattctagccattgccaatcacaggagtacctgtgatttttgtgtttacatcattctgagctgttattttctgcaggttactatgatattttttaagagtccgtgtcatttgtttaacataatatccctgaatttggatttgtcttattgttgtatcatgattagattcaaatgttcacaaatacttcccgtttgctgatgtagctgggccccagggcttagtggcacggtgaaatgtgcgttgagcttatttcctgcctctgtttttgtgtttcagaatagagaagggacccattgttgtgctttgcacataggagctattaaccttcctttttttctattttggccttcagtgaatttcctactgaagcagatctggaagacttcacagaagcagctgtggatgaggatgatgaggatgaggaagaaggggaggaagtggtggaggaccgagattactactatgacaccttcaaaggagatgactacaatgaggagaatcctactgaacccggcagcgacggcaccatgtcagacaaggaaattactcatgatgtcaaaggtaaccccatgtagagccatggctttgaaatccatgtggtaattattcacttagacttttgcattgcgtctgtcacaggtaagtcagtcacagaaggaaaggtgtggtacctctgcactgaaggtgagttcagctctccagtgcagtgatgggatggtgccgtcttaacaaagtgggcaggcaggcacatccagggagagatgtaggattgaattagagaacggggactagagagtaagagagacaacgtagtccgcccttcagcaggattcttccacattcatcctaaaatgttccctccccaaggggagctcccctcttcgataccactcaagttctggcctcctagaatagaaatggttttcttggtttttcttttcctgcttgtcttctaatctgtaggctgccctatttgtccagatgttttagttgggagggtgaaatttattgacctgctggtaacagattggggcctgcagttttttttttttctcatcttgccaattaaaacacgaaaaggttgcagtagttccagagccattaacatgcagcctcctgctgatcgtatatttgaaaccaattaagatgcgaagaattatttaggacccaagttgggggaaattacttaaccagttgagaagtttgtgatttgccttagagaacataaaagtgggaaacaattgtccgttctaggtgcttgtctttactacgggtatcaccacttaaagcagcctttccactcacactgtctcctgaatagacaaactaggcagatacctccactgaacagatcagaaatgtgaggctctcgcagctgtgagacaaaggaattgctctacgtcaatctaaactcagatctagactccagagggtgccaaaaaaatatttatcccagttcctaaatgtctctactctgtggggaagcaacttgtcct

SEQ ID NO: 5130 - DNA, 6000 bp, Homo sapiens
attataacagtctggactggtggtaggttttttttttttttttttttttttgagatggggtcttgctgttgcccaggctggagtgcagtggtgcggtcttggctcactgcagcctcctcctctggggctcaagcagtcctcctacctcagcctcccaagtaggtgggaccacaggtgcatgccaccaccctcggctaaatttttttttttttttttttttttaacgtagagacagggttttgccatgttgcccaggctggtctcgaactcctggactcaagtgatcctcccaccttggcctcccaaaatgctgggattataggcatgagccactgtatccagtgacagtagacctttagtttgctcagtgccacattgctttttgaataattcctgcctgtgtgacctttaaaattctgggagagagaaacatatatatggaaggagctcagaattacagttgattgggcttggtcataagcatccttgctgaggcaatacccttccagatccctctttctcaaatagttggagtgcagtattgctatttcatgggcactttgagacaaaagctagctctgatttaactagaatctagtcgtgcaagtctttaaagttgaagctttagaaaaattgcatcatttttggctgcattgcatgagctagcctgcatgttcagcagctgtggaagctgttacaagttgctatgtgttaagaacaagtctagttgtgaggcagaagctctgctgtggttgtgccttgtgccattacctgcctttgacaagcccagggacagcagtgctttgcatgtcctcatgttgaagtctcacttgcaggtagttaccttagaatgccagatacgctgtcgggttgatccagttataaaaggctcatatcacagacgtttatattgaactgtatgttattatgaataaggaattcttatgatagctagaaatcacatgctttggaactaaaaatagaggacttcctctcacgttccctccctgggcctgtgctgcgtcgtcgtgctgcgtatttggatactatccttcggagcgccacactcgagtgatgttgctcaggcagtgtctgaccttggtgagaggagagttgctgttcttgctgctctgtttagagaaaggtgccttccatgctgatattagaatgcttcctataggtggaatgcacgcttcctgtttatcttctaatagccacttaggatatgagcatctaggatctcggcacagagggattcagcgtggtgggagatgcgggaagaaatccgtaatgacagactgttgtcattactgttggaacctccccaggaccaactgaaacttgaagggaaaataagagtttaggttggggagggtatttgaggcagaatgaattccctgtgggctaacctactatgtccaaggcaaacgtgcaggttattgtgaggatgggtgctgtggcagccgggtgtgggtagtaggtgctcagtaatttctcctacgatggtgtgtatttcccatgctaggatgcccctcggctccgcttctatgtgtcttacaataaacattttctctgaaggcttgcatttcattttcccaagttggagacaagtaagcactccctcctcctccattatacccattggtctctgcaaatgcctgtctcattcatctttagagagcacagggcaccctcagacttgtgaacatggtggcagatgagtcgcgtggggaggtgcgtgttgaggggctcactggccctcaggagggagtttgctgcttctgtgcaatgggtgtgagatgggccatccttgggaactcagccatgatctctctccacacaggatctggagtgggagagcaggatgggggactgatcggtgccgaagagaaagtgattaacagtaagaataaagtggatgaaaacatggtgagcctgttctttcttctgcccaacacgctttacttttgagactcattagagcgagtgacctgatgtcagatgcttccaggtgcacgtctctgtgttcgttttccgcacagtagaaggttggagggctccaacggctcccacagactggctgtggtgtttagcatctgggtatgaaaaggattaaaaagcccttttcagcagtagctcatctcttgctatagagtaggaaaatatatttacaactaaagatatgaataacctgttagaggccattttcaagtgagtagagagttaataacttggattagagttgggttttgttcttatactgccttaggtttatacccccttttattcacctagtattttctgtcatttatagttctggattatcttcaactgagtttgatatttcaatgtggctttttttttttttttgaaatggagtcttgctttgtcaccgaggctggagtgcagtggcatgatctctgctcactgcaagctccacctcccgggttcacgccattctcctgcctcagcctcccaagtagctgggactacaggcgtccgccaccacgcctggctaattttttgtatttttagtagagacgaggtttcactgtgttagccaggatggtctcgatctcctgaccttgtgatccacctgcctcggcctcccaaagtgctgggattacaggcgtgagccaccgcgcctggtgtaaacggggctttttggcagtctgttctgagatacgtctccacaacggttacttgaaggaaaatgcatacgggaccagctgccataatatagtcttccctccatacctgccccttcattaggggtttggggagtggatttggaaggctgtgacagaactggttggttaatgggggtcccacaggtacctgcttccttccatcaagcagcaggtagcagaggaaggaggcagtaaataccaaactccccgttcacccagttgcttgctgccgacattctcatgactgtttcaggtcattgacgagactctggatgttaaggaaatgattttcaatgccgagagagttggaggcctcgaggaagagcgggtacgtgtttagctccagaacctaaggtttcctgccaatcttaggtatttctcctctggaccttctcagttcaagtagaaaacgggagagatgcctgagctaataagggtccctcatccccagctttccgtacttttggataagaaagctaaaattaaaatctccatggagattgggaagagtgggcgttctccacctgtgggtggttccctgcaaagcaggatcttggtgctactttgggttttaggggctcgaccttccaggagcgtggccctcagtgagttacttgcctcacggctgccagatggtcactgggacttttttccacgtctgctttattacgtaggaatccgtgggcccactgcgggaggacttcagtctgagtagcagtgctctcattggcctgctggtcatcgcagtggccattgccacggtcatcgtcatcagcctggtgatgctgaggaagaggcagtatggcaccatcagccacgggatcgtggaggtgaggagctgggctgctgagggcctgctctgcactgtgggctgggttgggggtgggaacctgtggaattaataggcatcttcactcctcgagtactggacatgctgctgttatcagttcagttactcactggattcctaggtcgtgtttttggaaatcagcccctgccacaaggggctgttgccaactttcaacattagtttgggccttggctatgaatgtcagaaagtcatgtgaacattttatgctacagagggtgaaaactcttttctcagattatttccttagtgttcctttttccaggtatttttttttttaatgggggaaaggagcaacaggaaatttagaaagtgctgaagcagactgtttctgttctgtcttctgctggttactgaacttgtcttgccactcactccttagtgaacagtgggaatgtccagagtcccttgatccccaaatataaatacagtaaggaccttaatgagccctgggaaattagtgcagatgctggtcttagttatttgtgtttttttgtttgttttggttttttggttttttggagacagtctcgctgtgtcgcccaggctggagtgcagtggcgcgatctcagcgcactgcaacctctgtctcccgggttcaggtgattcttgtgcctcagcctcccacctagctgagactacaggtgtgtgccaccacgcccagctagtctttgtatttttattagagataggatttccccatattgaccagggtgatctcaaatcctgacctcaagtgatccacccgcctcagcctcccaaagtgctgggattacaagcatgagctactgcacctggccagttacttggttttatctcctgctggagactggcctagctgtagaatttcagaactgaaaaagaccagagatcccctggtcccaccgtctgcttgctagcctactgctgactggcttgccttggctggcccaggtagtaagcagtggcgccgagccttgcttgtcaccacggtgctaggaaatccagttgactgtcatcttccgtgagggctaagctttcagggctctcgtttcgaaagcattgcctctttgatccccttattttctttctcctgtgtttcaccaccggttctcatttggcctgtccggtgggaacgggctgctggctgcatttggtcctcaggggattgtgcagcaaatggctcaggtctcccagcaccctgtgcaggtctcttcccagacaccacaatgaccctcaggttttgttcttccaggttgatccaatgctcaccccagaagagcgtcacctgaacaagatgcagaaccatggctatgagaaccccacctacaaatacctggagcagatgcagatttaggtggcagggagcgcggcagccctggcggagggatgcaggtgggccggaagatcccacgattccgatcgactgccaagcagcagccgctgccaggggctgcgtctgacatcctgacctcctggactgtaggactatataaagtactactgtagaactgcaatttccattcttttaaatgggtgaaaaatggtaatataacaatatatgatatataaaccttaaatgaaaaaaatgatctattgcagatatttgatgtagttttcttttttaaattaatcagaaaccccacttccattgtattgtctgacacatgctctcaatatataataaatgggaaatgtcgattttcaataatagacttatatgcaggctgtcgttccggttatgttgtgtaagtcaactcttcagcctcattcactgtcctggcttttatttaaagaaaaaaaaggcagtattccctttttaaatgagctttcaggaagttgctgagaaatggggtggaatagggaactgtaatggccactgaagcacgtgagagaccctcgcaaaatgatgtgaaaggaccagtttcttgaagtccagtgtttccacggctggatacctgtgtgtctccataaaagtcctgtcaccaaggacgttaaaggcattttattccagcgtcttctagagagcttagtgtatacagatgagggtgtccgctgctgctttccttcggaatccagtgcttccacagagattagcctgtagcttatatttgacattcttcactgtctgttgtttacctaccgtagctttttaccgttcacttccccttccaactatgtccagatgtgcaggctcctcctctctggactttctccaaaggcactgaccctcggcctctactttgtcccctcacctccaccccctcctgtcaccggccttgtgacattcactcagagaagaccacaccaaggaggcggccgctggcccaggagagaacacggggaggtttgtttgtgtgaaaggaaagtagtccaggctgtccctgaaactgagtctgtggacactgtggaaagctttgaacaattgtgttttcgtcacaggagtctttgtaatgcttgtac

SEQ ID NO: 5131 - DNA, 6000 bp, Homo sapiens
cgccacactcgagtgatgttgctcaggcagtgtctgaccttggtgagaggagagttgctgttcttgctgctctgtttagagaaaggtgccttccatgctgatattagaatgcttcctataggtggaatgcacgcttcctgtttatcttctaatagccacttaggatatgagcatctaggatctcggcacagagggattcagcgtggtgggagatgcgggaagaaatccgtaatgacagactgttgtcattactgttggaacctccccaggaccaactgaaacttgaagggaaaataagagtttaggttggggagggtatttgaggcagaatgaattccctgtgggctaacctactatgtccaaggcaaacgtgcaggttattgtgaggatgggtgctgtggcagccgggtgtgggtagtaggtgctcagtaatttctcctacgatggtgtgtatttcccatgctaggatgcccctcggctccgcttctatgtgtcttacaataaacattttctctgaaggcttgcatttcattttcccaagttggagacaagtaagcactccctcctcctccattatacccattggtctctgcaaatgcctgtctcattcatctttagagagcacagggcaccctcagacttgtgaacatggtggcagatgagtcgcgtggggaggtgcgtgttgaggggctcactggccctcaggagggagtttgctgcttctgtgcaatgggtgtgagatgggccatccttgggaactcagccatgatctctctccacacaggatctggagtgggagagcaggatgggggactgatcggtgccgaagagaaagtgattaacagtaagaataaagtggatgaaaacatggtgagcctgttctttcttctgcccaacacgctttacttttgagactcattagagcgagtgacctgatgtcagatgcttccaggtgcacgtctctgtgttcgttttccgcacagtagaaggttggagggctccaacggctcccacagactggctgtggtgtttagcatctgggtatgaaaaggattaaaaagcccttttcagcagtagctcatctcttgctatagagtaggaaaatatatttacaactaaagatatgaataacctgttagaggccattttcaagtgagtagagagttaataacttggattagagttgggttttgttcttatactgccttaggtttatacccccttttattcacctagtattttctgtcatttatagttctggattatcttcaactgagtttgatatttcaatgtggctttttttttttttttgaaatggagtcttgctttgtcaccgaggctggagtgcagtggcatgatctctgctcactgcaagctccacctcccgggttcacgccattctcctgcctcagcctcccaagtagctgggactacaggcgtccgccaccacgcctggctaattttttgtatttttagtagagacgaggtttcactgtgttagccaggatggtctcgatctcctgaccttgtgatccacctgcctcggcctcccaaagtgctgggattacaggcgtgagccaccgcgcctggtgtaaacggggctttttggcagtctgttctgagatacgtctccacaacggttacttgaaggaaaatgcatacgggaccagctgccataatatagtcttccctccatacctgccccttcattaggggtttggggagtggatttggaaggctgtgacagaactggttggttaatgggggtcccacaggtacctgcttccttccatcaagcagcaggtagcagaggaaggaggcagtaaataccaaactccccgttcacccagttgcttgctgccgacattctcatgactgtttcaggtcattgacgagactctggatgttaaggaaatgattttcaatgccgagagagttggaggcctcgaggaagagcgggtacgtgtttagctccagaacctaaggtttcctgccaatcttaggtatttctcctctggaccttctcagttcaagtagaaaacgggagagatgcctgagctaataagggtccctcatccccagctttccgtacttttggataagaaagctaaaattaaaatctccatggagattgggaagagtgggcgttctccacctgtgggtggttccctgcaaagcaggatcttggtgctactttgggttttaggggctcgaccttccaggagcgtggccctcagtgagttacttgcctcacggctgccagatggtcactgggacttttttccacgtctgctttattacgtaggaatccgtgggcccactgcgggaggacttcagtctgagtagcagtgctctcattggcctgctggtcatcgcagtggccattgccacggtcatcgtcatcagcctggtgatgctgaggaagaggcagtatggcaccatcagccacgggatcgtggaggtgaggagctgggctgctgagggcctgctctgcactgtgggctgggttgggggtgggaacctgtggaattaataggcatcttcactcctcgagtactggacatgctgctgttatcagttcagttactcactggattcctaggtcgtgtttttggaaatcagcccctgccacaaggggctgttgccaactttcaacattagtttgggccttggctatgaatgtcagaaagtcatgtgaacattttatgctacagagggtgaaaactcttttctcagattatttccttagtgttcctttttccaggtatttttttttttaatgggggaaaggagcaacaggaaatttagaaagtgctgaagcagactgtttctgttctgtcttctgctggttactgaacttgtcttgccactcactccttagtgaacagtgggaatgtccagagtcccttgatccccaaatataaatacagtaaggaccttaatgagccctgggaaattagtgcagatgctggtcttagttatttgtgtttttttgtttgttttggttttttggttttttggagacagtctcgctgtgtcgcccaggctggagtgcagtggcgcgatctcagcgcactgcaacctctgtctcccgggttcaggtgattcttgtgcctcagcctcccacctagctgagactacaggtgtgtgccaccacgcccagctagtctttgtatttttattagagataggatttccccatattgaccagggtgatctcaaatcctgacctcaagtgatccacccgcctcagcctcccaaagtgctgggattacaagcatgagctactgcacctggccagttacttggttttatctcctgctggagactggcctagctgtagaatttcagaactgaaaaagaccagagatcccctggtcccaccgtctgcttgctagcctactgctgactggcttgccttggctggcccaggtagtaagcagtggcgccgagccttgcttgtcaccacggtgctaggaaatccagttgactgtcatcttccgtgagggctaagctttcagggctctcgtttcgaaagcattgcctctttgatccccttattttctttctcctgtgtttcaccaccggttctcatttggcctgtccggtgggaacgggctgctggctgcatttggtcctcaggggattgtgcagcaaatggctcaggtctcccagcaccctgtgcaggtctcttcccagacaccacaatgaccctcaggttttgttcttccaggttgatccaatgctcaccccagaagagcgtcacctgaacaagatgcagaaccatggctatgagaaccccacctacaaatacctggagcagatgcagatttaggtggcagggagcgcggcagccctggcggagggatgcaggtgggccggaagatcccacgattccgatcgactgccaagcagcagccgctgccaggggctgcgtctgacatcctgacctcctggactgtaggactatataaagtactactgtagaactgcaatttccattcttttaaatgggtgaaaaatggtaatataacaatatatgatatataaaccttaaatgaaaaaaatgatctattgcagatatttgatgtagttttcttttttaaattaatcagaaaccccacttccattgtattgtctgacacatgctctcaatatataataaatgggaaatgtcgattttcaataatagacttatatgcaggctgtcgttccggttatgttgtgtaagtcaactcttcagcctcattcactgtcctggcttttatttaaagaaaaaaaaggcagtattccctttttaaatgagctttcaggaagttgctgagaaatggggtggaatagggaactgtaatggccactgaagcacgtgagagaccctcgcaaaatgatgtgaaaggaccagtttcttgaagtccagtgtttccacggctggatacctgtgtgtctccataaaagtcctgtcaccaaggacgttaaaggcattttattccagcgtcttctagagagcttagtgtatacagatgagggtgtccgctgctgctttccttcggaatccagtgcttccacagagattagcctgtagcttatatttgacattcttcactgtctgttgtttacctaccgtagctttttaccgttcacttccccttccaactatgtccagatgtgcaggctcctcctctctggactttctccaaaggcactgaccctcggcctctactttgtcccctcacctccaccccctcctgtcaccggccttgtgacattcactcagagaagaccacaccaaggaggcggccgctggcccaggagagaacacggggaggtttgtttgtgtgaaaggaaagtagtccaggctgtccctgaaactgagtctgtggacactgtggaaagctttgaacaattgtgttttcgtcacaggagtctttgtaatgcttgtacagttgatgtcgatgctcactgcttctgctttttctttctttttattttaaatctgaaggttctggtaacctgtggtgtatttttattttcctgtgactgtttttgttttgtttttttcctttttcctcccctttgaccctattcatgtctctacccactatgcacagattaaacttcacctacaaactccttaatatgatctgtggagaatgtacacagtttaaacacatcaataaatactttaacttccaccgagactgctcgtttcactgactgcggcattgatctgcgtgatggtcctacccccttcctccaggagggtgataacttcgttccacgaaggaccccagctgcacctcacaggcggaaatacgtctgctcaagctgtgactcaaggcttccagcgccgtttcgcatttagaaagcaaagtaagagggaacatctgcacagagcatttgtctggcaaaatttaggctactgatatttattaatatgagacttcttaatgctactgggaacaatgagtagggcttgtggctgaattttcagaggaatgcttgcagcttccatttgcttaaataacctgacactgggaggccctgtcacctcactgatgggggtgtttggtttgttgccttggcaactgcttagagggctttctgcctgggcccagttttatctactgagctaagatctttttaatgcccagctacagggaagagggtcaattcaggggtaaatctcagtccctaccctagtttaatgccagtttaaatatacagagtagttatcaaggtaatgtcatatatagctgtgtgtagatgtacatgtgtgtacatacgtgacgaatcttccctaggatactggactagggagtgttttatgagccaggaaagcattttgtgagccaggtgaacaggttggttctttataatgattaccacttccccatcagcctctcccttctgcctgcattggtcactgaagttgctgccaggaaagccctgaagaagagggaacttttttgttttttgaaaccagtttctgctggagtgctc

SEQ ID NO: 5132 - DNA, 6000 bp, Homo sapiens
ctaagtgtgaagattaagcacatctgtcttgtgcatcctttataccttttaatgatttgtttgaattaagcaccactagagtattacctatgaataggtgtgtgttccttcctacacatatctttaggtgttttttccttctttgggggaagcaggaactcatattagtctgtagcttcacgtgcattcatactgaaggcatagggccttctactttaataaatgaatattcgttccagcagggtaaagtcaattctagttaataaaggtgctaattgtttgttgggtttaactgaggtgtttttcagccctgatagatattggcaacattttaattccaaattagctttctcccagctgtccaacaagggttggtgcttccttctcttatactagtagaaagcaggttcattttaataagcttcgaagcaaaacatatgtcagatggtaaattggtcctggaaaaagaccataatatatttcacaatcaaatttaagttactgattagaaggattgttcatgtctgtgtagttcatcagcataaataaattaaagtttcctagaaaatcatacattttccacatattttaaaagtcagctaggcgtagtatctcatgcttaggatcccagtcctttgggaggtcaaggcagaaggatcacttgagcccaagagtttgagaccagcgtgggcaacacaatgagaccccatctctaccaaaatataaatacgtgtatactgggtgtgatggcgcatgcctgtggtccctgctactcaggagattaaggctggaggatggcttgagcccagggggtcgagactgtaatgagctgagattgccccattgcactccacgtgggtgacagagcaagaccctgtctcaaaaaaaaaagggtgggggcatcaaagctaccctttcttgttagtaggaaaaccatgtcatgtatatgctgtttttgaaaagaacaacatggtagaccatataatctaaccctcctcctctacaagttttaacttaagaactgttatttgtttatttattttaattttgaagaaagttttgcagttggggactcttatggctataaccacgagtaatggatgtttttagagagatgcctgtgcttgtctctctctttctctctctctctccctgtctttctgtctgctttttttttttttttttttgagatggagtttcgctcttgttgcccaggctggagtgcaatggtgtgatctctgctcaccgcaacatctgcctcccgggtccaggcagttctcctgcctcagcctcctgagtagctgggactacaggcatgtgccaccacacccggctaattttgtatttttagtagagatggggtttgtccatgttggtcagtctggtctcgaactcccgacctcaggtgatctgcctgccttggcctcccaaagtgctgagattacagatgtgagcccccacgcccggccgatgcctgtgcttttctcgtgcatgtctgcaggagccttgctgttgtaatgttacttctcagctatagcttctgagctgttaatggttagactgcacataaaaggatatgggccaaagacagatcttatggaatagttgattatttttacccaacatgagagaaaattgttcatgaaatcccctttagtgttctgtgtttatgaatgatgccatcacattttgaatcatgggagccaaacttgaaccttcctcttcctcatccctcatatcagttatcacacctaggcctattttaggctctgtggtttcttgaatctctctatccaccactccaccttagcccaagctaccatttattcctctcttggaatgtgcacctccagtgtcctgaatgatttccctgcatacactcatttcctttcagtcggttcttcaccgtgcaactagagaaagcatcagagctttgttatgaaaatagtaactttctgcttaaagcctctcaacacttcagtggtaaggactgaagtcctttcttggtctgcagactcttgtcccggcatgcctctcccaccatctctctgcctcaaaatcaacattgcctccatatgggatgcttaaagcgctactcagctgtcactctctttaggaagcttccttgatcagcttcctacccaagcttaggtcagattcctttttttttttgagatttgagtcttgctctcttgcctaggctggagtgcaattgtgcaatctcggctcactgcaacctctgcctcccgggttcaagcagttttcctgcctcagccccctgagtagctgtgattaccggcatccgccaccacgcctggctaatttgtgtatttttagtagggacggggttttgccatgttggacaggctggtctcgaactctcgacctcgtgatctgcctgccttggcctcccaaaatggtaggattacaggtgtgagccaccgcgcccggcccagattccttttttatgtgctttctcaacactgtgttcttttccttcttaagacatttgggaatgtggtcacactttttgtgagttttaactcttgcattagagccccaagaaagcaggtcatgacttttttgcccactcttatatcctaaacacttagcatgttgctttgcgaaatagtagttgctcagaaaattttcttttgtgggtaaattaagtaaaattattggaattttagtaattctccactttcatgatttggtgtgtgcaaaggattagaaagtagattagcttttacgaggacagactgcagttggattatatgttctaaagttagaagtatcccagatggggattgagggttagatttttcctttgcctaagtctcaggatacaaaatcaatgtgcaaaaatcacaagcattcctatacaccaataacagacagagagccaaatcgtgagtgaactcccattcacaattgcttcaaagagaacaaaatacctgggaatccaacttacaagggatgtgaaggacctcttcaaggagaactagaaaccactgctcaatgaaataaaagaggacacaaacaaatggaagaacattccatgctcatggataggaagaatcaatattgtgaaaatggccatactgcccaaggtaatttgtagattcagtgccatccccatcaagctaccaatgactttcttcacagaattggaaaaaactactttaaagttcatatggaaccaaaaaagagcccgcgttgccaagtcaatcctaagccaaaagaacaaagctggaggcatcacgctacctgacttcaaactatacttcaatgctacagtaagcaaaacagcatggtactggtaccaaagcagaaatacagaccgatggaacagaacagagccctcagaaataacaccacacatctaaaaccatctgatctttgacaaacctgacaaaaacaagaaattgggaaaggattccctatttaataaatggtgctgggaaaactggctagccatatgtagaaagctgaaactggattccttccttacaccttatacaaaaattaattcaagatggattaaagacttaaatgttagacttaaaaccataaaaaccccagaagaaaacctaggcaataccattcaggacataggcatgggcaaggacttcatgtctaaaacaccaaaagcaatggcaaccaaagccaaaattgacaaatgggatctaattaaactaaagagcttctgcacagcaaaagaaactaccatcagagtgaacaggcaaccttgggagaaaatttttacagtctacccatctgacaaagggctaatatccagaatctacaaataacttaaacaaatttacaagaaaaaatcaaccccatcaacaagtgggctaaggatatgaacagacacttctcaaaagaagacatttatgcagccaacagacacatgaagaaatgctcatcatcactggccatcagagaaatgcaaatcaaaaccacaatgagataccatctcataccagttagaatggcagtcattaaaaagtcaggaaacaacaggtgctggagaggatgtggagaaataggaacacttttacactgttggtgggactctaaactagttcaaccattgtagaagacagtgtggtgattcctcaaggatctagaactagaaataccatttggcccagccatcccattactcggtatgtacccaatggattataaatcatgctgctataaagacacatgcacacatatgttcattgcagcactattcacaatagcaaagacttggaaccaacccaaatgtccatcaatgatagactggattaaggagatggcacataccatggaatactatgcagccataaaaaggttgagttcatgtcctttgtagggacctggatgaagctggaaagcatcattctgagcaaactatcgcaaggacagaagaccaaacaccgcatgttctcactcataggtgggaattgaacaatgagaacacttggacacagggtggggaacatcacacactggggcctgtcgtggggtggggagaggggggagggatagcattaggagatatacctaatgtaaatgacaagttaatgggtgcagcacaccaacatggcacatgtctacctgtgtaacaaacctgcacgttgtgcacatgttccctagaacttaaaatataataaataaaataaataaaaaagttttttcctttgcctttcactttgatcatacacatccagaagtcactttttattctgttctagctcctgggaaaaggatttgtttgtgaagatacaaatagtaaataattaaggtttttaaaagatgcattctgtcacatagacctgaatgactgttgcctctgtgctagccttcttggagtaaacctgcaatttttttccctttggtaggctcttgcagccaatgccggaacaggatttgctgttgctgagcctcaaatcgcaatgttttgtgggaagttaaatatgcatgtgaacattcagactgggaaatgggaacctgatccaacaggcaccaagagctgctttgaaacaaaagaagaagttcttcagtactgtcaggaggtaagagtgttgccagtaagttgaaagtgttatttttctggggcagggttgaatctgtttaccttagaaatagatattctgtcattctcttttgacctaagaccaagatgctaatgactggagccccaagccttttgtttctaaatgtgtggcatgactgagacctctcaaaggctttgcctgcgtgttctgtgagctctcagttctttaaggaagggatactgcagaagcctggcaagtgccatgggagtgcagcctgcttctcatcctcccacttgtcttggaagatggaaaacaaaacatgtctccttactgacagaaagccaccagtattgtaaaggatcatctcaggtctgattcaactctgtgttaaagagaaaatgataggagatgttataacttgtatttattttttctgatagagacagggtcttgctacattggccagggtactctcaaactcctggcctcaagccatcctccccagcctcccaaagtgctgggattataggcatcagccaccacttcttaccaagatgagcagacagggccagggtcaagttctgtaatttcattgacagatgtttccatagacttgcctcacggagccatcagttcaacagctaccctacaagcaaacttgacatctcatgaatttgttttgggctaaaagcgtgctgcttttgtttgtccttaaatacatatcccttttgaaaacagaatgcgtggaagtgttcagaaatctaacctgtcaaaactaatacagtatctttttgtttgatgacttcagttagagccagggataatggagtggaactttagatgtatgtaggataagggtggaggctgaataaacttagacactccatccttacttgcaagtgtgtgtctgtctgcagattgatttattgtgtgtgtgtttgttttctta

SEQ ID NO: 5133 - DNA, 6000 bp, Homo sapiens
ctgatgaaaaattgtagcaaaggcagagagtagcaatgaaatgatagagcggatgctgggattgaaatgtgtttcctctttcagtctactttttaaaaaggggtttatttttcaataaaagaagtttgcattgggggaaggggacaaaaacaattattttcagtttctgtactaagttaactgtgattaacattttggggtatagatgaacatttttttctttggatacacatggaaatgtatatacttttaaatgttttttccctaactgtgatgatacaacgtatgctcctctgtttaaagttctgtttatttttatttggcatttattgagcttttattatcatgtgctacttttagggatacatacatctttgaataaaagataaggttgggagaaaaaaaaaagataaagttggccttaagtaactagcctgaagaaggggttagagatacgcagtgggtttccttttgtttgtttgttcaatgattttaaaaattattaaaccaccatggaaaaatgtccatgttaaatatacacataagccatatttcttgtaaccccatactattctgttgtatatatgtatcatcatttaattaattccctctcgatggacatttaggtttgttctagttttttgatattaataacactaatgaatattttaattcacttgcctagttatttccttagggtgtgtatctttttctttttttctttttctttttaagacagggtcgccgtcacccaggctggagtgcagtggcgcgatcttggctgactgcggccttggtcctgcgtgtccccctttccaccctgcagctgagattacaggcattcgccaccacgcctggctcatttttactatttctagtagagatggggtttccccatgttggccaggctggtcttgaactcctaacctcaagtgatccacctgcctcagcctcataaagtgctgggattacaggcatgagcccctgcgtccagacatccttagggtatctttttagaactggaattgttgaatcaaagagtactgttaaaagatatatatatatatttttaggccaggcctggtggcttatgcctgtaatcacagcactttgggaggctgggatgggaggatcatttgagatcaggagttcaagaccagcctgaccaacacggtgaaaccccgtctctactaaaaatagtaaaaattagctgggtgtggtggcgaacgcctgtaatgtcagttactcaggaggctgaagcagaagaattgcttgaacctgggaggcagaggatgcagtgagccaagattgtgccactgtactccagcctgggtgatggtgtgagactccatcttaaaaaaaaaagttaaattttagaatttagtttgttttcaaattcagtggtgttcttttttgatttttagagatcgaacagattgattcagtcatggaatagctgaagattagtggcatttaattttatggtttagcatggaattaattattttattaaatttttggcatttccgaaaaggttttgattttaaactttaattctgaaatattacaccaagcatcctgaagagatgagacataatgtgatggttgctcatatgctcaccctcctgatttcagttcttcagtgttctgtcatgtttgcttcatctccatctttttttttttctgagacggagtctcttgcccaggctggagtgcagtggcatgatctcggctcactgcaacctcagcctcctgagtagctggaattacaggtgcatgccaccatgcctggctaatttttgtatttttagtagaggtggggtgtcaccatgctggccaggctggtctcagttcttttgcaacatttacatgcatctataaacaatgtttttgtgttttaaaatttacattaatggcatcatactgtacctgaccttttacagcttgcttttactttacatcattttttagtttatccaaggtgttgtatagattgagttaaaggttgtatttctgaccaggcgcagtggctcacgcctgtaatcccaacacttggggaggccgaggccggggtggatcacaaggtcagtagatcgagaccatcctggctaacatggtgaaaacccgtctctctactaaaaatacaaaaaaattagacgggcgtggtggcacgtgcctgtagtcccagctacttgggaggctgaggcaggagaatcacttgaacccgggaggcagagtttgtagtgagctgagattgcgccactgcactccagcctgggcagcagagcgagactccatctcaaaaaaaaaaaaaaaaatagttgttgtgtttctatagaatatagattagtagtgaaattgctgctttaaatttttttgatgttgcagttgcacatttaaaagtgaggttttacaaattaaagtgcattaactgttgcttaaatatacattgctttatgagtatggttgaatagttcgtataaaactagttcctcaagacttcactaacattaacatcaatagtgcctaccaggtgtcagtttctgtttttattttaaacaacaaacccacatgtggaacaatagtttctgttctaagcttttcttgttgtatagattatgtcatttagtccccacaagataaagaaaccgagggacagaaaggttaagtaacttggctaaggttactctgctagtaaatgacagtgctgagattgaaccctagcattcaaccctgcatatacttttcctttagcatccacttttgttgctttttgtcataaatgaacaaaaacagcctagttaattcagaataatcacattaaaccatgtgagttggtggttggatgtcagaattgaagtaatttctacttagattgagtatcagggttgttcattctcgtagaggcagattctagcttactgttggtatttttgctatttttaagcaatgcttttaagtctcgttgattgctaaagcctgtttgcaggtactgcctcccctagagcctttggggtcctcaagggtaagcagcatgtcaggctcactttcgcaatcctgcttcagtgtcacattgagctgtgtgatcccaaagtccctgtgctagcagtgctgagaaacctgactgccatttgtaatgcagttttcatgtggggggactgttacactgctacagcttgtcatgtcaggagcccatcttcccctacttacacatcagcaactccctttctcttaccactggggcggtagaaagactgacttcagtgcttgcgcccgaggcccaaggcagaggatcctgagagactcatccatgatggcgaggctgggtgggtctgtgtagacttcccactagctgggccctaagccctttcttagaccacattactttctcatgatattttcagggttttccccccttaacctcagaggttagtctgccagctgcatcttcctgccactgcttcctgcatctcttcctgggctaagcacccttctcgccctctcttcctctccctctacactgtgtggagcacatggcagacgtatgcccagtgtagattactgagccttaccttacactactgatcagagtcttggggtgatcatccagtgatgtgttgtatatttctaactttttattgtggcaaattacaaacatggccaaacaagagacgatgataccgttcaccctcacgtactggttgcccagctttgtaaccaccatcagttcatgagccactcttccaccttctataggcccactccctcacaaccctgattatttggaaacaaatcacataccatcttttccctgtaaataaacagctatgtgtatctttctcccgactttttgggacaagttttagaaaatgtaatagtgaatatctctgtaccctttacctagattctccagttttacctgatgtttttctctctctgcatcttatatgtatatttttgtgttgctaaaccatttgaaagtaagttgggatatcacgacagttcatttctaagtatttcagctggtttctcctaagagccagggacattcttctatatataatgacaatacagttgtcatgtttggaaattttcctaagtgtccaactagtgttttttatagcttcctttttaaaaggatcacatactacatttcatctaggatagttccctagtctttctttagaaacaaaaactttcatgacaatgatattttttaagagtccatgccatttgtttaatgtaatgtccctgagtttggatttgtcttagtgttttagcatgattagattcaaatgataatatattttggcagaaatactgtgtaggtgatatattatttttaggacatcacacacaccagtttgctcgttatcagtggtgttaaattggttatctggctgaggtagtttgccaaggcttcccaccgtaaagacacctttgcccctttgtaattaatcattgattattcttactggattcaattattacatcatgttttgtctaaagattcatctgtacttgagtagaacacctggttttagtttcttgggcatttgattacagaggtgtgggcaggaataaggaaggcagagccatgtggggagagtagctgtgtgtgtctgaggcgggcatggaggtgatcctattatattccccgtcacgtgttgctgtagccctgcagtgggactgcagtcagggggcttttaaaaggtccctggcatcatggctctgacagattggtgagttcttgtggctgcttggctagaactgtaccatccagtcagcctttgaaggtacgagatgtgcatctgctcgtatacatgagactgctcctggctgtgtagactatcatcataaacttcagtgaggggcattttcaccttgaaatcatggtcagatccgctctgacaaagattctcttttccagtgggtgaatttgtaagtgatgtcctgctagttccagaaaagtgccagtttttccacaaagagcggatggaggtgtgtgagaatcaccagcactggcacacggtagtcaaagaggtaagagaactcggggggaaagtcagctgctgttgtatctgttaggagggaagtagcacttttctccaaatctcaccatgcttttaagttagttatgtttcccccattatctccttaaggtttacaattacttctgtcttataagttagaaatatttgggagagaagtaggtatttgtgtaggagagctcagtgttgacagtcagctcctgaagttgaggatgttaaggaggtggctgagcgagaatactgtatgctgctggtgaggctcccaggaaaccatcctaaccctaaggccggcatggaaatcgccagtgatagaaaatataggtctggacatatgcacaggcaggactgcatgccatctcacttttctggtggcaagaagtaccctttcttgtcttctgtaattaggctggctctgctctttggtcagtaatcttcctttggtcaaatactgaagtagtgcttgcaccagtggtgagtatctattaacattgaccaccttatctggctttagtcattattagaaaaaaatgctctcttcctgacttttttccacatttgggatttcagtatttttggaccagatcatgtttccccattgtaaattaaaatttataaatcttacaataatattattacaatttttttttgacagaaaatgtatgtgttcataagagaaagcattgctaagtgatttgataagggtttattttggagggtagagatcggagtgtatttgaccacgtttactctggagtatgttctgatgtggcctgtgggtttcttttaggcatgtctgactcagggaatgaccttatatagctacggcatgctgctcccatgtggggtagaccagttccatggcactgaatatgtgtgctgccctcagacaaagattattggatctgtgtcaaaagaagaggaagaggaagatgaagaggaagaggaagag

SEQ ID NO: 5134 - DNA, 6000 bp, Homo sapiens
ctccttcaggagcagcgtgcagatatggaccagttcactgcctcaatctcagagacccctgtggacgtccgggtgagctctgaggagagtgaggagatcccaccgttccaccccttccaccccttcccagccctacctgagaacgaaggtgtgtatgggcgacggtgccacttctgggcagcagggggaggacaaaatgagagaattgaagtcagtttttcgaaaaccaaattgagttgggagatggtgttcctgcgagagtcaggggaagggagactggattcattgagcgcctactgtgtgcaaggaccctgctagatgctttcaaatcattggtgtcaatgtcaccatgaagttaagactaattctcccatttcaagatgggtggcttcaaacccccacttcttccaacttgtgcacttccttacatgggggaggcacttggcagttgaaacagcgccttcctgttatggtgttacctttgcccagccgtcttgggaggtaggtgctggagaggctgaggaggtgacagggctggcgtgggtcatatctctgacatgaggtggggataagaagctgttcctctgggtcctaggcagacgttctttcctctattcccctgctggttctcagtgtctaagaggatctctaaaagctgtgagtctgctccagaaataaacaagttgctgagaccagtgccctgagagccgtccccctcatcagttctgtttgttgctgttgctgctgacagggtaatgataagaatggcccacagctatgccgtagtccttgttatatgccagctttagctaagcatctcagcggatgctctccatcctcacagtaaccctcgcaggtgggtagtcgagtgtccccatgtggggattctgaggtataaagagattaagtaacttgcccgaggtcatgtagcttataagtggagagtcaggggtcgaatccaagctgatctggtcctgcagtcacagacctgactggatatagcactggaacagaggcctcaggaaggcatcaaattaggggtggggggatggaggtacatccagcttagccttcagaccttaatggaaatgctttctaaactagcgatcccagagcagttgactctccagaaataaaacaggatctgaggaagtggcagatagatgaaaaggcgccatgccacccgcaaatctccgtgggtttttggggtggtagatgaagaggcaccatgctatccccaaatctctgtgggtttgtcgggtggccatgcttggacaacttcttatgtgcttgttgggggtcggggcagcttggatatacctgaactaggaccttatctccctgtcagcaaaccacaaccaacacttaacttcaattttcacttttttctaagaaaaataattatgtgggctaagctaaatagtgcaggcatctcccagtttccctaaaaaggcacaagacagacctacttttttctctcttatcaaggataccctccagtgatttgctgtggctcatactgctggtttgtttatgggatatttcaggcagggtgtttttaaggaggaatactttttgttcacattatagagaaattctaagatagaaattttaaaagaagccattttcttttttaatctccttttgtgctattttattttgttttttattgttttcctttctgctagacactcagccggagttgtaccacccaatgaaaaaaggttggtttgtccaagatgttccctttaagaccttcattcctctccactccctagtgtgtccgaagcttcatgttctgtttcatgccatcacctggctttccccacctcattccttctgacacggctgtgagtggggtcagagcagccccacctccatgttgctgacaagctgacctgactccagcactctgaggccagtttccatggtgttggttacctcgtggtcatgctaagctttccctctgggatgtcagagaatgcacagcaaccaaaatagatttcatgacccttttaatctgggtagatttttagaagtatatccaacttaggttggttgtgaactgctgtctccgtataaatatgccttatttacagtcaggtggagagtcgttctcttttccctctttttctctgcaattcccatttacatcttttctttttggctctcctcgccctttgtctgtgccagttgtctcatgtcccctgagttgtatattcctcagaacatcggaagccaatggatcaaacagctggagacaacccagctcactgtactgagtctccagttttcaaaaagagttaacgttccgtaaagcactatgtggaatgctttgcattcttgtccccatcttagtccactgaacgtccctgtaggatgagtagtgtttttagctctattttctagattagacaattgaagaagtttctgagatgacgtgacttgctctaagaagtggaggaaccaggatttgaacccagttctctgttccccaagcccatgtgatttcattacctgagttgtcggtgtcacgggatcccccaggtgggtgggtggcccagtcattgtgaatcatttcaacatttcttgttcataatgtgttgtatgagcccacccttggctttggcagacttcctgttgatgggccaaacggtgttgcccggctaagaaggtggtgttctggtttacgccacaggttattctcagaacacaaaagtgtgatttcaatcttctgaaaatgacttcgtgtagatgctttattttattctacttggatatgcctgttcgtggggatgactgtgccgacattcctttcaacagcacaactgagatgtttatagagaaagatgagttttctagaagtttaactggcttttgcttttgtactgaactgttatgagttgggacaatttaaacattaactttggtgtcttgaagtcacttgtttatgttaagaaacgtgggggctataccaccaaaaatctattataacagtctggactggtggtaggttttttttttttttttttttttttgagatggggtcttgctgttgcccaggctggagtgcagtggtgcggtcttggctcactgcagcctcctcctctggggctcaagcagtcctcctacctcagcctcccaagtaggtgggaccacaggtgcatgccaccaccctcggctaaatttttttttttttttttttttttaacgtagagacagggttttgccatgttgcccaggctggtctcgaactcctggactcaagtgatcctcccaccttggcctcccaaaatgctgggattataggcatgagccactgtatccagtgacagtagacctttagtttgctcagtgccacattgctttttgaataattcctgcctgtgtgacctttaaaattctgggagagagaaacatatatatggaaggagctcagaattacagttgattgggcttggtcataagcatccttgctgaggcaatacccttccagatccctctttctcaaatagttggagtgcagtattgctatttcatgggcactttgagacaaaagctagctctgatttaactagaatctagtcgtgcaagtctttaaagttgaagctttagaaaaattgcatcatttttggctgcattgcatgagctagcctgcatgttcagcagctgtggaagctgttacaagttgctatgtgttaagaacaagtctagttgtgaggcagaagctctgctgtggttgtgccttgtgccattacctgcctttgacaagcccagggacagcagtgctttgcatgtcctcatgttgaagtctcacttgcaggtagttaccttagaatgccagatacgctgtcgggttgatccagttataaaaggctcatatcacagacgtttatattgaactgtatgttattatgaataaggaattcttatgatagctagaaatcacatgctttggaactaaaaatagaggacttcctctcacgttccctccctgggcctgtgctgcgtcgtcgtgctgcgtatttggatactatccttcggagcgccacactcgagtgatgttgctcaggcagtgtctgaccttggtgagaggagagttgctgttcttgctgctctgtttagagaaaggtgccttccatgctgatattagaatgcttcctataggtggaatgcacgcttcctgtttatcttctaatagccacttaggatatgagcatctaggatctcggcacagagggattcagcgtggtgggagatgcgggaagaaatccgtaatgacagactgttgtcattactgttggaacctccccaggaccaactgaaacttgaagggaaaataagagtttaggttggggagggtatttgaggcagaatgaattccctgtgggctaacctactatgtccaaggcaaacgtgcaggttattgtgaggatgggtgctgtggcagccgggtgtgggtagtaggtgctcagtaatttctcctacgatggtgtgtatttcccatgctaggatgcccctcggctccgcttctatgtgtcttacaataaacattttctctgaaggcttgcatttcattttcccaagttggagacaagtaagcactccctcctcctccattatacccattggtctctgcaaatgcctgtctcattcatctttagagagcacagggcaccctcagacttgtgaacatggtggcagatgagtcgcgtggggaggtgcgtgttgaggggctcactggccctcaggagggagtttgctgcttctgtgcaatgggtgtgagatgggccatccttgggaactcagccatgatctctctccacacaggatctggagtgggagagcaggatgggggactgatcggtgccgaagagaaagtgattaacagtaagaataaagtggatgaaaacatggtgagcctgttctttcttctgcccaacacgctttacttttgagactcattagagcgagtgacctgatgtcagatgcttccaggtgcacgtctctgtgttcgttttccgcacagtagaaggttggagggctccaacggctcccacagactggctgtggtgtttagcatctgggtatgaaaaggattaaaaagcccttttcagcagtagctcatctcttgctatagagtaggaaaatatatttacaactaaagatatgaataacctgttagaggccattttcaagtgagtagagagttaataacttggattagagttgggttttgttcttatactgccttaggtttatacccccttttattcacctagtattttctgtcatttatagttctggattatcttcaactgagtttgatatttcaatgtggctttttttttttttttgaaatggagtcttgctttgtcaccgaggctggagtgcagtggcatgatctctgctcactgcaagctccacctcccgggttcacgccattctcctgcctcagcctcccaagtagctgggactacaggcgtccgccaccacgcctggctaattttttgtatttttagtagagacgaggtttcactgtgttagccaggatggtctcgatctcctgaccttgtgatccacctgcctcggcctcccaaagtgctgggattacaggcgtgagccaccgcgcctggtgtaaacggggctttttggcagtctgttctgagatacgtctccacaacggttacttgaaggaaaatgcatacgggaccagctgccataatatagtcttccctccatacctgccccttcattaggggtttggggagtggatttggaaggctgtgacagaactggttggttaatgggggtcccacaggtacctgcttccttccatcaagcagcaggtagcagaggaaggaggcagtaaataccaaactccccgttcacccagttgcttgctgccgacattctcatgactgtttcaggtcattgacgagactctggatgttaaggaaatgattttcaatgccgagagagttggaggcctcgaggaag

SEQ ID NO: 5135 - DNA, 6000 bp, Homo sapiens
ccatcctgtttcattttcttcagtttttaaaaattgtggtaaaatatacacatagcataaaatttaccattttaatcttttttttttttttgacagggtcttgctctgtcacacaggctggagtacagcagtgtgatcatggctcactgcagcctcgacttcttgggcccaagccatcctcctgcctcagcctcctgttgtaacagtagtgtagctgggtcccagctgtgtagctgggaccacaagtgtgtgccaccatgcctggttaatttttgtattttttttttccttttggagagatggggctttgctgtgttgctcaggctggtctcgaactcctgggctcaagcaatcctctgatctcagcatcccaaagtgttgggattacaggtgtgagccaccgcacctggcctgaccatttttaagtatacaatgcagaggcattatgtacattcagtgttgttcaacaatcaccactatccatttccataacttgtacattatcccaaatagaaactctgtacccatgaaacaataactccccattccccctgccccaagatctcagttacctctattctatttttgtctctatcaatttgcttattctgggaacctcatatgtctggcctctttcactttagcccatattttcaaggatcatccatgctgcagcatgtatcagtacttcattctgctctatgctgaataatattccattgtaggtctacatcacgttttgtttatccattcatccattgacagatacttgtttccaccttttggctgtcgtgaatagggctgctatgaacatcggtgtactcttctttttaaacagctttattgagatatcatttacatatcaaaaaatgcacccagttaagtgtacaattcaatgctttttattctagtcacagagttgtgcaaccaccaccaccatctaattttagaagattttccctcacctcacacccccagctctaggcagccagggatctattttctgtctatagagatttgccaattctggacatttcctataaatggaatcagacaatatgtggtcttttgaacctgccttcttcattcagcataatgcttacaaggttcatccatcatcacctgttttgtaagtgaaattgtattagaacacagccctgctcatttgtttacatctgatccacggctttgagcttcacagacagagttgcgacttataaagttgcacggctcacagaatcaaaaggagctactatctacccttttacagaaaaagtttgctgactcctggtttatgccctccaagttgagctttctggagtctaaactgataaaggcaccaaaagataaaaagcgaaaagaggcaaaactgatgccaagaaccccaggcctataaaagctaccattattgggcccccaccatagtgtaaagcatcccagccagccaggcaaagaaacacagcagaggcagagcccgcctcacctgggaggaggaaggagaactgttcaacaccaaagacaactttttctagcaggctctaatcactcggggcaccttatagaaagtgcattggccttccctgggaagagcaagtgaagacgccattagaggaagggggttcagcaggctggatgcatggcccatggtgactctggcaagctggttcaacatacagccaagcttggcagatcctgaggtatcaaagaattccccaaggctctcaccaaactgttgtgggccaaaatggttagtactcatttttttattttttcttctttttttttttgagacagagtttcactcttgtcacccaggctggagtgcagtggcacgatctcagattgcaagctcactgctcgcctgccaccatgcccggctaatttttgtatttttagtagagatgggttttcatcatgttggccaggctggtctcgaactcctgacctcaagtgatccagcggccttggcctcccaaagtgctgggattacaggcatgagccactgcgtccagcctgttgttattattattattattgtaacagaaaacttgttattataactattattatcagcagtagcaaaagcaaccgtcacacaactcctctagttctctcccgcttccctgccttgctcattagcaacaacacagcagagaagggcggtaaaacctttcacacactcagagagcctgtaaatgttttttatttacaggctgctggaaaatggtagaagcagccagaccaatcccctatgggaagcttctcttctgtggaggtggaaaaagaagggcatttgaactgggacagaaaacagggacaatcccattagctctggttggtagagatgctgccacctttgccctgtgggttctgtgtcctactcgacctctcactgatgtgataagcttccaaagaatttatcctctaagaggctgtgaaatgatggcctgaggctgaatttggtccacatatgtgccacacagcccacacgcacagtcttttataaatttgaatcttcttttaaactcaggaaattgcacataaactttcagatttccggcttctctttcaaaattagaaattccagcctttgaggcccacattcccaaatggcaaaaaatgatgagagctgaggagtggctcccccatgcagaactgtctagtttaccatcgtctccatccagcttgctttcctcctttatgtaactagttgtcccctttgggcttttcattaggaattcactcttatgatagcaagtttcatcttccctgagactgcagcagcagggaaggagtggagatccacttaggggatgagggcatcagagatggatgcagcactaaggtccaggcatctctagttcctgccagcacagccctctcccacccagcaggctagaaggctgtctggcaggcgtcagagctgaatccatgagcccacatagcagaggggaaaaagccctgccattctttctcctggaagcttccatctaataatcacacttgctctttgtgtgccaatgtgctaagcaatgcagcatgcattatctcatccgatcattgcactgccctctagaatagaaattatgatgatcctcactctaagatgaggcaaccaaggcttagagacatcaagtcatttgcctgtggtcacacagctaggaagtggctgggaaactgaggctgtagagatgttaccttgctcttgcaaagtcacatagccaacagatggcagagcagggattccatttcagggccaactgactccaaagcctagaagctggaaaactggaggccagtggggcaaactagtttagctggtagtatttttgaaaatttggacttttggcgttttgctggtctcactggtccccactttctcacaggtcccaccaatactgttgcctcacaccctggcttctttccccacgcatgttgcctgcctggcctcaggaggggtgacgaccttcacatcctctgcacgttctcttacctcccagagttcaactctgatgggcttgagctctcagttctaggacagagatgaaggtcggtgtttttctctgttgatcctaccccagtaggttttgggagttgagagcagagacaaatggaatatggtttggttcatgttcagttccatgactatgatgccattccagagcccgagatttagagatttagaggattgatagggttggttccaggacccactgattcactggggtggtggttgaattgattgtattgttctaaatcatttctctccctttgagattccatccaaagtgagtatgctttaaatcaggggttttcaaatacatgttgtttcaggtgtgggttctgtgtctcatttacttttctgggaggaggtaagcaggaaaaccaatgggcaggcattatggcaggagtttgggatcaggctgaatggggctgaactgtttcccagattaaccagaaagtccaaggagtggatgaaagtccaggagtggagcctaggttggttcaaggggaagcagggaagtcatagaaccaatgaaaggctgggaataggttgagaagcacagtacagagtaaaaggaaaagaaggggattggttggaggttgagaacccaggcaggtgcccaggagcttgctctgacaggtgctgttgggtgaatagtttcaattcaagccccgctgggctgcatcatcccattgttctagtcatgggttcttaaggcttagaacaggaccgtgttaaccacacaacagaaatgttgagctaagccagctaagacacttcagcagcatgggagagaaaacatattaaaagaagcataaatggtgcctaagttagttagttccaaagttcagtgatgtcaccgaagactcaggtgtcctaaagtgattgccgtcatggtcccaaatggctgccacagctccagccatcatgctgagcatccctcaagagaccagagagggaacattcctgttttgtgtctcttttgaagagttagaaaacctttccagaagccactagtagacttcttatacctcactggccaatcctgcttaaactaataactgacaaggaggctgggatgatcagaattcattctcatgaatcgagatttagtgccacctctcccttctccaagtcttctcagaacagaaaggaataaaactgtggctatgtcagcgaggatgaaagatcagagattggtccacagggacttctactcactcccctcactgaaatcctatggccaatgtgtgcaaggctccccctacccctgttagtctaactacgtctaaagcatatcttccgtgtgcgaagggacacatccaaagctgccctacttgaagcaggagtgaaggccaggagcccacttggctcccccagcttcctggaggcactggatcttttccagcatctttattttatttatgttgagatggaatctcactctgtcacccaggctggagtgcaatggctcaatcttggctcactgcaatctcaacacgggaaacctcacccagcctggacacggacaggattgacagattgatagctctttctcaattctgtgggtggtggtgcatggccattctttgtctggttaattccgataacaaatgagactttgaaatgctaactagtagagacggggtttcaccatgctggccagggtagtctcaaacttctgacctcaagtgatccacccgcctcagcctcccaacgtgctgggattacaggcatgagccaccacgcccagcccctccctctattttatagacatggaaacagaggcatgggggaagttaagtgattttggatacactgctaaaaaccagtgtatctcaaatgcagtggaaacatggccttgcctcacaggattaggactaaatgaagtgaaggatgtaaagaggctagctcaggcccagcacatattaggcactcaagaagggcaggtcctccctccttctggcataggggaatgaaagatgaggtgaggcagggacccaaggtactgtgacctggggaggcagcagggctggactcactggctggctggaaaatcagataacccttctgtggctacagagcaagatgtgtgggtgccagacccctggcctggtagaaatgacagctggccttacccccagcccacaggcaccctccacctgcctgaaaatcctctgagaatgaattctgtcttcctcccgagccagcctgtacctggacagaaagctgatgggcagtggagggtgtagaaataaacaatgaccaggcggggcacggtggctcacacctgtaattccagcactttgggagactgaggtgggtggatcacctgaggtcaggagttcgagaccagcctggccaacatggtggaactccgtctttgctaaaaatacaaaaaaattacctgggtgtggtggtgcatgcctgtaatcccagctacttgggaggctgaagcaggagaattacttgaacccgggaggcggaggttacag

SEQ ID NO: 5136 - DNA, 6000 bp, Homo sapiens
cacacatgctaattgtattcattttctatgctacataacacatactgcacatttagcagcttaaaacagcatacatgttttattattatttgagacagatgctggctgtgtcacccaggctggagtgcaatggtacaatctcagctcactggagcctcaacctcctgggctcaaaggatcctctcacctcagcctccagagtcactgggactacaggtacataccatcatgcccagctaattttttgtatttttttgtggagacggagttttgccatgttacccaggctggtctccaactccagccatctgcctgcctcagcctcccaaagtgctgggattacaggcatgagccaccatgcctggcagcatacatttattttcttacagtttctttgggtcaggagttcacgcacagcttagatagatctgctgctcagggtctcgcaccagacttcaattaaggtatcagctgtccaagttcctttctggagcctgggggggtcctcttccaaactcatatggttgttggaagaattcagttccttgtggttgtagcactgaggttcctttttctttttttttttttttttctttgctagctgttgactgacagttgctctcaactcctggaggaggccagcagttccttgccacaggggcctctcatgccatggtggtacactagacaatctctctctggtctgtgtcttccatattgtaacctaatcaagagagtgcctatcccatcacctttgccatattttattggctagaagcacacacacatactgcatttgagtgtagtaaaattttgaagaagttttcttcaagttgaagttttgaagaagacaaaggaggggaggtatacagtgtaacaatgcaagctgctcttaaattttcttcaattccccaccatcccctcttcctgtcttcatctctctccactttgcactttccttgcccccaaattcctgtttatttctaacgaggagcaatttatctttttgttccttgactcttaatgctcaaggtcttaccttctacttcatgtagcatatcaagatatctttcttgctaaagaaaattccctcactcacaggaattttggtgccattggttggaaggctttttctcattctgctaccaacaatgattcacaatttagtggaggagatggatatggctcaattaataacaggtagtgaatggaggggaggaggaggcatgctaaacataaaaatcaccactgatgggatattattagtaagggcgatttctaaacctctcttatagtattatcattattccctggagacagaggaacaggccaggtgggtggggacactcttacttctaatagtagaattatttaaaatggtacttattcacatgtcattcatgtgtgttattttttcttgcctttactattaagtaatttaattttttaaatgatttttgcttgtccatttgcttttaagtaacatcgggagtccagggtccatcagtagatagccatttacctttgggcaaattacttaaccccactactccttggtttcctcatctgaaaaaatggagaagtgagacaaaggttatcataagtgtctcttgctgcacagtgagtccactgctctgtgactgttacaagaccttcagttcttggaagacagagttcagttttacaacttcttagcctccttttttgtttgtttatttgttgttttggccagctctcacagaggtttgcatcgaatggtgattcggttaaaatcactaccttcctccttcctcccattctagagacagatacttctgagtttctgctggtggatgcatgtgtgttgaggcgctccatcctgagctgcaggagctctgtctgggtgctcagtgcagagttgtgagtaccagcagccagggctgccactgttgcaggggataggagtccagattccagagccccagaggggtttccaaataaggagtattctgaagtaactgtgtgcagtgaaggggccaagagaactgggctatgctgctccgaagaggacagtgccctcggaaatgaatctgtcagagtgctcagagaaggcagggtggtgggccttggctgagcaagggatgactgccatcagtcaagcagttcatgtcgacaccattgttggagcagcctcattatgcagagctcagaattgggccccatggggagatccagaggaatgaagaattacgttccctgctccagagaggcttgcaggctcatgaggaaatggccgcaataaccacactttctgatccaaaaattggacatgcggactaacaaatataaatatatttttgacattaaagaaatgtaacattaatagtcggaatatcccttaaaaaaaaaaaagccagcatcatcaacaatcatgagacagacacacccagaggaaaaaactcaaagaacacaaggaaggataacataaggcgagccaagacagctgagataaacactttgtgtcatgtgtgaggctgttactttatctttctgtaaatcaattgcctattggatcagtgtccccactcaaagtgagccccggttatttctgggaattcccaagggatgcctcatatgtgtccacaaactgtggcctcactcccttgcttgctcccccaacccccagttgtccagctgcttgagaagccctctaaaggaactaaggcaagggcttatccattcaatatttgccaactgcctattgagcacctactatgtgcctgccccgtattcggtactatagacagagagacaaataagacagctcttaaatcaaagagctctctgtttcttaggagagaaaggcacataagtagatgattataagtttctaaaggcctactcagtcgctggaagcaagattgcaaaattactcctcatacattccaacgtacaaaggaaagggaaggcctttatgtctttgtagttgctgtgatcttccacatgaacctctcaccgcccccagggtagcagaggaaaatatcactccatctcagtaagcccagtctgatccaaccattttcacactgtctttaggtagctcagtctctgcttggacagctcaggcaattgctcaagcagtctttccaatgtcctctcccaatcccagctcctctctaataagagttggggtaaatatacatggtgtggctgaagtaaccttgtggcaacagggggagacagtgtctgtggacctgtgtggtattctcaggtttcccaccagtctctactcagggtctacattttttcctggcctgatgagctacctgaggctcccaccacagcagtaggtggtcccagctgttgcctctggcctcagaatccccgtacatggcagtgcctttgctcaatcttctgtttcctgccagttctttaccctctcggcacttctgagtctcctaaagggcttctggacacctagaagcccttgcaaattctgtgcaggtataaagagccacctctggggcggggaagtggggatattgagaacttagatccttttagtctccctctagcacatttttctttccacagtgcttcaggataacaagggcagacttcgggctttctatttcccaaacactgcatcctccttttactcccatccataagcctcaaggcccagccatcacaggcaaagaggccatttatctacactccagaaggactctgtgatccagtccacaggctgatctatgatatgtcaaggggtagataaaagaaattagaatgctcttttgtcccttacaaagactggctaagcctttcatcttgctatggactttgaaatgctattttaaatgtcagaagctgaatattgactctttttgtgtacctgctataataacattacctcttccagtggaagaaaggtgccttgagttgtctagggaaaagtcataaacacagaaatgcaaaaggaaaaaagaatcccctttatatatttcagaatgttttcagagaggtctgtgaagttcagtgcttcccaactcttctccctctgccgaggctcagaagggctatgtaataatgcttcagttctagaaagttgacctactcaggctttctccagtatgtaaaaagaatatttagagagataattgctgcacttacaaaaccaagaccaggggttagggatgaccaagaaggaagttgtgaagtttggtctcccaaaaatataaagatcccagcatgaatgaaaaaagaaacaaggcaatttttaaaaagtttaaaacatcatctctgtaacaaaggatttgctaggtactcttctgtaccaaatctccatcaacgctcccaacaattcccctcaaggaagctcttcttttccccattttacagatgagaaattgaaggctcaaagaggttgcgagcccatcccaagatcacagttactaggcatccattcccttggccgccctcatgaaaaggtgtgaacacatgaatgggggtcagagtagagctagagtgtttctcctcttcacagcctcaaaacaggagggcacagctaggctgttaagctggtaacagaaccctaggatgctggctgttaggagatgaccttcattttgctcagacatgttctagaaaattgcctgaaagcaggggaatgaacagagtggcttctggaaagaggtgtccagcatctatgtgattctatgatagaagagaaaattccaagccacggaaagacaagtgtaacaataatagaattcaagctgttttccagtcttcttcctttgggatggaacaggggttttccatttcttcagcagttgtctggagtctttcacttcccagctttttaaaatctcttctccctcccttttcagagcttattggaggtctgtcctggcatgtaccctcctcctcagggagaaggagtgttaggtggagacagggtaggttgggacacaaagtccagttaagtgtgtgtcccagctcagtgctctgagcccagatcctcatctccctgggtagtgaggctcagcacagacaagcaaccaactgctgggctgccggtgccccccatgttggaacctgagttggagattatctcctaagcagatacctgcttccaaactggggatgtagggcttggaaactagaaaatgccaggtctgagggagaggaaagaacaagtccagcaatacacagagctctgtgtattcagagggaagttggcagggttgtgttcgggcagagaaactccgagtggtacaaaggggacgtgcccagagtggagaaatcatgctaattgtctgcactagagctggagaacgccacccaaaatgaagagagaaaggggagccctgtccagagcctccagggccctgcgccttgctccttttgtctaccttcttctgatccagacaggtaggaggccagagggtaagaaagggtctgaagaaaggacccggggcttttacagcagacggaggggagagtggagggcctgaatgcctttggggcaggagtgggggagagttcagctgccgtgggaaacatgtcagggaattcaggcattagcgttgaacgtatttctttattttgtgtgcctcccgcgcggcccctacccccttcccccaaaaggctgcatgactttggagctcccacggcattcagtacattagatggcgggcactgggccatttcgtatgggatgacttgttggcgtgggccagtctggcattctttccaagggattgtggtggggcttgatgggtaggggtaggggaaattttctttttatacctccccagcccccgactctggcttctctgtgtgtaaaagagtaaggcagatgaaagaagctttggagataatgagcctcctaatgtgggatagtcatacccacctatccataattcactccactccatagctgcttacctcctctaccgccccctaccaatcctttgagaagtgatcttatttaaatatacctatttatgagtacat

SEQ ID NO: 5137 - DNA, 6000 bp, Homo sapiens
atgatgatgatgaagaagatgacaccactgcaataatgattatatgccgataaagatatctttatcggcatataattacactgcatatctgtgtgtcaggtatatttattcttcagtgtttgctcccatctagctgtggggtgtgtgtgtgtgtgcatgtgtgcgtgtgtgtgcatgtgcaagatatctttgacctctgtacccctaaaaggtacagatgtggatgtggctttgtgtccctcttaaaaagataatgaggccgggcgtggtggctcaggcctataatcccagcactttaggaggctgaggcgggcagatcacctgaggccaggagttcaagatcatcctggccaacatggtgaagccctgtctctacaaaaaaaaaaaaaaaatagctgggcataatggtggggtgcctataatcccagctacttgggaggctgaggcaggagaattgcttgaacctgggaggcggacgttgcagtgagccaagattgcgccattgcactccagcctgggcaacctcagggcaatcagcaaacctttgcctgggtaactgtcactaaatataaggagggaggttgattggagtgaggacaaagacaactgtctgattctcatcttcctgcttcaagtctgctttggaacttacctgccttactaaacattgcagggctctttgaagcgctatcatttaccttgggaaaataaactttctgagcttcagaaatgtttaataatactatcattgtgaacagttgtatgaaaaaccccagacgcacagttgagtactatatgggtggtagctgtgattactaagcttctcccactttgtgatcaacacatatggaacctcctagtacccatttccagggttcctttcatactcttcccaaatgtaaagggaagagaacttttaagcagaagagtaaggggaattttctctccctacgactggtgtaatgcaaccctgcggtgagagtgttgatagagaagccacagccttcagaagccctgatttggctcagtggaaaccatccttggccagcactctccttcctctatctttgggcagccacattactggtagtcaacattttactaggtactctgggaggatataaaaacaagccaaaaatagaatgcatggtccctcctactctcaagaagcttataatgagtgatatatttataaagcaacataagcaccagttaatgtggcacaaatgaagtgtctgcccactacagaggtactgaggagttaagcagattagccatgttctgtacccaggtttgaatggataaaagagctcagagtgatgagaaagaattgggagggaagaaacaagagttcagcacaagtaacattcttcacatgccaatcagttattcaagagaggatatacttaggcaaggagaagctcaggacagagagagagtgagtgtgtggggctggacataaaggttctcaagttatctaagggtggttggagttgtgtgaacaaatgaatgccctaacactgaaggtttcagccttggttgcatattggcaccacctggagggctttaaaaatacatgaatgcttggtcatatccatagagaatctgatttcattcatctggggtcctgcctgggaatgagcatttaccaaagctccccagatgattctaatgagcagccatgcctgagaacctgagaaccactgccctccccaatgaaagtgagtgggataggggcaggcagcttcgtgctttttctctgtcgatgtgaatgagctgtgtgtgggaatttgggaggtttggagccaaagatgaaggagatattcccatagtgacccatcctcactcttccctggagtctaagttcactcctacgaaggacctgagctgaggcattcctccagcaccttctttgttgccacactgcttggaccccccaggctgacacccatgcagtcagtgcccagaggaaacctttcagtgcctgtcgcctgatagaccattcactgtgagaaaagggagatcagcccagctgagtgggcagccctagcctctgctggctatcgggacaaagagactgttggtaactgtggatttccaaagttctggctacaatttgagctcattaatgctgctccccgggaccaatatcttggcacatggcagaggtggggagggcaatacaaggagaagcaggaaaaagcactgtttccttgcttcaagtagaaaggagttctggaaacctctcagactctaatttattccaaactttaatgagcaaccccagtgagctgcaatcctggtatttggagtctacatctcaactctggttaatctataaccggtacccgctatgtgaggcatcctgtgctacatgtgaactaatacaggacaagtatagagagccctctgcacttgtagaaggcacaatttgaagggccaatgggttcttttctctcagtaaccacccccacatgcacacagcactcaacaacaaagcccctgtgggcattttgtgcaacgtggccatgccttgcccccttgggcagagttgactggatgaaggatgaagccctgaaccaaactgggccaatcagaggatttccctaggaaatagtgaggagagctttattctctccatgcgacaggtaactcgggagctacgggggctgtgtttcctgctgggggatgaagcagaggaacttgattctcacgaatcatcaaatttcccatctggcgtcagtacccaccgaggcccagacgcctccctgcccttggattctattaacacaagacatttgtataaccttctgtataataataaattatcctttgaagattttagctgtcttgagtttttttctgttatttggaactagtaataagaaaaacttatatttgtatagtgtttccttatgtaccggacactgttctaagtattctcaccatattgactaattttcacaacacccatatgcattaggtgctcttataatctccaatttatggataaggaaactgaggcacagggagatgaagtgagttgcctaagattgcacagactacatagtataaaataatacaggctccatggattcatattcaggttgtgttggtctatttgcattgccataaaggaatatctgagaatggataatttacaaagaaaaaaaggtttatttggctcatggttctgcaggttgtacaaggaacatggcgtcagcatctgcttctggtgaaggctcgggaaacttccactcatggcggaagatgaagggggagcacgcgtgtcacatggcaagagagggagcaagagagagagggaaagctgctaccctctttttaacaaccagctctcacaggaactcagtcattatcatggtgagggcatgaagccgttcatgaggggtctgcccccatgactcaaacacctcccacagggcctcacctccaacactgggggtcacatttcaccacgagatttagagggggcgaaacagccaaaccacaccacagattctatttaccacctggttatgcagactccgtcaagagccagggcactcaatgcacagttagtattcacacaagacatgggacagtgtgcccaaacagccacagtttagaagggggcatgagcagactgagtgggccagggaagctttctgcaggaggtggggcagaccagaatgcaaagcctttccaggaggagaggacacccagccaagcacgtaggagtggaagtgacctggcatgggccagagtggtgaagagcctggcctgattggaacagaggctgtgagggggtcaggtcccatgcagccctggaggttttgagctggagagacacttgatggctgtggcatttgggaacatccttctatgctgggagaggatggaggaagggagcccagtgagaagatctggcagcctcccaggtaagaccaggagggtcaggtgtgggggcagcaggaaatggagaagcctctgacccctgtttcggttccatttccagacatgctctggtttgcctcagaggctcaaagactgtatttttgtttcttctctctttctacttaaagaacctgcagttcaaagtaggggaaaatctagtctgtctgtcagttgtcagtaggtcatgtaatggggctcatggtgagcacagaactggactgcattccctagagagttacaaaagcaagagaggagaggcctctgtccccggcaaacaaggctgccggtggattctgaaatgcaccctggattgcatggctgcatccccagcctgctttcagaaaaataaatactcatctctgagaaatacagacagggacaaaaacctcatgatacttcaaaacctttttctgtggtgtttgcataatgtgaaccgtcacgtgctcaggagccagaagatggggggaggagggaaacatccatggctgagcctcaagcatgaaagtaaaaaatggatttcaataaaacatgatataaaaacaagaaataactgtaaatggaattgaaagcaaatgacataaaactccagcacaaggctgctcattgcaattctggaaactttacttctagcagctgcacagccatcagtattcagggctttttttctttccactcctgtgaatttgtcactcgtggggatgcgtggcagctctctggtttcacatagctcctgcttcctttccaaacctcaggccactgaggctgggtgagtgtccagtcctacccagaagacaggcatgatctgggtaagatcagaggggaggtcagggccaaagttgaggaagggacccacttgctctctagtctttaacttcctgtcccatcaatacagagtcacagcagccccgtgtgactcctctccaagaggcctctttccctatcagcaaaacagaaaccatggtcccagcccagagaaggttcctgaggaaagggcaggagagagagtgtccccggagacattagctccatgatcatccagttgtgagggagtcagagcaggatgaggacaggtcaagggcatgtacttaagtggcagaaagctcatagcatcactgcaaatgcagcatggatcccctctaaccaggatgagttttgcaggggaatataaaagctagaagccttgggacctgaccataagttttcctaatacaatcctcaagtcctggttgaacatcttcactttctggaacattctgcgcttccctctccaggaagtcagctaagccatgccaggcccacaccaactgccttctttttgactatcagggttgaaggaggttgggagttgatgacctgtaaagtctcctcccactcccagagtcaatggcattgcaacttggaattgttaatatgaaacgttgccttctgaagtgactaacaatcgagatttctatttgttggggtctgatatgtgttatcgtctttaactcccatcttaaacttaagaggtaggcattatcagccgcattttacatctgaagaaactaaggctcagggaagttaggggaaattatgtagtgaagaggtatagtagttataagcatagattaagttgggaacctgactttaaatcccatctcttcttcttcaagcagcaaaatcgtgagcaagtgacttacccccgtgtgaagaataatgaggtggtgtctctggtaaagcacctggcacatgataaacacttaataagtggtagctggtggtggtggttgttattcttacagtaagtgacttgccaaggtttaacaaccaccataaggctgaagtgggatttaagcccaccctctccatctccaaaagctgtgtcctttccattaatttacaccctctcccaagtgagtggtgcaataaatgaatcattttctgatcatcaacattatgctaagtattggcttgggcacttttacacaaatgatgccattcagccttctcaacaactatgaggtaggtgccattattctccctatttacagttgtggagattgaggt

SEQ ID NO: 5138 - DNA, 6000 bp, Homo sapiens
ttttcacaccctgcccaccgccctctggtctcccactggacaccccacccaccaaggagccccagcatcatcctagactcctgcctccccactccctattctgtatccctcaccaagcaggctaatctgccccctaactcttcctcacaccctgaacctgtccctccttcttaccagcaggatggctagtcccctggccgctctctacccagcagccaggtgatcctcctagaacaagcttgtctaacccatggcccatgggtgcgtgagccccaggatggctctgaatgtggcccaacacaaattcataaacttttttgaaacattatgagatgtttttgtgttttagctcatcagctatcgttagtgttagtgtattttacgtgtggcccaagataatttttcttccatgtggcccagggaagccaaaagattggacacccctgtcctagaggatctgtctgaccctgtcattcctttcctaaccccctgccagctcctctggctgttggtgaagaggtcggcatcgtcacatggcctacaagttcctgcacatcctgctctccaccctcctgccagactgggcaccagacaccctgcccacccgctctggtctccgcccttcactccagtgacacccttgggtgatatttttatgcgtccaccaggcctaagctgaaatgtccctgcctctggggggcctgtctagacccgctgagcctgggtcccttgacctgagccatcatcacaccgaccagcccatctgtaaagccgtctgtctgtctgtctcccctctacaacaccaatagcatgatggccaggcccacgtctgggcctttgcagtgtttccctggtgacctaggcaaagtgcaaacgtttgttgagtgaatgaaggaagaagcctctcggtggccccatctctcatccctgaggcagggtgctggggcagatggcaaccatccaggcagccatggcctggctctatcccagctttgccactaatttgctgtgtgctcttgggggagccactcgccctctcttgtttcctcataaggggagggagctggttggacgagctggtctctaaggtctctcagatccacgattccccttctacacaccccagacaggccgctcgctcccttcttgtccatgaaaccccctttgtctctgctgttcctcccacgtgaactgtccttctgcccctcctctttgtcccacctacccagtgccaatgtctccactgtgtaaatttctaaattctcttttctagagttttctttataatgaacatgtatcactttaattttgaattttcttttattattttgtaagacacagaagtaacctatactcattataaaataagaagtcaaatacaggtgagcagccctaatccaaaaacctgaaatctgaaatgctccaaaatcctaaatgtttgagcaccaacataacagcacaggctgtaaattccacacctgactccacatgacaggttgtaatcaaaactttgtttcatgcacacaattatttaaattattgtataaaattaccttgaggctatatgtataagatatataagaaaaaatcaatttcatttttagacttgggttcccatccccaagctatttcgttatgcatatgcaaatattccaaaatccaaaaaaattagaaatctgaaacacttctggtccaaagcatgtcagatcaggcatactcaacctgtaatataaaagtatgacactgggcgtggtggctcgagcctgtaattccagcactttgggaggctgagatgggtggatcacctgaggtcaggagttcaagaccagcctggccaacatgttgaaaccccgtctctactaaaaatacaaaaattagccgggcgtggtggtgggcacctgtaatcccagctacttgggaagctgaggcaggagaaccgcttgaacccagaatacagaggttgcagtgagcttagatcatgccactgcactccaacctccagcctgggcgacagagtgagactctgtctcaaaaaaaaaaagtatgtaaaataagaagtaaaaatccctcaccccataccatacccaaaggtaaccaaccactataaacagctggagctataatcagaacaaaaattaacacgtatttaacctaccacaaacaaacgaatgctcccaccccttcaggtcaggtccacatgctcgccccctccgcacatgctcttccaatactctagggctctttctttttggggtggctctgacatcagactgcctgccacttacaagctctgccacttacctaacctccctctgcctcagtttcttcatgcaagtgtggataataacaacgctctgttgatacagttattgggaggagtaaatactcttgcacataggaaactcttagaatggtgcctgggcgaactgagtgccttccaaatgtcagcgcttaccactgttattgagtaactatcccgtgctgagcaatggggataccaaagtttgggtacagaccccctttattttctgggagctgacagtggcactgggggtcaaggcgcctgtgtgtgtgtgcacacacacagccctgcctacaggcggctctcctcagcccttgaaacactcaacacgtgttatctcatctgattcttaggaccatcctgagcaggggccagtgctggcatctcagaggctcagagggcttaagtgcccagtgtcagggcacacaggtaagaagggccagccaggattcaaacccaggccagttggatctatgactccaccaaagagccacaagaaagcactatctacccacccagggttaagtggagcctggccaagcacagtgagaggcgggccaggagaaagggcagcgggggctttgggagcagcggggcaggccggcagggcctgagacactgacgcttattattcccacgcactggccttgtctccgcagccaggccaccatgttctggagtgctggcccacacctcagcctcgtggcctactgccacccttgtcccacatgccgcagagctggccacacattcactggctggtgtctgcttcctcagctcctctcattaaagcatctatgacacctggggaagcaggtcgaggaagaaaagctgcccactgggccagaggcagggctgggacgtagagtggactaaacacgcacagacctgggtcccagtgtagccttagtctctgactcttttgtagtctccagatgagccaccctgcctttgttaatctcaatcacctcatctataaaatgggcaggtcactaccctctcttggggcagttatgagggttaaaggaggggccttgggaagacactctggacagcagcgagccgtagtgttgtctgctagtgtgggggctgacacttgttgaacactgacctgatgtgctttttctcctttccaggcaagaatcaatattaattagcccacttaacagatggcacccagagaggacaaaaacctgcctgggtcatgcagttagaaagtagtggagctaggatttgaacccaggtccctctaagccccatgtgcttccactgcagaggcctccaggtggggaggcagtatttgcatggaggcctcatgcaccatgccaggtggagtctcagacctcagtctaaggcattatcagagagctgcagccctggagccttcaggcctggcctcctccatctggccccctctggtccttccagctcagctcagggcctcagggaaggtttctgagtttgatgatgctattagagatccccaggggtctctgcccacctgaggacctgggagccagtgaccccttgctcccaggaggggctggcaccacagcccagctggagcctggctggggtggtgccccaggagaggggaaggcgccagttctcgagatggggaaacaatggggtatgtctaagcctccctctctaggccgggagcagtgacttcggcctcttcctccccaccaactagggttcagaattatgggggaggtacatctattcctcctccacacaacactcacccctcacttctctgaaatgcatcgggcctaacaccagattggggggtgggggtggtggaataggagctcaggtcagggttctgggtatttaccccagcagggatcccctcgacaccctcgctggccctggctactccagagccgagccgacttcccttcccgcagccgggcctaggattcccctggttgaggctgagccttcagcgcctgccctgagagacacacctgcctaggtcggtgctgcccaatccagagaggggcccggccacgccaggcctggcaggtaggcccatctggccaggcagggctcggggaggggctcaaacatcctcctcccagcaccaacaatgtcgttgccccaggaaactgcgacccgcgcccctccaggctgttcccagctctattcacaggctaagatgcagcctgcctgcccgctccgggatcgcaaccccgaccccagaccctgccgcagcccggaggttggggagaaggaggcctccgagccccctcctccaattccagcgcagacctcccagcctaggaccaggaatggcggagggaacagcctcgtgaacatgcaacggctaccagtccggacttgaggctggcggggcttctgaggggggctctgtcccgggaagagaccccactcccacgcagccctttcgttcccgggttcccgaggttctggggtggggggcgggcagggcagccaatgcggatcagtccccgctgaagggcgaggcgcgcggcggccggggactctcacctgaaattgggaggcgaagcgatgtgcagccccaggaacggggaggcggcgggcggggacgcggccccccctcccaggccgccgctttctcgctccgccattctcgggcacagccctggccatccgggcggagcgcggcgcggaggaggcggcggctgcgaaggaggcggaggcgcggcgagagggcagccgccgccgcggagttcgggctaggcgggcgcacctgtgtctggcagggcgcggcacagcaccgcgcacggcccgcgggactggcgagagcgccccgcgcgcgcccccgggacccggccggggtctcgcgcgccccgcccaggccccgcccccaccccgccagccccgcccccggagatggcgctctccgcggtgctgaagccacggcccccgcggccctgggcttggttcagccccgccctaaatccgacatcgactctcctccaccccgtggccggtgtgggctttgtccctccggttgggcttagtgcccgggtatcagatgactaatggcaggacactggaccccaaggtccaggttggccccccgcagcagagaccaagaaggcaggcggaaaaggagggtcgtggaggaaggcagagaaaggagaggatgtcagtgggctcttaaagtgtacaggtttggagtcaggtggtgtgaattcactggctccacaagtgactgggcagtggggccttgcattagtgacttcagagcactaaggtttggtcttcttatctgtgaaatgggacaatagcagtccctctcatggttgttgtgagaatgtaacgtaacacaaatgtgttgcctgagacccagaaacactccacctcctgcgctgggatccagccctcaccccagtcctgtccctttaccttgaggggaccctcccaaagactctccctagaggctgtcttctctaaagattgacccaaatctctcttcagccccaaacagctactcgtggtgaattgagccctccaggcttctcggtctctcgccaggaccttcccagcattctccttcttagcgcctcaactgcatttcctgcagagcacccctcttctgcacccacagacacacattctaagacttggcgcctttccctctcctcccactgttgacttcttgggatcattttggttgtttctgttccctctggcacctccat

SEQ ID NO: 5139 - DNA, 6000 bp, Homo sapiens
ttcttcaaacaacaatctcctttctgctctttcttggctgatcagaataagcaccctctcttcttccattcaagtcttctgatccactatcataaaacgtaccatcccatttcacgtgcaatagatgacctttttctcaccttactcagggccctttttgcttcaactattgtgcatttttcactgaattcttcaattctctttccccactagactataagatcctgggtagcagaactatgaccagctactattattaatttttttgtcaaccaacctacttacgataagaaatgagtcaatttaagatcaaattgggcaactgcttctgtgacctagaaatcgacacaactacttagttatcttttcccagataatagggccaattgcaataacctctgtctactgaaaagctgtcatagtttgtactgattttgttacaaacatgatgttttactatataccagaaaagtaacagcaaaaatataaaaatctacagtgtctgtgctgaaaatggctcttccatcaatgtgatgcttgtgcagtgcacaacctatactatcttatatatactaccatataggtttcctacttctaaaagtgtattttttttcaatgtttattatacactttaaattatgagtcaagagcataaattattttatggctcgtttagagataatgtaaacagtattcactttctacaaactaaactggacccgagcaaagcaaactccagtagaatatgttaactattgtcctcataataatgagtactcatttataactgtgactgttcacttttctcttaagatcttctctgattattgttttaaagttaaatagcaaatggtctcaactccctccaggctaaacaagtaacatgagtatcaatcacatttggaaccaaatgcatattatctatctataataccaaccttattacttatgtatggctcagctatatcatataaattatctcatgatgtaaatatactaacattaacacttactatatgcaggttatttaagctctttgaatctcagtttcattatttacataatgaaggataaattgactttgtggagctgttggaagaattaaagatattatccttaatgtgccaataggtgccttctattttcagaggaaattggttcccattgatagacctgattgaagaggtaggcctatgcatactcttgtcccattaaccatggatatttggtccacaagtcattaagtgcatgcgatgttgaaacaaaaaggtgctttctttgagtaactagcacataaaaatactggatgatttaagttaaataagcagttgaaacatgaggaacatggtcatagagagagtcaaagaataaaggcgtagcaatgccacagcatgccagactatgacaaaatggtatagttaggcaaaaaacagttatcttcctgatagaatagagcaggcatgcaaagagaagcaatgggaaaaggagagaaaggaaagaaggtagaaagggagggagggaaggagggagggggagtgagaagaaggaatggagggagaggaaggaagggagggagaggaagtgagagagggagggattaagggagagagagaagaggagaaggaaggagaggagagatgggaagaggatgagaggaggggaggggaagaggggaggggaggggaggaggaaaggagaagggaggggaggagaggggaggggagaggaggagaggagggcaggggaagggaggtggggaggagaggagaggggagagaagaggggagaggagaggagaggggagaggaaaggagaggggagagaagacgggaggggagaggagaggagaggggaggaaaggggagaggggaaggggaggggagaggagaggagaggagaggagaggagaggaaaggagacgagagaagagggaagaagacaagggagagagaaacagtagttccagagaaagaaaactggaataattgccttactgtttttcatttcacatgaagactagtagataacaatacttcgctttcaaaaagattttcccatatctttccaacaagttttcccataaaatggagtttattgggatgattttaaagcccaaacaattctttatttgtttgaaaagtgcatggcaccatctctagcacacacgagatactaactgaatggaagctatcactaatcagattataaacccaaaatgcagggaagataatacaattagcatttattttaatttcaaaaatctatcatctaaactacaaagatgaaatcttttctgttaaactgaattgtcattgacagaaatgtggcttggtcttattttggctccatgtaaatacatttcaaatataaaggaaacatagacctctcccctttccaccccttttttgtctactgaagaataacattatagacacttacaagattcagcaacataatgattatgaaattgatacagacagcagcagcagatgttgcaaactgccagtattgtttgatgaaattccacttgaatgatgcaaactgttccatgacaaccaggcggtacaccacaactccaaacactgcagtgatcaccaaggatatctacaatattggacaccagaaaaaacatccatattttacatcattaacaagtcaaaagcaaaaccgtagatcaaatctactgtccccaagaattgaaggtatttacctttccaagaaaggatatctagatttaattttctcctttaaggaagttatattctagtcaaaacaaataggacaaaatttgttgttttagtatgataacaaagttatcacactaacatgcaaattcttcccaacgtcctcttaaatggaatgctcatttttaacacaagatgtctaatccatcaggtcaactgatataatttccattttatcttagatggtctctgtttctcccaaagagtattttctttaaaaaggtgcacaaactgcctttgtaaaatctccataacctgttgtgatttgtttgtttaattgtacgtgttaccaagttgttggaaagaataaggtttctgacattctcaacgtcacaaaatgagttggtatcattgaacttacttctaaatttagaatcccaaaacattttgatatcgatgcctatactttaccatgaagaatattcctgagacagaaacaagaagacgagtgactttgtctgaggaaggctgatgtggttcaggttttcccgtgatgggatttacaatctccatcttgtaatacttggcttcaaactggggacgaagtgtttcctatgagagaaacgaaagttatctaaatatcaaagccataaactaaaaaaacatacccccaagaattgatacgatactcctaaatttggcctacttttgtattaagtcttcacaataaagcaaccttttaaaaataacatcaaattaccttccaaataaatcccgagcagtattgaaattagcataattttccactaatgtaatttaaagaaacatcacagaagtggtttgaaaaatacatacttcattgatctctattatcttcataaaataataaatctttttagtaggaaagatcaagggaaaaatctaatggtggttaactgcttccagccggaatgctagggcagtaattttccatatcctgtaatagcccagtttccctatttccttgtatcctaacatcttacctcctcttcttcccattcgataaggtcccaagtataggtcagtatactccttctccttttccaaaactccaggaagactgtggctataaaatataaaaatgataattctttacccaaatcacatcatattgcttttcttctttatattgagatatcttatctcataattaaaattaaattatgaaaataataaattaaaattttatttttcccttttcctcttctccctgtgtttatacatcattaattagtgtatctattagcatacactgctagaggggtgtgatttcttttactggaaccaagaagcagggactttttgtcagcacagctcatcaaaatgatgcaatcaatattactgagctaaatattgaccattttgacctgcatatgcttattcaaaattatctaaagactcaaataaagccttctccaagaatcacaataaaggccaaatgctactcgtccagagcttacagagagatggtgtaggagagagaacaaaagaacaaactctcgtggtgaaggagaagaaaagaaagacaagagaagaaactcccaaattcatattctgggtggactctacatggactgaaaaggactcagtggaaaaagtaaagaaattcctgaactgtcagctttcccgtttaaacagttaagaaaacgattgctgttttattttttttctagacgggctctatcttacaccattcaagactttgtggacacaactaagaactcacatatatgttttagaaatctgtggtactggggcaaccctctttgggtcccctcccattgtatgagagctctgttttcactctattaaatcttgcaactgcacactcttctggtccgtgtttgttacggctcgagctgagcttttgcttgctgtccaccactgctgtttgccactgtcacagacccaccgctgacttcaacccctccagatccggcagggtgtccactgtgctcctgattcagcgaggcgcccattgccgctctggatccagctagaggcttgccgttgttcctgcacggctaagtgcccaggttcgtcctaatccagctgaacactagtcactgggttccatggttccttctgtgacccatggcttctaatagagctatatcactcatcgcatggcccaaggttccattccttggaatccgtgaggccaagaaccccaggtcagagaacaaaaggcttgctgccatcttgggagcagcccgccccatcttgggagtggcctgccaccatcttgggaactctaagaacaaagacccgccggtaacatttggtggcccgtacggcgcttctccaaagcggtgagtaatactgaaccactttcacttgctattctgtcctatccttccttagaattggaggaaaataaccgggcacccatcagccagttaaaaacgattagcgtggctgctggactcaggtgtgaggtttcctgggaaaaagctttctaacaacccccaacccttctgtgttgggagctttgttctgcctggaaccagcttctgctttcacaattttcctagggaagccgagggtcggctagaggcagaaagctgtcgtcctgaactcctggcattggccggtggagatcattgcacagccagaagtctctactcaacagttgcccatgtgtgtgcccctacctctccttctgacccatatctcctgggtcctaaccatgactttcttgaaagtgtagccccaaaattctccttacctctgaatctacttcctctgatccctgcctcctaggtactaatgcttcagactttcacttccgttcccaagtattagagcaggttgtatctccaaagggatctaaggaagctctacgctgtgtccttaagcacctaggcaatgaacccagggagtcttggccctggtgactctcccaattcaggcatacagctctcgacatgggcagttatgtgggacccgttccccaccacccttgccagggccttagaattgataacccagtactttaacaactggaactgggtctacaacaacataatagatcaggttgaaaatgaattgagtaaattaaagggaggcacatattcctatagtggcaaatgggggcaacaagcgaatgtccttccactatgtttccaaaatccttctacagaggcagagaggagaaagagagaggcagagagggagagagagaggaagaaacagagacaaaagatgagtcaaacagagagagacagaaagtcaaagaagaaagagagaaagagaaagatagaaatagtaaaggaaa

SEQ ID NO: 5140 - DNA, 6000 bp, Homo sapiens
acacctgacctaaaacctaaatgccttattttcttctacaatgctgcttgaccccaatacaaactcaacagtggttccaaatagccggaaaacggcactttcaatttttccatcctacaagatctaaataattcttgtcataaaatgggcaaatggtctgaggtgcctgacttccaggcattcttttacacatcagtcccttcctagtctctgtgcccagtgcaactcgtcccaaatcttccttctttccctcccgcctgtcccctcagtcccaaccccaagtgtcgctgagtctttctaatcttccttttctacagacccatctgacctctcccctcctcgccaggccgagctaggttccaatacttcctcagcctctactcctccaccctataatccttctatcacctcccctcctcacacctggtctggcttacagtttcattctgtgactagccctcccccacctgcccagcaatttattcttaaaatggtggctggagctaaaggcatagtcaaggttaatgctccttttactttatcccaaatcagatagcgtttaggctctttttcatcaaatataaaaacccagcccagttcatggctcgttctgcagcaaccctgagacgctttacagccctagaccctaaaaggtcaaaaggccatcttatcctcaatatacattttattacccaatctgctcccgacattaaataaaactccaaaaattaaattctggccctcaaaccccacaacagcatttaattaaccttgccttcaagggtacaataatagaaaaaagttgcaattccttgcctccactgtgagacaaaccccagccacatctccagcacacaagaacttccaaacgcctgaaccgcagtggccaggcattcctccagaacctcctcccacaggagcttgctacacgtgccggaaatctgaccactgggccaaggaatgctcgcagcctgggattcctcctaagccatgtcccatctctgtgggaccccactgaaaatcggagtgttcaactcacctggcagccactcccagagcccctggaactctggcccaaggctctctgactgactccttcccagatcttcttggcttggcggctgaagactgacactgcccgatcgcctcggaagccccctagaccatcaccgacgccaagcttcggatagctctcacagtggaaggtaagcccatccccttcttaatcaatgcggaggctactcactccacattacctgcttttcaagggcctgtttcccttgcctccataactgttgtgggtattgacggccaggcttctaaacctcttaaaactccccaactctggtgccaacttagacaacactcttttaagcactcctttttagttatccccacctgcccagttcccttattaggctgagacactttaactaaattatctgcttccctgactatcctggactacagctatatttcattgccgcccttcttcccaatccaaagcctcctttgcgtcctcctcttgtatccccccaccttcacccacaagtataagatacctccactccctccttggcgaccgatcatgcaccccttaccatctcattaaaacctaatcacccttaccccactcaatgccaatatcccatcccgcagcacgctttaaaaagattaaagcctgttattacttgcctgctacagcatggccttttaaagcctataaactctccttacaattccctcattttacctgtcctaaaaccagacaagccttacaagttagttcaggatctgcgccttatcaaccaaattgttttgcctatccacccggtggtgccaaaaccatatactctcctatcctcaatacctgcctctataacccattattctgtcctagatctcaaacatgctttctttactattcccttgcacccttaatcccagcctctcttcgctttcacttggactgaccctgacacccaccaagctcagcaaattacctaggctgtactgctgcagagcttcacagacagcccccattacttcagtcaagcccaaatttcttcctcatctgttacctatctcggcataattctcataaaaacacacgtgctctccctgccaatcgtgtccgactgatctctcaaacccaagcaccttctacaaaacaacaactcctttccttcctaggcatggttagtgtggtcagaattcttacacaagagccaggaccacaccgtgtagcctttctgtccagacaacttgaccttactgttttagcctagccctcatgtctgtgtgcagcggctgccgctgctttaatactgttagaggccctaaaaatcacagactatgctcaactcactctctacagctctcataatttccaaaatctattttcttcctcacacctgacatatatactttctgctccccggctccttcagctatactcactctttgttgagtctcccacaattaccattgttcctggccgggacttcaatccggcctcccacattattccggataccacacctgaccctcatgactgcatctctctgatccacctgatattcaccccatttccccatatttccttctttcctgttcctcaccctgatcacgctagcctcgtgctatccccaaactgccattcttaactcttgaagtaaataaataatctttgctggcagggctatgctgaatctccttaggcactctctaatcagatgtcctgagtcgtcctaattcttagaccttttatacctgttttcctccttctcttattccatttagtttttcaattcatacaaaaccatatccaggccatcaccaataattctacacaacaaatgtttcttctaacaaccccacaatatcacctcttaccacaagacctcccttcagcttaatctctcccactttaggttcccacgccgcccctaatcccgcttgaagcagccctgagaaacatcgcccattctctctccataccaccccccaaaaacttccgccgctccaacacttcaacactattttgttttatttgtcttattaatataacaaggcaggaatgtcaggcctctgagcctaggccaggccatcgcatcccctgtgacttgcacgtatacatccagatggcctgaagtaactgaagatccacaaaagaagtaaaaacagccttaactgatgacattccaccattgtgatttgtttctgccccaccctaactgatcaatgtactttgtaatctcccccacccttaagaaggttctttgtaattctccccactcttgagaatgtactttgtgagatgcacccctgcccaccagagaacaaccccctttgaccgtaattttccattaccttcccaaatcctataaaatggccccacccctatctcccttcgctgactctcttttcggactcagcccgcctgcacccaggtgaaataaacagccatgttgctcacacaaagcctgtttggtggtctgttcacatggacgcgcatgaaagagtttattaaggagtactggcccacacaatcacaaggtgaagttcctcaataggctgtctgcaagctgaggagcaaggaagccattccaagtccccaaacctcaaaagtagggaagttgacactatagccttcagtctgtggccaaaggtctgagggcccctggcaaatcactggcgaatgattctaaatacacagaatttaaacatgccacccttctaccactctttgcctgagctttgcaacgcagggtcataccaatccaggagtccaaaagctgaggaacttggagtctgatgttcgagggcaggaagccttcagcacaggagaaagatgaaggccggaagactcagcgagtctgctcatttcactttcttctgcctggtttattctagccatgctggcagctgattagatgctccccacccaggtcgagggtgggtgtatctctcctagtccactgactcaaatgttaatctcctttggtgttaatcaccctcacagacacacccaggaacaaaactttgcatccttcaatccaatcaagttgacactcaatattaaccatcacagattataaacgtcctttgggaattggccatgactgtgttctatgacctcttcacttggggatataggataaagggaacagcttctctataggatatgctgttctcatggcagaaggaaaagagagacagaagaaccatttgatgcctttaagaattctgcttggaagtaatgtatcacttccacttacactttattgagtaaagcaagtcacatggccaagcatgatgtcaattgtgtgtaaagtatcattttctataagtgagaagggccagctaagagttggaaaaaaaaaaaagtcttaatctacttccttctagtcttttcataaaaagaatattatttttcctgtcgaattaatatatgtctactacaaaaagttcagaaatacagaaaatgtaaagagataaaacaaaattcagcccacctcttaccttcataggcactaattgttaatattcacaccagttccttccagtccttgttctaatcactttatttttttaattttttatttttttgagacggagtcttactcctcacccaggctggagtgcaatggtgcaatctcggctcaccgcaaccaatgcctccttgggtgcaagggattctcctgcctcagcctcctgagtagctgggattacaggcacccaacaccacgcctggctaatttttttaatttttagtagagagggggtttcaccatgttatctaggctggtcttgaactcctgacctcaggtgatccgcccacctcagcctcccaaagtgctgagattacaggtgtgagccactgcacccagtgttttttttttttttttttaacagaataagatcatactgtaagtttttgttgcctaacactgaatcttaagtactttcctatattcttaagaacggctttatagagccattgcagtacattgagctccatagagacagcaccggggaaagtgagagtttcagtcaacttctcagagttttctaagaagtgctcagagaggtggaagaacatgtctgctaaagagaaaggaaaatttggccgggcgcggtggctcacacctgtaatcccagcactttgggaggctgaggcgggtggatcacggtcaggagatcaagaccatcctggctaacacggtgaaaccccgtctctactaaaaaaaacccaaaaaattagccggtcgtggtggcgggctcctgtaggcccagctactcaggaggctgagacaggagaatggcgtaaacctgggaggtggagcttgcagtgagcggagatcgcaccactgcactccagcctgggcaacagagccagactctgtccccccaccccccaccccccaaaaagagaggaaaatttgaagatatggcaaaggcggacaaggcccattataagagagaaatgaaaacctatatccctcccaaaggggagacaaaaaagaagttcaaggatcccaatgcgcccaagaggcctccttcagccttcttcctgtacttctctgagtatggcccaaaaatcaaaggagaacgtcctggcctgtcctttggtgatgttgcgaagaagctgggagagatgtggaataacactgctgcagatgacaagcagccttatgaaaagaggtcggcgaagctgaaagaaaaatacgaaaaggatattgctgcatatcgagctaaaggaaagcatgatgctgcaaacaatggagttgtcaaggctgcaaaaagcaagaaaaagaaggaagaggaggaaaatgaggaagatgaagaggatgaggaggaggagaaagatgaagatgaagatgaagaagatgatgaagatgaagaagatggtgatgatgaacaagttggttctagtgcagtttttcttttgtctataaagcatttaatccccctgtacacaactcactccttttaaag

SEQ ID NO: 5141 - DNA, 6000 bp, Homo sapiens
gaaaaaaataaagtgggatcaggctacctgatttcaagatttattatacagttatagtaatcaagactgcagggcaggttgaatatcccttgtctgaaatgcttgggaccagaagtgtttcagattttttttttttttagtttgaaatatttacacatacacaatgagatagcttgaggataagatcccagtttaaacataaagttcatttatgtttcatatatactttatacacatagcctgaaggtaatttcatacaatattttaaataattttggcatgaaacaaagtgtggatacactgaaccatcagaaagcaaaggtgttaacatctccgccacccatgtggacgatctgtgattgtttggcatcaccatcattcctgattctgaatttatatgttaccgataagcaatcatttttttacacttattcacacataagtacttaacagtaaaaaaaatgacataccagtaatacaacgaaaaaaatagtgtattcaggttaagtaagccagcacagtagtgtcaccagaatacctgtatcagctgttaagcaacaataacaaataacagtaggctttcagtttccaagtatgatgctgttttgactaaaaggttactgtacactgtattttattttatttttaggtgagaagaagcatcagaagcagttgagggaccaagaagtgggtcctgtagagaggaagaagcattcctctggatggcttttttaaatgtttctttcagagtcatctgcctcattaatgatgctttttgtcttagaagtctctctttgattttataaactgacatgatttcttgctctgttatgaatgcatgctgctctagtcctttaataagcccatcacacatttttaccatgtcgtctataggcactttttctgcagtgttaacatcatcttcattatcattatcatcatgatcatcttgattcagaaccatttttgttacttcaccattggacaatgaatgaacaactggagcctcattattactgttaaaaacatctttgatatcctcttcttccagcttactgacagtctctggatgtatattttttgtatatgtaaggaggtcagacattatttttttctcacttgacatactgaatccttcaaagttaccatcttgttcatcatcattactgaacttgccagtaaacttctctgttgcttcatgaccagcagatgctttattgccacaagtctttaaaaatttaatgccatgtcttttcttaaatttctgcaaccagcctgttgaatattcacagttcccctcaatttttagttcattgtgatatatctttgcttgtttcatgatcagcataccattaagtggcatgtgttcactgcgacgctgacggatccactctttcaatacacgatcaagatcttcatttttagctttatgaagtgtttttctatttttcattaatatctgctcatcactttcagcataaaacttcaacagtttatccttctgtttcttcaggtcatatatggtggtcattccaacaccatactcttccgtaagatgtttcacacttacaccactgtccagtttctccaacaacttgactttctgtgctatagataaacataaatgcttcctctttttcttatcactgatattcacaggggtatctttaggtctttttgacattttcaacaatatatttataccacacagcagagaataagcaaaaaaatgcagtgagtaatgcacacaggtcttggccccatgtggggcattgtgggaaacctgttgttggcgtgtccagcctgcacgcatgccatttaattactttttgtgggaatgcatggggaaatccaggtgtgagcagaaaaactgcagcagaagagagctgggggggtcttttttcccactggggatgttgcatgaactgggtgttgtgcacctgtgttttgactgcaactcacataaggtcaggtatgaaattttccatttgtggcataatgtcagcactcaaaaagtttaggattttggagcatttcagatttcagatttttatattacggatgctcagcctgtattggtagaggaataaacacatagatcaatggaacagaatacagaaactggaaataggatcacacgaatatgtccaactggttttgacaaaggcataaaagcaattcaatggaggaaacatagccttttgaacaaatggtgttggcgtaatgtaacatgtatatgcaaacaaacaaaaaagaacaaccgcaacaacaaccaaagttttacacctattttaaaaattaactcccattttgtaggttgcctgttcactctgatggtagtttcttttgctgtgcagaagctctttagtttaactagatcccatttgtcaattttgtggggggggggagggatagcattaggagatatacctaatgctaaatgacgagttaatgggtgcagcacaccagcatggcacatgtatacatatgtaactaacctgcacattgtgcacatgtaccctaaaacttaaagtataataataataaataaaaaattaactcaaaatgtatcatagacttaaatgtaaaataaaaaatctttaaaaaaataggcagtagaatgtcttcaggatctagggctgggcaaagagttattaaaccaaaagcatcaataaaaggaaaagtggataaattggaccttatcacaatgacaaacttttgctctgcaaaagatacggttaagaggatgaaaatacaagccatacactgtgagaaactgtttacaaagcacatatttgacaaagggctaatatctagaatatataaagatatctcaaaactcaacagtacgaaaaacaattaattagaaaatgggcaaaagacatgaacagacatttcactgaagggaatatacacatggaagataagcacatgaaaagatgtcttacatcattagtcaatagggaaatacaaattaaaatcacaataagacaccaccacacacctattagaatggctaaaataaaagctaatgctcatgaggatgcagacaaacttgatcattcatacactggtggtgggtatgtaaaatggtacagccgctctggaaagcattttggcagtttcttaaaaaacgaaacatgtaactaccatgcaacccagcaactgcactcctgggcatttattccggagagatgaaaacttagttcacacaaaaacctgtacacaaatgtttacagtacctttactcagaatatctgaaaactggaaacaacccaggtgttcttcagtgagtgaatggctaaacaaactgtggtacattcatactatggactactactcatcaataaaaagaaacgcgctattgatacatgcaacaacttggatgagtctccagataattatgctgagtgaaaaaaaaattctaaaaggttgcactctgtatgattccatctatacaacacagacgtttgccaggaattaagaagcagtgtaactacaaagagcaacatgagggatccttgtggtgatgaaaatgttctgcatcttgactttatcaatgtcagtatcctggttgtgatattgtactacagttttgcaaggtgtttccattgggggaagctgggtaaagggtacatataatctgtccatattattccttacaactgcatatgagtgtccaattttctcaaataaaacatttaattaaaatagtacatatgtgatttctcttgtccaaaccctgattgataatttgaacccttcatcagactggaaaatttctcttctattcctagattgctaagtattttggtcagaagaggtgtttatttttgccaatagatttatctgtattttttaacataatcatagcttttctttaaaaaaaatttttattatttcttccaatgaaggcttttctcttttaaggtaaattacattgtttgatttcagaatgcaaaaccaaccttgcattcccgggataaaccctacttcatcatgatgtattaatccttttataaattgctggatttgatttgctaatatttgcttaggatctttatgtctatgtttatgaaatgtttttcagacacctatggtgtctgaaaagtcctcagtaaaaattcattgaattcagacttgtttaaatgatactctaactgcaacatagctgatgttgtggtccagacaccccctcagggcctagacagtcattccctcagcttctggagttggttactgatgatacacaactgagtccttctctgggggccgccctccaccgagggaagcagtcttgccaaaaaaaaaaaaaaaaaaaaaatcacagctcctccccaggtgtagcctgtatccatgactggtcaatgcaaggataagagtttctggcccccttgctttaatgtggaactactctgaagggtcatcctaggctccaagcatgccttgggattggtcaaggcctctgctgcaactgttttgcaggccaacttcttcctctgcctacaaattcctgcttccttcactttcttacaggtgctgatctttaagttctccctacctccaccaataaccttgtaggcaagctaatctccctcttgcgtcccccaggggctcaacacaggacacaccacgttaccctgttttatttttcttttcatagcatttaacaccttatacgtgaaataaccttatttacttaacacttaaaatacttatcgtctgctgtaagaatgtaagcttaccaggacagatctttctcatacgctatgcaccgctgtatcaagcgcctatggcagggcctgcagaacacagcaggcactaaatactggttgttgaatgaaccgatgagtctggccccgcgcttttggtcctgggatcacatatcccccctccagcttttaacacgcacctgggagctgcggctcggggtgtgcccccgagtccccgcccctcaggccacgcccccaggcccacggagagggcggggccccgcggacgcaacggtgggcacgatgcggcaacccgccgttcggttggtgcgcctgggtcgggtgccgtacgccgagctactggggctgcaggaccgctggctgcggcggctgcaggccgagccaggcattgaggccccgtcggggactgaggcgggcgcgctcctgctctgcgagcccgcggggcccgtgtatacggccgggctgcgcggcggcctgacgcccgaggaaactgcgcggctacgggccttgggcgccgaggtgcgcgtcacaggccgcggtggcctggccaccttccacggcccgggccagctgctttgccacccggtactcgacctgcggcgtctcggcctgcgcttgcgcatgcacgtagcgtcgctggaggcgtgcgccgtgcgcctgtgcgagctccagggcctgcaggacgcccgcgcgcggcccccgccctacactggcgtctggctagacgatcgcaagatctgcgcgatcggtgagcgccgcggagcagggcggtacctgagagccgaggtcggagcttgaggcctgggggcggggtctgacggggctggaccaacggaggtgagggccgggaggaggcgtatctagcgcgggttttgaatcacagctacccgctgcgtttgagtttttaagccccttttcagatatcgtatattcagaagcagaaggctcctcacatctagtccaacacgcatttctgttaagggagagacaagagaagtgaattgccaggttacgtcctgcgaatgacaatgtcatggcaaataagggtgctaattttcaaacttttttttttttttttttttgagacagagtctcgctttgtcacccaggctggagtgcagtggcgcaatctcggcccactgcaagctccgcctcccgggttcacgccattctcctgcctcagcctccagagtagctggggctacaggcgcccaccaccagcccggctaattttttgtatttttagtagagatggggtttcaccgtg

SEQ ID NO: 5142 - DNA, 6000 bp, Homo sapiens
ccctgctcctagagaaactggctggctcgaggccatgccctgtcgagctcgaggccatgccctgccggggctctcaaggctttggaggagcctctgctccctacggccgtggtgtgctcagccacgcccaacatttgcagacagatccggtgtgaatgctcagctctcacggctttggaggagcctctgctccctgtggccatcgtgtgctcctgagccacgcccaacatttgcagacagatccagtgtgaatgctgtgctgccatttgcttggtggatgacctcggccaagcaacctggcctttctgtgccttggtttcctcactgtgaagggacgagagctccttttggggccaagccccgaattggactctcacttctgtttggccttctggcaccttctgtgtggactctcacccatcagttagggactttgtacctcctgtgtgtcagtgctgtgctaggccccggatgagccactgcccctgccgcaggaacagaaagcctgaggggggctctgagctctctgagctccccagggtggaggaggcaccttctctgagcccacccctcaccttcattgtgttcctcacaaggcaggtctcacccaccgcaccgggggctcctgggccacgtcatctctgaatccccattgggctggcaaacagtaggtgctcactaggcacctgataaagtgagttgaatgggactttgtgtaggccaggatggcacctggcttatcttgcagtctcgtgtcctccaaggcagggagaagaaagcccggagcccctggatttggacaggtctgcgacgggggcgccttgagctctgtttggctgggactcaccacagggggctgcattgggcctgtagtgctgggcagaggagcttggggctttcggcagggacgggtgtggttagatttgtgttttgacgggtcccttgccgcagggtggagaacggatgagccaggctgtctgggagcagagtgggcaggcagttggtggtgggcccaaggccgggcagcagctggggtcaggacaggggaagcggccggagtactgaaacctttaggatggccagttggactcagggggaagcacaggtttctaaatctgttagcccacgtggggatgccattaggtacagggaggacccctggggccaaacacactcctgggggccgatgctgaggttggccttggatgctgagtttgaggcacctgtggtccaggaggaacgccatccaagagagaacaatggcagggggtttggaataggacccccaaggatggagggggagagtgtgaccaatgctctcagaggataaaagaattcggagactgggtgcgatggctcatgcctggaatcccagtggaggccgaggagggtggttcacttgagatcaggagtttgagagcagcctggccaacatggcaaaatcccatctctactaaaaatacaaaaattagccaggcatggtggcatgcacctgtaatcccagctactcgggaggctgaagcaggagaatcgtttgaacccaggaggtagaggctgcactcagccgagatcgtgtcactgcactccagcctgggtgacagagtgagattctgtcaaaaaaaaattgggggccctggctggggcagggggactgactggctgactctgcagatccctgtggcccactccctggatgtaggggtgccaggcagaggccgttagtcacaagctgaaggccagcactgcaggttactcttcatcctacctccccagaaaggaacgaggtgcccacagtctatgagaacaccccccaagccacagctcacacaggcccagggttctggctctcccaggggaggctcaatgagccagggtggagagctgacccttagcaggctggtcctcgcctgggccactggggtgaagtcaggcagaggaaagggcatcctccacagctccgattgtctacccatggtgggcagagctgcccattccgggcagacggtgtcttgtcagattcaaggacaatgctgcgagctggcctagagctcaagatggcaagggagacaagccaggggctggaaccaaccaccttcccagccagcgccagtgcctgtagttaagcatgcagatgcgactccgatgtgtgatggccaggaaaggagacagtcaggcacaagctctgtggagtgtggctgtcagtccagaaggcctgactcaggcagtgaaggctgggagaggggaaggggccagcaggacgtgacaatgagaaagaaaaggctggggaagccggggtgcagtgagggagaagacaggaggagaggactggggggcagcttctgacccattctccccactccatattttcccagcctcggctttgaagttacttcaaatggtttgggagttaccgtcttagccttttatcccaggccctttgacatcctttttggagatgaacttaaataagaagctggccacccaaacctagcccagggagatcttggtgagtgggagacaggagattccggacaaagatcagctctgcctcagcgccaggtggttgagaagccacagccaactccacaaccacttttgggtggggccccatgctgccatgtttacagcagatgctgctctgtctctccccatttcccagaggaagaagccgagctccagaacactctatagcttgctccaggtctcagcagccgcagacctggcctgagaacatggccttacaagatgccctggccacgtgtggcccatcagctcttgctgccttgggcaggtgggcagatgaaggaccaaaggccaagctcaggctgggcaggtggcaaaggaacctagttaaacaaacagctgggactctaggaccagggctcaatcctgactctgggcctccaggagtgactttgctctgtgcctcagtggtcccgtcttcaaaatggagattgtgatgctgatctcctggggctgaggcaatgcagcaggtcacacatgtgcagcaggttacacacacacagtgggttgcactcacgcagcaagttacacacgcacagcacattacacacgcacagatcacacacacgcagcgggtcacacacaggttacacacagtaggttacactcacacagcaggtcatacacagcaggttacactcacacagcaagtcacattcacacagcacagggacagggcaggcatgtaacaagcacagagcaagtgctggctggatgttcaggatgggagcctggaatccaggggaactggcctaaggagcaggctccggggtcgaatcccaggactggccctggggtcctgggttacctggagcaagggacttgcactattcaggactagcaatagtgaccccacctcatgagcagggcaggatcagattctgttctgcgcaggttcaggccgagctggccacaccacgggggtgatgtgttgaatttagctccttcacccctaaggctggctccaggaggttcatcgaacaggtcagaaaaaggattaaagatgctggctgtggcctcctctggggcccaggagcctcccagcaagcaccagggcgggcgtgggtaccagggagaaacccaagtcagtggcaacgacacagtcaacctccagggtgcggagtgatggtgcacattcacagaacaaaaccctgccacgtgcacggcagaaagcaaggctccccaaggagcaggatgcacccacacgattgtggcgagcagtcagtactttaattcaggtcaggctccgacacctggggagacggggtcctgcccgccccaccctgaggtggaacccccagctgctcctgggcacagaatcatttacaaaaataaatatgaaaaaagcagcaactctttagtgatcatggaattaatctgacagcaattaaatgtgtttaagcatctggcatatctcctcaattgcaccaaaagaatttggaagcacttggtttggtctcaaaggcaaaaggaaaggacgaggaaggggccaggcctcccgccaggcccccgcccccctcacatttctgagtccgcatacatcccgttgattaagtagtccacctgggtgtagtccttcttcttgtagctctcataggcctgcagggcaaacaaaaccaagactgtgatgaaaagggtcaccccgagtaacagcaccaccagaaggagagttttgtctaccacggcctgggtgaggggctcagtggtgaccaccatgtactggccttgggtgctgggctggcacgagtccgtggctggcatcttagtgccccctgagctcctgggtgttggcccagtggaatcagtacctggtgtggcttcagtctctacctgctccggtgcctgggatgtgcctggcccagcggccctctgggtatatggcatggggcttggctgtgtcgtgggggacatggcctccatctcagggattgggctggtgtgaggtactggcactgggctggcagttggctccctggcttgtgccttggtggtggtcaccactgtgggggtgggggcgggctctggggttgtgtttgagggcatgggtgtggatttatttgttgtgttaaccacaggctggtccactgacacctggctaatgggaccttgtgcttggggacgcatagggggtacagggcttgccgcggtgtcactgggcatgtgcttggaaggacttggacgagtgctcatggggctgcttgtgtttgctgtggtcgctacagtctgagcacgtgtggccaatgtggccagggttgctgttcttggcaacgcgctgctctttggcacttgtgcgagggctgtgctgagagatggatgcccagtggcggtagtggacggggtccgccctgtggaagtggacgtgggcgcggggagtgcaagtgtcatgggagtgctggaggccgcagtcatactggaggctgcagtcgtgggagcaatggaggccacagttgtactggaggctgcagtcgtgggagcactggaggccacagtcatactggaggccgcagtcgtaatggaggccgcagtcgtactggaggccacagccgtgggagcaatggaggtcacaccatcagctgcacctcctgaagttgctggttcactcacatctgtcctgcttgtgtcctctgttgtgacttccatagagttgaggtgggctgccgaagtccctttggtcaatgtgacaggagaagctgctgccatggttacatcctcagacgttttattatcaactgtttccacagatgcattcctcttgactaatcccttccacattttgttagggacaaagttgccttaaagtcagaaaaaggagaaaaagagagacaatcatgttcaatcctgcacagggggattgctcagggatcggcttccacccaggcctgtggggccccctcctcagcccagccagagtcgggggaggtgatgtgcgaacatgcttcctccccatctctcttcccactgttggcatgcagctcattgaaaaagcccttgtcaatttgattttaaaactcctttgccctctatgaaccccctgcccattgaaggcttcagaccttcactatttgatccaattcccaaaacatcagagtaaaagtctcacacaacaggtgtgattcaccattaaaagcccactgaacgcacacccaggtttacaaagcagataaactgcacaggtattcacatcataaaagaacgcttggctttgtgaaaggattcactgcaggaattcttggaaatgaatggcacagagtgggaacgcagttaaagatctgatgtatgaaggaatcaattccccagtgaagattcaatttagagatgacatcaaatcttgcaggccaagcgagcaaacctttcagggctcagctgcctggtcctgctaggggctctttgcccaccatggccctggagaaggaaggttggcctgacaacccttccctgtgcggcacctgggagggctgcggttcctgacgcgttggc

SEQ ID NO: 5143 - DNA, 6000 bp, Homo sapiens
ttttttgagatggagtctagttctgtcgcccaggctggagggcagtggcgcaatctcggatcactgcaacctctgcctctctagttcaagagattcttctgcctcagcctcccaagtagctgggattacaggtgtgtgccaccacgcccagcaaatttttgtatttttagtagagatggggtttcaccatgttagccaggctagtctcaaactcctgacctcaggtgatccacccacctcggcctcccaaagtgctgggattacagacgtgagccaccgcaccgagcctcacataaagcatttctgctgcatattaaggtacaagaattgtctcaaagaaaagcactaaagcacttgtgcaattgagttgcaaactgtactggctgctttaataaacaccatttttacttgaaaaaacgactggcagaaaaactatgattattcagacttggatgtttggcagacaattttttgaaaatgaacaatgtgagactgtcacttcaacgaaaacaactgtcagtattggttgcctatgataaaatttgagctttcaaatgaaaattagaaaagatttgtctgatgagatgagtggtgatattaacaaatgtgggttcttaaacattatacagttcagaagatctgcacatggccaggtgcggtggcccacatctgtaattccagcactttgggaggctgggtcaggggtatcacttgagcccaggagttggagaccagcctgggcaacacagtgaaatcccgtctctatgaaaaactacaaaaattagcaagacacggtggcctgcacctgaagtctcagctacacgggaggctgaggtggcaggattacatgaccacgtgagcccaggaagttgaggccaaagtgagtcgtgaatgcaccactgcactccagtgtgaaacccggtctcaaaaaagatgctccacaataactcaataatatagactgaactgcctcccctcaaaattcataaattgaagccctattcctcaatgtgatagtatctggaaacacatcctttgggagataattaggtttagatgatttataattaggtttagattaggtcatgagggtggggctgccatgatggaatgagtgccttcaaaaagagacaccagagagcttgcctgtccactcgcacttattctttctctctcttctccctctccaatccaccatgtgaggaaacatcgagaagatggccatctagatgccagtaagagagccctaaccaaaaactaaccatgctggaacactgatcttggacttctttctagcctgcaacactgcgaaaaaataaatttttgttgtttaaaccacccagtctatggcattttggtatggcagccagagcagactaagatattcagtgaaccaatattttccaaatgaccaacgcataatgctacaaaaattatgcacgggtaaaagatctaacaaagtacgaacagaccaatggtttttcttggagaaataagcaaattaaaaaataataaagaaaaaaacagaccaatggattttaatgtaacagagcatgaaaagctcagtgatatggttcagactgtacaaggcaatgaaccttaacaaactaccaattgtcaagttttggtgtaacatgggcgtccaaccttttggtttccctgggctacactggaagaaaaattgacttgggcttcacataaaatacaccaacactaacgatagctgataagctgaaaaaaaaaaaaaaagaaaaaaaaagtgtgtataattttcatgatatccactacagataagcaaaaaagtcctcacattcaaagggctggacatgactggtgtagtatcaaagaggaatatccacaattatataaaaacattcctcctttcggctgggcacggtggctcacgcctgtaatcccaacactttgggaggccaaggtgggtggatcatgaggtcaggagttcaagaccagcctgggcaagatgctgaaaccctgtctctactaaaaatacaaaaattagctgggcgtggtggcgcacgcctgtagtcccagctatttgggaggctgaggcaggagaatcacttgaacccaggaggcggaggttgcagtgagccgagatcctgccattgcactccagcctgggcgacaagagtgaaactccgtctaaaaagaaaaagaaaattcctcctttgtgggactggattttctttatattccatgcaaaacaacaaactgcaacagactgaatactgaggcagatccaataagatactaaagagattgttttaaatgtaaaatattattctaattttttacatttagaataatatacttattttcattagaatatgctaacacagctgaaggcagtggctcatgcctgtaatcccagtactttgggaggctgaggcaggagaattgcttgagcctaggagttcaagaccagcctgggcaactgagcaagatcctgtctctacaaaaaaaattttaaaataaccaggcatggtggcacatgcctgtagtcccagctacttaggaggctgaggatggaggatcacttcagcctagtaggtcaaggctgcagtgagccatgactgtgccactgcaagcaaaagttctttggagttgtcaataaatatgaatgtgaagacaccaaaatgtttgagaaactgttgctacatagcaataagcaagaacacactacacctacatacaagaataaatgagtctcacaaatatattatatatgaaaagccagtcacacctatgaaacgtcataaacaggcaaaaataatctacattattagaagttgttggtttccttggaggaggagataatgttccctttcttgatccgaatgctggttatacattttgtgcatttttttctacatgttatacatacctcaatataatttatttttaatttatattttccatataaatatacacacatctgccttatgctcacctacagaagttttgttaacactggtcgagagtagaactgacacatatcttttttttttaaacagctcctcgggtgattctaaagagtagccagatactacctgtctaaataggttgaagactactgattaggctgggtgcaggctcacgcctgtaatcccagcactttgggaggccgaggcaggcagatcatctgaggtcaggggttcaagaccagcctggccaacatggtgaaatcccatctctaccaaaaatacaaacaattagccgggcatggtggcacgggcctgtggtcctagctactcaagaggctaaggtagaagaatcacttgaacctgggaggaagagtttgcagtgagcagagatcgtgccactgtactccaggccgggagacaaagcgagactctgtctcaaaaaaaaaaagaagactactgatttaacagcttaaaaccaggaagatttatatgcagtacaacaaaaagaacaatggctctggagcaaggcagatcaggtttttaaatacgagcttttcttctcttactagctatgtaaacaaatgcaaactagttaatcactatatgcctcagttgcttcagtttcttcttctgtaaaatgatcacaattccttatacgacacaaatatgaggattaaattctatctataaggaaaagaaagcacccagcatactgcctgccatagacactcaaatgttaggtaccttttgtctttccctgctaattccctacttgtcttatggcctaagacaaattaccctcttgaatctttttattcatttatttattgagatatagtcttgcccaagctagagagcagaggtatgatcatagctcactgtagcctcaaattcctgggctcaagtgatcctcccacctcagcctccaaaatagctatgaacagaggtgcacgccaccacatccagataatatttttgttttttgtagagactggatctcactatgttgatcagattggtcttgaactcctgggctcaagcgatcttcccaccttggcctcccaaaatcctgggattacaggtgtgagccactgcacccagctaccctcttagagtcttaatttcttcatccttaaaatgaaaataatgccacatgaccaacctaagaactatatataaaatggcgccattatatttgcataagtataaatagcatagctgttatctactgatagagacatttgctatcaactcaaaataaaagatagaggaagacacattagaaaactaaaatacttagaaaaattataaaacagaggctagaaaagaaatacaagttagcagaaatcgtcaagcttgagcgacatgatcagaaggcaaatcaagatcataatctcaagtagccaaggattgaagtttactgtgaaaaatatatcatctcagggttccttcaaaatgtctatatctaagaaaaagcacaacctatatcatcataaaataggcatattctgaaaggacccagacacctgcctaactggcaggaggaggaggtgtattggaactttataaactgaggttttctcagagtgtcttcatacagaaaataatggctcatttaataaaatgttaaacttttagataaacataatttgacaaaaaaattctataccattgttttcaatactaaagatatgcataactgtccaaggaagtaaatttaacaaaatagagaaagaaatatgaacttggtttagtctctttcctcttcaatattttacaactttgagttgatttctgttaacgtaccaggggtcggccagctatggcccgcccatggcctatttttgtatggcctgtgagttttacattcttaaaaccacataaaaggaggagaaagagaaggggagggagaagaaggaatggggagaagcaagaggaggggcttcaggaaggagaagaacggggagggagatggggagacaaaaaggaaggggagtggaagggaggagaaagaacaacagaggccatatgtggcacaaaatattttctacaaaaagcatttgccagccaggcatggtgccacatgcctgcatttgtaagcactttgggaggccgaggaaggaggatcacttgaccaggacaacatagcgagaccctgtctctaccaaaaaaaaaaaaaagtgttactgggtaataggactaaaaacaatacttatgcttctttttactttttgtaatttctagtttttatcatgagcacacattatttaatggtggaagaaataaagcttttttaaaagttaaaaaataagaataagaataaagcaagtcagaagaatatttatcctataattctatttataaaaagttgcaaaggtaaaaaatatactgtttagggatatgcacatatttggtaaaagtataaagaaaagcaaagaaatgattcacataaaatttaggaaactgtttatctctgagggagagagaagatgggagattcaatcaagtaggacctcacaagaggctttaaaggtactagaaatctcctttttgttaagctgggtagcaagtagaaaagccttcaatttgttattctttaagttgtgggtttatgttaaatatacttttatacatatgacatattttacaatttaaaaaaaggatataaatggggatgacaaattagaatttgggggctgtaacccagacttttccactgactgtgtaaccttaaacaagtcatttaacctctcagagcataatttttcttcttattttattaatgaggaagctaacagctaacatctgtttaggactttggcatttaaagaactgtttaaagttcctagactgtaaacatgcaaatatgcatgagatcataaaacaaaatcatacctcattaataaataccacaatactaagaactcattggtagggcacacaaggctattcaccattctagcctctgcctatctttctaacaataaaggcaacaactaatttttttaatgtgtactataaaacatattgtgtgaaatgctttccattgattatc

SEQ ID NO: 5144 - DNA, 6000 bp, Homo sapiens
gcatgtggctgtaatcccagctactcgggaggctgaggcaggagaattgcatgaaccgggacctgggaggtggaggttgcaatgagccaagatcgcgccactgcactccagcctgggcaacagagtgagactctgtctccaaacaaacaaacaaaaaaaccactgtgccccatatttgaagagtaaaactctagagcaaaatagacatcgttcctgactgcatagaggtcagagcatactatgggaagagatgtaagtaagtatgtggttatcaatctgatgcgagctgtaagaaaaacaaacaggatgttaggagagagactaatgtaagaatggacttgagatgggatgatcagggaaatataaatcaaaattgtaaatataaaaacaagaccagacatggcagctcatcctataatcccagcactttgggaggccaaggcgagatgattgcttgggcccaggagactaaggctgcagtgaactgggattatgccactgctctccagcctgggaggctacaagaccctgtctcaaaaacaaacaaacaaaaaataccttttttgggtcaaaagccctcctggtacttatttatatgcaccaaacaaatatttgctttaaaccctccaggaccctgaatgacgtctggttttgtttcctttccaagggggaaagtgaaggggggtttcctatggtgccactggctcactggctgaaggatcaagcccccttttacttctcagtgaggaaagctgcagcttcctaaaatcagattggttttcttactaaaaatatctatttctccatatgatgcaacataaacattgcctcgaaaataaaaatactcctcagagaccattaaaatgtatcatacatttcaaccgtgttatacaaatcagacaggcaaaacaattcatcgggccgacctagaatccactcagttcaacaaacttatgaagaacctcccagagctgccaggcactgttcgtggtgctggaatactggtcatgtccagggaacactagagggcgtatgagagcttctactttcaggaaaatcagtcgttgagtcagggaagaaaaccaaacagatgcataaggggaaaaaaagttaacagggtagaaaagtacagactaggaagcagaatgacccttcactgaatgggccttttgcgtaaggcctgagaagcaagccgagtgccattagagatgtgctgaccaggcattcctataaaggtggcacaaggtagaaacacaggtgtcacaacacacacattcggtttctactggttcccctaacatgcaggactcgggattcgctagctcagcaaccctatcaggtgaaacaggtattagcactacaacaaggaggctaaagctcagaaacaaattgctttcctaaactcaaagtgctactaagtggtaagggtgggtctaaaaccttcatctttaaactgcagtctggggtttactccagtgcttgagccacgtgtaccacctagaggtttatcaccagcaaatgatccccggatctaggtactgttttctttccccctttttttttttttttaagagacggagtcttgctctgtcgcccaggctggagtgcagtggagccatctctgctcactgcaacctccaactcccgggttcacaccattctcctgcctcaacctccggagtagctgggactacaggctaatttttgtatttttagtagagacggggtttcaccgtgttagccaagatgatctcaattcctgacctcgtgatccacccgcctcggcctcccaaagtgctgggattacaggcgtgagccaccgtacccggccggtactgttttctttagtgtgctattacaacagacaaactaagacagcttatagaaatgcaactggcattgtaggagtcatacaggcccccaatcaagctttggggggggggacactgataccctagtctctcaattctaaaacccaactgattaactatctcataatgacatttcaaaaaaaggaggtaaaactacatgaaacatgcagatgaactaaggtgattagagagatgtcaaaatatgattaaaataattattaggagaaaataggatggcagtgaagtgtaaaagatgaagcattaatacaattttggattggaagtgacctcagagtcgttttgtagacggagtctaggccctatcaatgacttatacaaacagtgatagagcagagaatggaataagaattgattcttattccatggtccttcaactattcctaaaattacacttctatacagcagtcatcatttgacatacggccctagaagatggcctggtgttcaagtctgtctcattcggagaccggctagccccaaatcaaccccatccagacacataatggatcaccccctgcatttacttaacatgcagtattgtagctaacagggtgatggagcggagggaggacacatggtccctatcgtcaaaagtgtgaggaagattcttaaccatcagagcgttctaaggctgacatagtcggggaactcctgaccacggagaaggattttgccaatggagagatttgccaatgtaaagctcatacatggtacacagaaacacgaaataatgggaccacggcgatttatctgaaaggatttgctctgtaagccatgggaagggcattcctgtggacagggagctgcttagatgccacacacacaaatctctttatcacacaacctggccacgaacccaggccctataaacccacaaactgataatcaggtaaaggaaaatcagattcaacctcctttttaaataacccaagagaaaaatcaccaacatcccccacccactaaattctctgctgaaagacacgcagacaccgggacacttccttcacacgcgtctctccctgtcagagtccgctaccctccatccacctccaccttccccactactgtcccctggcatttgctgcgagaataaaaagttcactgcatgagcagttcagggtgtttgggaaagcagatgaaaataaaggcgcgagagcacttggaaatgatcatggataaagaatcaagccctaccctactctcttattgaagaaatatctaccatattcccttcactctccagctcagtttttaaaatataattatgtttgtaaacaacattaaagtggatttattttgaaaaactaatacaaactattaagcttgacaacttggagattaataaattaacccattcattaagggtctatgagcacctactctgtacctgcccgtgggcggacgagataacaagagactcaaaaactcacgagtaaccaccccaacggctgtgtgtgtgaaggtttcaccaggaagcaacattctcacggggcctttctgaaggacaagagtgtacggggtggagaaaaggggtggaggaatgccgggcagggcacggccgacagggaccaggtatgggaagctattggagccagagcttgggagagggaccagaatgtcgaatgtttagagattacaaagtgaaaaatgggctggagttcccacacaagccgggattagagcgtttgtggactctaacctgggaatataaggcgctccaagagggacagggccacacctctggttcaaattgctaaaccttcagatacacaataaatctgtatttacagcaagcggcaatttatgtatttcaacatgcacacattatctgtaattatttcaggtaaaaatggtttcctcctcttttgaaaatacttctttttactactaattatcaatattataggcgtgttctcaatattaaagactaaaggaaaaaagttatagctggcaactgcttcctctaaagatcctacacagcaaagttcagacctgtatggccatcctcaactacactttatatcaaactggtttaaatcgaaaaaggtccacatcacaaagaaccacaatcaatcaaattaattcacctgccctctattctaaggaaaactccccccactccaggtaaatttcatttggcaaattcttaaaaattaacttcaaagaacacatgttcacctccccagtattccgaaagttccaccacttaataaatcgttaagttactgttccagacccgggtccaataaacccaaatagactgaatttctcagcacccaacttgtttctatcttaatccagcaagttgcatcgagttgtcattgttcctccttccaaggcggaggtgacaacggtgcacatcatccgcgaatacgtggaaggacagacacacaccaggggacgcagggagagcggataaagcacaaaggggacgcagcggccgcggggtcgccgggccacggccaggggcgccgtcggggaggagggtgggctgcaggacgagctcgggagggctccgaaatgcgctcgggccaaaacaaaaacaaaaagttcagcgcggcagtgggagcagattgggcgagacggttcacggctgcccattggagaaaagggaaaacagagtcccccaatcgcgagcggcggggctgctcccctcgtgcggccgcgggcccggccccgacgctgcccggcggccgctaccgctcccttccggccgcggccaccactgcaggccccgcgccggccccgcaccggcccggccgcagccccgccccccgcgcccggccgcttgcgcccggccccggccccacccgccctggccccggagccctgcgaccggcctgggcccgcggtcccccacgtccctgcccgccccgtcaccgaggccgccccccgcacaccctcgccggcgcccgcccctcccccgactcaccgcctgcgccgccccgctcctcctcggggcgcgtcccaggccccgctgcccggccgctgcgatgcggggccgcgccgccgggccccgcgtcccagtcccccccagaaaattaatcaccaaaaataattccagagaaaaatggagagtaaaatccaagatggcggcgcgggccgcagcaccgctcgctccctccgctgacgggaaaaatgagtccccgcagcgtccgagccccccgcccccaaccggccgccgccgccgccgtcgcgccccccgcgcccccggcctcggctcgctgcgcccccggcgcccgcccccgcgccccgccacccggggcctcacctcgcctcgcgcacggccgcccgtacgaaaaccgtccgccggcttcaggactccgcgtcccaggtccgtgcgccgcgcggtgccgcctccggttcccgggcgtcctcacctcatcgccccgctgccctgccgcccgcaccgccgccgcgtcgccgcccccggtgagccgcctggaccccgcccgggcacggtggaaggatacgaaaagaaggccgcggcctcgacggcggagggacaccgtgcggcgcagctgccacagtgtgcgcgcgcctcccgccaggcccagccgccgcggcgcttccacggggctctgtgcgggacgcgggcacgcgcggggagcgagttctgtgccgggcgctcccgacggcggagggacaaagggcgattcagagcgagccgtcgcctcccctcgtggcggagggattcgcggccggccggtaggcggctgggatccctccgccctcgctgccctttaaatcgcggctgaggcggcgtcgcccgcgccccgcgggcgccacgttagggtcccctgcggcccttacgcgaccgcattccggtcccggtccccgcgggaccgcggcagctgtcccgggccctgggtctttgcacacctgcccctaccagggacggctctagagccagcctctcggactgcagccctggggaaggggacccccccccctcccgccgcgcgtcccagttgctccgagggaggtggccccgggcagacgagcgtttttgttgtgggaatgggggtcactggcagcagatgcaccctaagaccgtgtgggcaggctgagcgttcctgcgcggagcatgcgagggaggaggagagcg

SEQ ID NO: 5145 - DNA, 6000 bp, Homo sapiens
aaggaagagcacggtgtgaagtcagctgtgggtggaggatgacccaggtgcccaggcaagagactgaaggcacaaactgtttcagtataataaagaaaatggaataagaacagtcatagagtcataacacaaattagatatagagatgatcacggacaattatcaatcgttattataaacattattaatcattagcttttaatattactctttgttccattactatataacctgggaataaccggcgggtatagggtcaggtgctgaagggacgttgtgagaagtgacctagaaggcaagaggtgagccctctgtcacgccaacataagggccgcttgagggctccttggtcaagcggtaacgccagtgcctgggaaggcacccgttacttagccgaccgtgaaagggagtctcctttccttggaggagtcagggaacactctgctccgccagcttcttgtgggaggctggatattctccaggcctggcctgcagtcatccggaggcctaaccccctccctgtggtgcttgaatgatcacactccttgtccactttcatgctcttcccgtactcctggttcctctttgaagttcgtagtagatagcggtagaagaaatagtgaaagtcttaaagtctttgattgttcttataagtgcatagaagaaaacgctgacgtatgctgccttctctctctgctcggctacctaagagggaaaggccccctgtcctatgatcacgtgacttgcttcaccttatcaattacttggacgactcaccgtccgtaccctgcccccttgtcttgtattcaataaatatcagcgcagccagccgttcggagccactagcggtctccatgtcttggtggtagtggtcccctgggcccagctgttttctctttatctgtttgtcttgtgtctttatttcttacgatctcttgtctctgcacacggggagaacacccgctaagcccccgtagggctggaccctacacaggaagtccccttcattgctgtgtggacgtggtagataaagtgttctcaagctggaaagatttaacagattggcccctcggggacctggacattgaatattttactgatggaagcagtttcgtactaaggggagtctgccgagctgggtatgccgcggtgactttggactcagcagtagaggtaccgtctctgtctgcagaaacttctgcttagaaagcagagctaatagctctgacaagagctctctggctaggaaaagagcagaaggcaagtatttacacagattccaaatatgcttctgccactttgcatgttcatgaggctgtttacaaagaataaaagacttttaacggctggaagtgaaaaaacaaagtataaggaggaaattccacctctgttaaacgctgtgtgggccctggaagaggtggcagtgatgcgctgcaggaggccccgaaaagcagcaaagcagaaaggcagacgaagaggcaaacgggctgcaacgacaactccaccttctagagaggaagccttagctatgcctcccgctcccggagattcccctcctggggatcccaaggtcccctccaaacgaaaagtcttggtttgcccacaagaataagaactacattgaagaaagatggtaaaaattttccaacgggaggctagccatacctggaatggtggccctcagatttgtaaaacagttccactggaaaaaaaacccaaaaaaccagcactaaagacgttattaaggcatcatttcttttttttttttttttgagacagagtctcgctctatcccccaggctggagtgctgtggcgtgatctcggctcactgcaagctccgcctcccaggttcacgccattctcctgcctcagcctcccatgtagctgggaccacaggtgcccgccaccacacccggctaattttttttgtatttttagtagagacggggtttcacgtgttagtctcgatctcccgaccttgtgatccgcccacctcggcctcccaaagtgctgggattacaggcgtgagccaccgcgcctggccctgttaaggcatcatttctatgtgccatggctcactgctattactcgagccatttgtaaacaaatggtgttaaattcgtgctcagaacaatgcatgacaagggcctactcggcccccaggagttcaggaaacaggagccaggcagccataccctgtgaaaaactgtggtacggacttcgaggaagtaccctgagaggggggttatcagtgcacgtgggtgttcatttgcaccttttcaggaggttgaggccttccccacccggacagagaaggcactagaagtaaccaaggtgttgttaagagacattattcccagatttggactgcctctaactctaagatcagacaatagcccaatatttatggctgaaatagttcaggacttaacttgattattaaaaataaagtggaaattacatacagcttacaggctgcagagctcaggtaaagtggaatgcatgaactggacactcaagcagctgctaaagaaattttgtcaagagctgggcgcggtggctcacgcctgtaatcccagccctttgggaggccgaggcgggcggatcatgaggtcaggagatcgagaccatcctggctaacacgtgaaaccccgtctctactacaaacacaaaaagtcagccgggtgtggtggcagacgcctgtagtcccagctactcaggaggctgaggcaggagaatggcgtgaacctgggaggcggagcttgcagtgagccgagatcgtgccactgcactccagcctgggcgacagagcaagactccgactcaaaaaaataaataaataaaataaataataacaataaaaggcctcagaggggaagggaatgaggcaggaaattaaataaaattaaaattaaaaagaaagagaaataggttttcctgtatcaggctgactcgtcccggaggcagcagcagacacagctgagacccaggaaaagtcctgataatattatctaatgtgctctgagactctcccagcactcccttaacacagggagaagaaaaaacaaattttcctttgtttttggaatgagtttatagattcctgttctctgtaactagtgacttcaagtattctgttttatctaagaagtacagtgaaggtcatgagacgcctgagcaggcctgaacgccagctgcctgggcaccatagtgaaggtaatgggataatccagctgcctgggcaccatagtgaaggtaatgggataatccagctgcctgggcaccacagtgagggttatgggataatccagctgcctgggcaccacactgaaggtaatgggataatccggctgcctgggcaccacagtgagggttatgggataatccagctgcctgggcaccatagtgaaggtaatgggataatccagctgcctgggcaccacagtgagggttatgggataatccagctgcctgggcaccacactgaaggtaatgggataatccggctgcctgggcaccacactgaaggtaatgggataatccggctgcctgggcaccacagtgagggttatgggataatccagctgcctgggcaccatagtgaaggtaatgggataatccagctgcctgggcaccacagtgagggttatgggataatccagctgcctgggcaccacactgaaggtaatgggataatccggctgcctgggcaccacactgaaggtaatgggataatccggctgcctgggcaccacagtgagggttatgggataatccagctgcctgggcaccatagtgaaggtaatgggataatccagctgcctgggcaccacactgaaggtaatgggataatccggctgcctgggcaccacactgaaggtaatgggataatccggctgcctgggcaccacagtgagggttatgggataatccagctgcctgggcaccatagtgaaggtaatgggataatccagctgcctgggcaccacagtgagggttatgggataatccagctgcctgggcaccacactgaaggtaatgggataatccggctgcctgggcaccacactgaaggtaatgggataatccggctgcctgggcaccacagtgagggttatgggataatccagctgcctgggcaccatagtgaaggtaatgggataatccggctgcctgggcaccacagtgagggttatgggataatccagctgcctgggcaccatagtgaaggtaatgggataatccagctgcctgggcaccatagtgaaggtaatgggataatccagctgcctgggcaccatagtgaaggtaatgggataatccagctgcctgggcaccatagtgaaggtaatgggataatccagctgcctgggcaccatagtgaaggtaatgggataatccagctgcctgggcaccatagtgaaggtaatgggataatccagctgcctgggcaccacagtgagggttatgggagacggggtttcaccgtgtcagccaggatggtctcgatctcctgacctcatgatcctcccacctcagcctcccaaagtgctgggattacaggcgtgagccgcggcgcccggcagaggtgagggctttgggggaacggttgtggggcctggagtgtggaggcgtcagcgcaggcctggcaggagccctgaaccgggacagtggggtcctgcagctgctggcctggggtgtggagacccccaacacaggggaagtctccaggaccccacaccactaacaagatgagccttgtgctcccttgggctctagagaggaagcccctcttagccctcagcccctctttcctccctctcctaaagtaatttgatcctcaggaatttgttccgccctcatctggccccggccaaatcccgatttgacaaatgccaggaaaaggaaactgttgagaaaccgaaactactggggaaagggagggctcactgagaaccatcccagtaacccgaccgccgctggtcttcgctggacaccatgaatcacactgtccaaaccttcttctctcctgtcaacagtggccagccccccaactatgagatgctcaaggaggagcacgaggtggctgtgctgggggcgccccacaaccctgctcccccgacgtccaccgtgatccacatccgcagcgagacctccgtgcccgaccatgtcgtctggtccctgttcaacaccctcttcatgaacccctgctgcctgggcttcatagcattcgcctactccgtgaaggtgcgtatggccccagggaatgctcagagggtgccgctgagcctggagctccacctgcccacatgctgcctggggtggggacttgtgtgtccctgtgactgtgagtttgtgtgcacctctgtcccgtgtgtgcccacgtcagtggctttgtctgtgtgatctgtgtgtgtgtgtggcttggggaatctgcccagtgcaggtttaggaggaggctccaggaggctggctggctggctcagagtctgtccccggctatccactagcccagagcagttctccctatagcccagtaagaaattacaccttcaccttccagactggcacccaggctctcccagaaagtgagaagggaactcacaggtgacttcaccccatggtggggagaacagcctgtgctgaggtcaaggcagaaggaggatgagccccgaggctcctggagagtctgagcccgggtgaggaaggggaggaggtggtccctgatctcagggcggggagagccaatgaggagacggagccatagcacgcggctctcagctgggggatcctggtcccctcaccatctcctctcccccagtctagggacaggaagatggttggcgacgtgaccggggcccaggcctatgcctccaccgccaagtgcctgaacatctgggccctgattctgggcatcctcatgaccattctgctcatcgtcatcccagtgctgatcttccaggcctatggatagatcaggaggcatcactgaggccagg

SEQ ID NO: 5146 - DNA, 6000 bp, Homo sapiens
ggccaagctggctaagacagaccagagccaccacggcgctgaatgcgacctatgcgtcccctaggacctcctcataggaacgtactcggcccacacccacccgcaccgcgacacttccaggaacacacagatctgctgtaaacatggcgggcgctcggccaagatggcggcctccgcgtgcggcgggtggcgggtggcgggtggccccgggtgccgtcccggggccgagagctgccttgcgcggggcgggccccgcacacctccgcggtctgtaacaagaaccggcggcccgagtccgccgaggccagggggacaagccggtgacctatgaggacgcacacgcgccgcacttcgtcgcccgccgtgagggccagaggtcgctcacgcggggaaccctggtggggaggaccatgcggcggagcgaacggtggaggatgctttccgtcgcaagttcatgtggggtgccttcccgggctgcctggctgacccgctggttttacagtgctgggccaaccggttggagatctgtgccctggtcccgaggcacttgcctgcccgcaagttctacttcctcgtgggctacagtgaaactttgctgtcccacttttacaaatgtcctctgccactccacctccaaactgtgccctcaaaggttgtgtataaggacctgtaggacgatccctttcttttgcatcaagctgtagcctgcagagaagggaaacgtgggaaagaagtggtacgccggggggaaaggcgtccctcaagaggactgaggcatggtctctcagctgctatccaataaagaccctctatgttgtcttgaaaaaaaaaatgcaaggcacctcagttctgagaaatcgtcaccttcttgcaagaatcttcatgatactcccccgcttggtgaaagaaaccctgaaagatggaacccccacccaaaccccttgcaagtgactctctcgagtctccgcccacacggccctttcttgagtgtgtacttttcacttctcttttttttctttctttcttttttttttgagagggagcctcgctctgtcgcccagactggagtgcagtggcgcgatctcatctcactgcaacttctgcctacccggttcaagtgattctcctgcctcagcctcccgattagctgggatcacaggcacgcaccaccgcgcccggctaatttttgcatttttagtagagacagggtttcgccatgttggccaggctgatctcgaactcctgacctcaggtgatacacccgcctcagcctcccaaagtgctgggattacaggcgcgagccaccgcgcctggccttcacttttcaacaaatctccctactttcactattttcggtctcgtccttgaattttcttcttgtgccaagagcctggacacccgtgggggtccaggtcccactggcaattggggacctccccaagcccactggtatcactgtgacctgtgaccacacccctttgagatgtcttgcctttcctggcagaagcaatgtacaccttactcgtgaggactaaactctgacttttttatcttgcccaagttcctatcaaaggggtctggggaatttacctacaaatggtaaattctcatcagatgagttttggttttcgtttgtttgttttgtttttgtattttcagtagagacaggtttcaccacgttggccaggctggtctcgaactcttgacctcaggtgatctgcctgccgcggcctcccaaagtgctgggattacaggcatgagccaccatgcccggccaaccagatgagttttatttaaccctatatatcgtgacttactttccaacctgactctggcataacattatgaaacaaggaagaaaatcaaaataccccaaaaacatgtttctttgccatattttgaaatggcccctgcatagctgttctttgtgggggaaaatttgcatctgtaaagaatctcagttaacatagccagatctttttcttccagaccctcccaatcctgaagagattaattaagatatgaataggaaatattggtcacctattgtctctaagggcagccactataagacttcaaaagaactttggtttccacaatctttattttttatttatttatttttttgagacggagtctctcgctttgtcacccaggctggagtgcaatggcacgatctgatcttggctcactgcaacctccgcctcccgggttcaagcgattctcctgcctcagcctcctgagtagctggaatttcaggcacccaccaccacgcctggctaatttttgtatttttagtagagatggggtttcaccatgttggtcagggtggtcacgaactcctgacctcatgattcacccgcctcggcctcccaaagtgctgagactacaggcgtgagccacctcgcctggcccttttttttttttttttttttttttttgagatggagttttgctcttgttgcccaggctggagtgcaatggcgcgatctcggttcaccgcaacctccgcctcctgggttcaagtgattctcatgcctcagcctcctgagtagctgggattacaggcatgcgccaccacgcctggctaattttgtatttttagtacagacggggcttctccatgttggtcacgctggtctcgaactcctgaccttgtgatctgcccgccttggcctcccaaagtgctgggattacaggcatgagccaccgcacccggccacaatcttgatcttaacctgaacactccttttctaccaatcccaagtctttagacaagctcaaccaattgtcaacaagaaaatgtttaaactcacctatagcctggaacaccgctgcccctccccccaccccccccacccccagctttgtgttgtcccgcctttctggaccaaaccaatgtatttcttaaatgtatttgattgatacctcatgtctccctaaaatgtataaaaccaagctgtgccctgagccccttgggtatatgttctcaggacctcctgagggccgcaccacaggccatggtcactcatatttggctcagaataaatctcttcaaatatttcgcagagttggactcttttcgttgacacttgtattgatctatgtctttgcctgcaacttctgtctccctacaatgtataaaaccaagctgtagcccagccacctttggcacgtttgctggaactctggaggctgtatcatgagccgtggtcagtcatattcggcgtaggacaaacctctttaaatactttacagagttagcttttttcatcctgaccaacatggtgaaaccccgtctcgactgcaaatacaaaaactagccgggcgtggtggcgggagcccgtagtgccagcggctcgggaggctgaggcaggagaatcgcttgaacccgggaggcggaggttgccgtgagccaaaatcacgccactgcactccagcctgggcgacagagtgagactctgtctcacaaaaaaaaaaaaaaaaacaaaaacaaaagaaaaaaagtcacccctctgctcactgaggtgaatgcatatatctggttgcctcctttggagaagcaagtcagaaactcaaaagaatgcaacctttgtctcttatctacctgcgaccgggaagcgcctccccacttcgagtcttccctgccttgctttgcattgtcctgcctttccagactgaaccaatgttcatcttacatatgttgactgatgtctcctgtgtccctagaatgtataaaaccaaactgtgctccgaccaccttgggtacagatcctcaggagctccagaggctgtcacaggcacatcctcaatcttggcaaaataatctaaattaaccgagacctgtctcagatatttggggttcacaggctcaagcacagcagcaaggaaccccccacccaaccatcccctgcaggtggcgagtgtgcgtcctggaggagggagggcagcttggtcctgggcactcaggagtgtggccgactgggagacggggaagctgagccttctggcccggtgcagttgccaccactgctccggggaaggcttggcagaggaggttgggagggaggatccagggtctattgttggcacgtgggtggaggtccacagagcaggagttgcgtgtgtgtgtccagagctggggaccaagccaatgtctttggggggaagtctgggctgaagacataaatgtgagtcgtcagcacacacaggcatctacagccagagacaagactggggcggaccttgagccctaaacaggaccactcaccacagacattctgggatcagggagggcagccgaggaggctgaggggagtgtccaccacaggagcccacaggctccctgcatcccgacaccagtgttaacagctgttgctggtccctgggggttcccctgccggctcctaacaggctgcaccccctggctttccccccatgtggttctctccttctctctcgcgccctcctccgacagccgccctccctgtcccccttgcagggatgcctgcgctcctagggcctggcgctggtgctctgagagtgttaggggcagagttgagttctgggaatgaaggggctgcagtttcagcagctctggttctgaggagggggctcctgtacatccctgaattatgaggcccatggccctgaggcgacacctccaactcttcttggcctggacggagggggctctggccagtggtctgcccactgcccacttggccagcagcctttgatgggggtggggggatgggtgggggtctctgccactgcccggccgtagccttccaagcggggggctcccagatgggatgtctgtcaggagggaccctgctgggtggtccaaggcagcctcggacaggggctccctggggtgggggctaaggggcgggccgcaccctcggcccgcaggctgtaatttgtgttatatatagcgttgaggggctgggccgggagggcgacagggctataagtgagcgggtgcccaccctcccagcaccagtctgagtgtggaagagacggcgctggaacccatggacacggcgtatccccgcgaggacacccgggcccccacgcccagcaaggccggtgcccacacagccctcacactgggggccccgcaccccccgcctcgagaccacttgatctggtcggtgttcagcaccctctacctgaatctgtgttgcctcggcttcctggcgctggcctactccatcaaggtgggcaggggccctaccgaggttgcgggggaggctccactactccatcaaggtggggggaagggggagggatggggagctccgtggggggtccttgccgtgctgggggccgcggggggctctgcttgtccgtgaggggctctgtgggcacagctatcagtatggccgggaaagagctcctcacgaaggcaaggccggggggcctcttcttaacggggtctggcccatccaagagcacagaggccattgggaggcacccacagaggtctctgcaatcaagagggggttcacatgctgtgggcttctggaacagaggtccctttgacttcagctcctggctggcagggtggggggtgtctcagcaccctgggggaccctcacccatagagagctctgataggctgacactggcctgggatggcccccgggtccatagctggggccccaaggagtatctcctcaggccacacccctccatccagattttgggtgcagtaggggccttccaggtgcccagggtgtgggtggggaagggcccccaggccccgaggacacatagagatctggccctgtggtctggtctctctgcaggcccgagatcagaaggtggttggtgacctggaagcggcccggcgttttggctccaaagccaagtgctacaacatcctggccgcgatgtggacgctggtgccgccactgctgctcctggggctggtggtgactggtgccctgcacctggcccggctggccaaggactctgccgccttcttcagcacca

SEQ ID NO: 5147 - DNA, 6000 bp, Homo sapiens
cgtggacgtctttgcggcccatcgctctgactacaaatacatcctccgttttcttatgggagaacgaggttctccctgcaagtctttcatgctccttggtagttttatagttttcttcatttaggccccacagatgccttgtgagtttcagtctcgttatggtataacttgtgctggtgtctgcgggtgaccgatactttctcatgccatgtttccccgcagctttgccgcacacggaaaagccagttctgctggatgctcgttttgtatccacttgagcactcgattgatttatccacccaggctttcagttgttttattttgattttccaggtacataatcatgttttctaaaagagtcatttttttctttgcaaatgtatactatttatacttcatatttctcttgcttatttgcaaggaattccagaaccgtgttaaataccagttgtcgtgagctacaataggaatgcttttgggatttcaccactgaccatgagcctgacttttggtttaagatagttcatgtatttctcatattatggaaagcaggtgattttaaacacaaaataacccatcgtgccgtttccacggggagaaaccgaggccactcgtaacagacactgtctggagcgtgtgttggagcctgtggccttgcctgtgtgtgtgtgtgtgcgcccacgtgcaggtgcggttcgtctgggagcctgtggcctcccctgtgtgggggtgtgtgtgtgtgtgcgcgcgcccacgtgtgggtgcggttcatctgggagcctgtggcctcccctgtgtgtgtgtgggtgtgtgtgcgcccacgtgcaggtgcggttcgtctgggagcctgtggcctcccctgtgtgggggtgtgtgtgtgtgtgcgcgcgcccacgtgtgggtgcggttcatctgggagcctgtggcctcccctgtgtgtgtgtgtgtgtgtgtgcgtgcccacgtgcgggtgcggttcatctgggtgtgagcacctgtgccccgctcacctgcagggcctgccccgcctgttctgtgtctttcctacccgcttctgtcctgctgcacccaccctgtcagaggcagggcgctgcccgcagtgccccagacttccccttcctccccaggatcaacggccaccccgggaagtccacgcgcctggcgggcttgtggaagctggaagaggtcagtcacccccaggcttcatgccctgtccctgagccactgctcccctgaccgtcccccaggacccctccctgatctcctcctgtctggccccgcagtgccacgccagcggctgcatgatggacctcttcgtgcagatggccatcatcatgggcctgaagcagacgctcagcaactgcgtcgagtacctggtcccgtgagtgccgacccccgcccagccccgggagccccaggcccctccgccccctgcgccctccctgccacgcagctctccccgcaggtgggtgacccacaagtgccgctctctgcgggcctccgagtccgggcacctgccccgggaccccgagctcagggactggcggcgcaactaccttctgaacccggtcaacaccttcagcctgttcgacgagttcatggagatgagtgcgtgggcgctgcggggcgggggttcgcggagacgaatgcggggcgggggtccgcggacatgagtgcggggcgccggtgagcctgacccccaccgcgcagtgatccagtacggcttcaccaccatcttcgtggccgccttcccgctggcgccgctgctcgcgctcttcagcaacctcgtggagatccgcctggacgccatcaagatggtctggttgcagcggcgcctggtgccgcgcaaggccaaggacatcggtcagaccgggcgggcgcaggatgggcgggaactgggcggcctcaggcctgtgggcttcccgctggccaggccggctcacctggaaaaaataatctctcggatctcaggccgcagacagcccccagcccttctccgacggcctcggatgcgggttgagcctgggtgggagggtaccaggagtgggcggggccgagcgctttgtaggctcctcccacaaaccgtcaggatctcagaggggcttgacgcccccaagggggacccaggttctgccagtggctggggctggaacagagcagccggcctctgtcccaagactggccacgctgagacggacaggcagcaggggagcgacgggagctggggcgctggatgtggggaaagggagagaggtgttagggaggcccccagtctcgggcccaggttacaaggtcttaccctggggtgggaacccaggaggtggagtggctggggggcacagctgagaagttcaggaagatggaggatgaggattcccaggttcctccctgtccatgtcagggtgaggggtgcaggagcgcagaggccatgctctgccatggctggggacttccttgtgaatactgcagccctagggctgcaaggggacaccacgcacagagacacggcaggccccgtgttggccgggggtgggggtgagggcagaaccagccgagggacgctgagtcagaccgcttgcccactgctctggtgcagggacctggctgcaggtgctggagaccatcggtgtgctggcggtcattgccaatgggatggtcattgccttcacatctgagttcatcccccgagtggtctacaagtaccgctatagcccatgcctgaaagaaggcaactctactgtcgagtaaggcctcagggtgtctggagacccctgggagaaactggccctaccacagccaagccctgggggatccagaccctttctcctgggaatggctggacctgttggtacccctggggctttagtgaggctggggcctgggggtggcccctgccctgcgcccactgacggcaggccctgggctggaggtcagggataactggccaggaccgcagttgggggtgaagttcccagacctggctgcctcctgagtaggccctgccagaacggctccctcccgatgtgaggttccgcatgtcctcttctgatttatccagctctctgacctcgaggagccaccaaactgcagactgggtccccagggccagtctctggcagggaaagtggctggtgatgcccagagtccccacagtccccacaaggcccccggatgtgaagatgtgcttggcccgggagccccgtcccactggacgcagtctgtggcgtggcccccacctcactgtttgctccacaacgcaggctagaagcactctggggcctgaaggggccgccctggaagcccaccccaccccacactcctctcccctctccccagctgcctcaagggctacgtcaaccacagcctgtccgtcttccacaccaaggacttccaggaccctgatgggattgagggctcagaaaacgtgactctgtgcaggtttggaactccccatcccccaagaatgccctctgaactcctgacccctgacctcaggtacttccttaccccagatacagggactaccgcaatccccccgattacaacttctccgagcagttctggttcctcctggccatccgcctggccttcgtcatcctctttgaggtgagccagaaccgggagaggcctcggagtgggtctgggcagtgctctccccagtccttctccccggccctgaacccccaaatgccagctggcacctgaccgtgctgggcctctcctgtgctgccgctagcacgtggccttgtgcatcaagctcatcgccgcctggttcgtgcccgacatccctcagtcggtgaagaacaaggttctggaggtgaagtaccagaggctgcgtgagaagatgtggcatggaaggcagaggctgggtggggtgggggcaggctctcggcccccaatgcctgcccatcccaccccagcatccatcttcagtgccaggagcacagacgtgtagggccagagcccgtccagaggccaccaggagctgagacagtgccaccaccagcacctcccacaagcccaccgctgtgcgtgttgaggggtgctgtgagaaggctgtgcccatgtggggccgcaggaatcccctgtatgttcagggctgtgagctgccaccctattccgcctgctccgtctttgtgggggctctcaggcttggcacagccctgacttgaactctgggtgaccctgggcacccacagaactgggagtgagggctcctcaggcagccacaaggcaggaaaactggcgcaaatttcctgggcctccctctgacttctgggcgccagatcctgccgtgcccccatcctggctgttgggggtgtcctgagcccacctcgctggcctgttcccttcagccaacccgtttctgcagtaaaattaagcctgtctgtcttgctttcctggcctcgctgggtcccgggtggattatatctgccctcagggctagatgggaaacagacccggagtgtggaacgtctggaaccaggtgaggccgcctcaggccgcctgtcccttctccagttttccatgggcttccaagggaggggcgcctatggggtcctctccccgtccctgcacctggggtgttgagggaggcaagagaagacatcggggccacttgagggtggggtgggggtcaaggcaggcttcctggaggaaagggaagagataggggcggacgcgcaaaaccttgagggcggtggacgctccgaagagtccccaaggctctggggctccggggctctgcgcgctggttgggctggtttggccactggccccaggcccgtgcggcagcggctcccgggcagcagcgcagcctccagcgccagccttgggcgcagagcgggacgctggggtccgcccccgccctgactgcggggcggggccgcacctgctgccgctgccggggctacgccgccgccggggctgttgccgctgcgcacctggctcaggtgagctgccccgcccccgcccggcgcgagccccaggtcctggcagcaggtgagtggcggtcgccatcagacccgcgaaggtgagtggaggtcgcagtcctcccagagccgctgcaggcctggagtcggggcccggggcgctgcttgtccctgggcgcggtctctcaggaaatggctcggggccggggaggttcccgcgtcgcccggaagcccgagctcgcccgcgtcctggccctttccagggctgggggaagggaggaaagtgggcgaagggggcgggggccaccctttcctctgcccgacgtggtcagcggctttttggtgaccctcgcgcagaacagagcggggctaggagcgccgaggcgcgcagggatcccacctcggtcgcccaagcctggatcccagctcgaggcttcctgaggcgccgagggcggaccaagagtcaggctggggcccgagctcgcccggcgccgggtggagcttccgccatccgcgcgcctctgccccggccgagcgccccgagccgcacccccgtgcccgcctcccgcgcgcgtcctcgttctccgccctcctcacttggagggcgcccagggcgcaggtgggcgcggggtaggggagcgaaccagagcccctcggcctgcggggccgcagccttttacccacgttcctgcttcaggacaggcgctgggggcccagcgcgcacggggagcggaggggcggcgcgtccgagctgagcgggagtcgcccgcagggtgctgggtgctgagcgtcgaacccaccgggcaggggcggccgcggaccgaggacgctggctgggtctgagggcgggaggagctggcgctttctaagaacctcaaggtgcccagcagagtgcggtgggcagtgcgaggcgaccagggccaggcttggactgagattctgggcgcctcggaagagctgtgcgggcgagggtcggagactttgtgggtgttcatgctcaccctggacggtggacctgggggctcgggggtgcaggacgttagcagagagagggaaggagagggtgcca

SEQ ID NO: 5148 - DNA, 6000 bp, Homo sapiens
tggcctcaaaccatcctcctgcctcaccgtctcaagtagccgagaccacaggcatgtaccaccatgcccagcttttaggattttattggtatgaaatacccagaacaggcagatccacagagacagaaagtaaattcattgttactcaggagctgaagggatgggggaaggggaggtaaatgctttatggatttgagattttccatctggggagtaaaaagttctggaactaaacagcggtgctggttgtataattccgtgaccgtactaagtatcacttcatactttaaaatggctaaaatggtaagtttcatgttatgcatgttttcccacaataaaaaaaaaaacaaaactcagcagtagagaacaatttaaaaacgggcaagagatgtgaagatacatttaacccacgacaacatgcaaatggaaacaagcacctggaaagaggttcggaatcacccgccactggggaaatgcaactaagaccacaaggaggtgttgccgcagagagaatggctgaaggttaaaaatagcgactgcagggatgttgacagtgtgcagagaaagtgaggccgggcgctgtggctcacgcctgtaatcccagtgctttggaaggccgaggcaggtggatcacttgaggtcaggagtttcagaccagcctgggcaacatggtgaaaccctgtctctactaaaaatataaaaattagccagtcatagtggcaggcacctgtaatcccagctacttggagggccgaggcacaagaactgcttgaaaccgggaggcggaggttgcagtgagctgagatggccccacggcactccagcctgggtgacagaacgagactccctctgaaaaagaaagaaaggaaggaaagaaaggaagaaaggaagaagaaaggaagaaaggaagaaaaagaaaaaaagaaagaaagaaagaaagaaagaaaaagaaagaaagaaagaaagaaagaaagaaagaaagaaagaaagaaagaaagaaagaaaagcaagcaagccagcaagccagccagccagccagccccacattgctggcggggctgtgaaatgatgcaaacgctggggaaaatattgtggctgatttaacagacggatacagtgcatgactcgcaaccacagcagaacatcaaagggcttgacggccatttctccgtccactccatgatgtataaatggctcacagacacttgagaacatgctccacatcgctggccattagggagatgccaatcaaaaccgcagcgagacaccacgtcgcacccaccggcatcgttagtacgcgacaaacaaaaagccacaaagtagcaagtgttggcgaggacaagaaccgtgtccctgctgcgctgctgggaagacagtttggcgtttcctcagaatatttaacacataattactctgtcacccagcaattccctcataactatacaccaagaacgcttgaaaacgggatcgggaagcgccgtttgcacacccacgttcacagcagcgttactcgccgtcgccccaaaggggaggcagcccaggtgtccatcaagatgcccacagatgagcggacgcggtcgatgcggtccctgcacacagcgggacacagttccccacaaaagggaaggagattcccacacaggccaggccgcggcggcgaaggcggaggatgctgcgctgagaatccagccggtctccaaaggacaaatcccgtgaggctccccctgcgcgcagtccctggaagcgctgaatccacagacagaaagtggacggggcgccggggctgaggaggggagggggcgtttgatggggacagagcttcattctgggaggacaggagagtctgagaacggattttgggaggacgggagcgtctgtgaacggattttgggaggacgggagcgtctgtgaacggattttgggaggacgggagcgtctgtgaacagattttgagaggacgggagagtctgagaacggattttgggaggacggaagagtctgagaatggatttttggaggacggaagagtctgagaacggattttgggaggacgggagcgtctgtgaacgattttgggaggacgggagcgtctgtgaacgattttgggaggacgggagcgtctgtgaacgattttgggaggacgggagcgtctgtgaacggattttgggaggacgggagcgtctgtgaacggattttgggaggacgggagcgtctgtgaacggattttgggaggacgggaaagtctgagaacggatggtggggatggatgcaccgaatgatcctgaatcgcgcacttcaaagcagataaaatggcaacaccggccccccaacagtcacgccacgctgaagctggagacgaactcgccccagcaaggtgctccaggggcctccggaactccggccgcagccccttccccggggccccccagtccccccccaaaccctcccccaagccctccggcccctccgcccccgcaggctccgaggcttcgcggtgcggttccctctgcgggtcccaggcccgcgctccgttcgccccccaggccgggacgtccccctcccccagccggccgaggggcgccagcgcggcggagggggcgggaggccgggccggggcgacagctgggggggcggccctgaccttcccgggatcgctgggcgcggccgggccgtcccctttccgggcgccgccataaaggggccttgcgggggcccggggccgtggccgcagcgctcagctcctgcgccccgaccccgccatggccccccggcccctcctgctgctgctgctgctcctcgggggctccgccgcgcgccccgcgccccccaggtgagccgcccgccaggcccgcccgccccccgggccccacccgcccccagtgcgccctgaccccgacccccgaccgcccgcagggcccggcgacactcagacgggacgttcaccagcgagctcagccgcctgcgggagggcgcgcggctccagcggctgctacagggcctggtggggaagcgcaggtgaggccgggtggggtggggggtcctggcgtggtgccccagcagcaacgcgcgaccccccagctccaggactaactctgttttggggcggggggcagcgagcaggacgcagagaacagcatggcctggaccaggctcagcgcgggtctgctctgcccgtcagggtccaacatgcccatcctgcaggcctggtgagcacccgccccaccgcagaccccactccagaccccaccccagacccctccttctgtcctggcctccccgggtcagcgctggtggccactggaggcccaattccagcagcggggccggggtctccagccccagccctcagaccctcacgtgctgtctctgcaggatgcccctggacgggacctggtctccctggctgccccctgggcctatggtttcagaaccagctggcgctgctgcagaaggaaccttgcggcccagatgaggaaggaaccccctcaccacctgcccggcccaggagcgcagctgcatttggggtggggggcaggatgggggagagggggaggggtggtacttggcaccaataaaggaggaatcagacccagacgctgggagttgtctgtgtccactcagtgtaatcgaggcaacccctgtgtagcggggctgagggatggatggaggcccatccacccaggagggactgaccacacccagctgccctttacacctgcaggcacggcggcccctcatccttatctctggcatcagggccacctcctgtacctcgactaagtactgcagggccccgccccaccccttgtcatccattaggaaacattctggggctcgggggatcccggacaccctctcagctcctgcccgggggcccatgtggtcagtgtttctgtaaggggtagtggggagggtgtgaaggggccaggggggctcaggcgggcaggaagaggggagggtggaggtgtcacctggggtgccaggaatccactctggcgtgaggactccggaccctctgtctcgtgtggcctcggaccagtggcttgacccctcagagcctgtggagcacggagcgtgcagggcttgaaggcgaccatgagggcaccgtgcagggttaggacactgagcccagccccagccatgagaggccagaagcttcggcgcacaggcctggaggaggagaactccacctacccctcacgacagccacttcctcgccccgaccctacccagtggcctctccctagagctgggggcttctggggggccaatgaaaagagcagggcaagtgtcgagtctcacctcaccccctctgtcgggcaccagggccccccaggaactcccagctgcccctcacagccccgccttagcctcagtcactaaggccctgtccagccccgccctgagaagccgacttgtctctggggcaggcaggggtgtccccaggacacagtgaggagagccttttccttcagaacctgctgtcaggcagggagggaggtgctccctggggaacacccgggttctgagcctcaaggggtggccttaggaactttgcctgagggagatcttaggggaggagccaagccagggcagcctgggctagggaggcaggttccagacaccccgacaccaagggccgagcccccgcccccagcccccagcttctctcccacaccctagccctgcccctgccctgcccctacccccacggcacccatgagccgctctccagtcccttctgccctgtgcctcggtgcctgtgacctgagccccctggttgacccctgcactcagtccaacttgggccaaacgactgcccctccttctggcagtgggctggaccagccggccagcgggagcccccttggcagaagccggtcgtaaaggatcataaactgggcggcgtctggctggggcgaaggtcgctgaggtaggaactgcgccagtcctagacgccagacccgctcagaccctcctgccaggtgacagccgccaagatggggtcttgggccctgctgtggcctcccctgctgttcaccgggctgctcgtccgacccccggggaccatggcccaggcccagtgtatgtgcgggcaggggtaggtggggcacgggcggcggggagccaggggctgggaggcactgatccctcctctgcaaccttacagactgctctgtgaacaaggacatctttgaagtagaggagaacacaaatgtcaccgagccgctggtggacatccacgtcccggagggccaggaggtgaccctcggagccttgtccaccccctttgcatttcggatccagggaaaccagctgtttctcaacgtgactcctgattacgaggtgtgggcggcaggcgggcgggatatgggggtcccgggagaagggcacctgcatcctcaggccacacctcccttgggggcctaggagttctatgcctgcgggcatccactgacacccatgcttggtggtgcctgccctagaaggctgggccatttcgggatgaagctgcctgggcccacaccctcagcactgaccactgatgatggggaccctgggccagcgcctgcccacttggcctcagtctccccacctgtggggcaggacggtgactgcagacctgtctacatccacaggagaagtcactgcttgaggctcagctgctgtgtcagagcggaggcacattggtgagtccccgccccgctctccccgccccacccggccacctctgctgggctctgccctgccggtccaggaccagtctttgatgacgtcagctagggtgtggtttcaaattccacccccccgagggtgatgcccacatttcctccagtccagactctgccctgagctgtggagtccccgtcactgaccccttgtccagcagacaccccatccagtgtgcccaagactcccacccactccctcaaccatccacaagggaggcacctttatcctgccagtcacggggaccaccttggttcccactcgccctcc

SEQ ID NO: 5149 - DNA, 6000 bp, Homo sapiens
gcctggcgtccacctctgcggctcctacctgggtgcaatcgagttaaatggctgataagcagatcaggtcagactccagtcctggctgcgtgcctcacccccaccctgacccatggtcaaggaagccggtcctgacacccctgtccacacagcctgccagccaagctcatcaatggcggcatcgccgggctgatcggtgtcacctgcgtgtttcccatcgacctggccaagaccaggctgcagaaccagcagaacggccagcgcgtgtacacgagcatgtgagtgtgccgggcggtcgcggggagtgggcccagcatgtggcagcaggagaggtgggggctctgctcctgtgccccccaccctgtttgacagaagggaaacgggaggcaggcgggcctaggggagatcccacgtgggtcaggactggggtcggggctgggctgaggacttggcctcttctatcagccctagacagtccagggaccctggcctccggctggccccagctggccctggctcaccctgtccccttggccacaggtccgactgcctcatcaagaccgtccgctccgagggctacttcggcatgtaccggggtgaggtttggctcggctgggctcgatatgggcaggcctgggtagcgcccgcgagtcgtggcagggagcggtgggggaggcagggcagggcggccagcctgggcctggtgtgtgagcgtggacgtgtttgtgggggctgtgcctgtgcaggggggactggatctctggtgagtggtagttctcagcctctcccgtggcagctccccacccccacttagtgcctggtgcgtgggatgccatggtacatctgtctcttctctggtggccacagctgcctctgccttctgggccaggctggaccccgtttgtggctggggatgggagggagtaaggggcattaccgcaaagcagcttaggacacaatccagagcctagatttggcagaagctctccagccctgagccttcggcactgagatgggggctctccacagcctcccccgagctctggcccagtccagaccacacactcctgtgacctctggccccagccccctgccagcacaagcaccatctgtcctccagggagggagaggtatcctagggaggcctcaggggctccggggcagtcctcatgccctgagcagcaagatgctgcccagaatcagagacagatggagctgcagtgggcatgggagagcctgagcctgaggtgctgccccatccctgcctggccccgccccacctggcacacaccaggcccaaatgtgggtgagagaacagatggtggccaggagtgactgggacagggttttgccagccaggaggcaagtcctggccaagcgcctccccactcaggccaccgagcatgtccccccagctgaccccctgccccacaggagctgctgtgaacttgaccctcgtcacccccgagaaggccatcaagctggcagccaacgacttcttccgacatcagctctctaaggacgggtgagggttctgcctggcagacactcgaggggtctttggcttcagataaaggatgggtccaccctgccagctgggtcccacctgggggctctgcctgtcttcagccccttgcttggggcttctttgacctcgtggggcaccctccctcctttcccctgaccaggggagcaaagcagatgtcaaatcagtggggctctggcttggtagcccttggcctgagggcactgaccagctcccccatcactggagggggactgcaagggcagcccctttttggggcacttgacccccaatttcccattttcctttgtcgcagacagccccactgccctccccaggcccctgcctgtggggccgtctgtccatcggtctcctccctgcctgctgctgcagtggcggaggctgggggctgtacccccacaggcctgcatctgcctccacggctcccaccatcctctgcgcccaggcatggtgggcagccccgagggtggcaggtagacctgtctcttcccacttactgcggccccgcccctaccacaggcagaagctgaccctgcttaaagagatgctggcgggctgtggggctggcacctgccaggtgatcgtgaccacgcccatggagatgctgaagatccagctgcaggatgcagggcgcattggtgagggcggggggagggggaggagagggcagaggtgcgggaagaggtgagggcgaggggagggtggggacgcagggagggccagagcgtgtcccctgcccagttcgcacagaagaggagacagcagcctctttgtccccagccgcccagaggaagatcctggctgcccagggccagctctcggcccaggggggtgcccagccctcagtggaggctccagctgcccctcggcccacggccacccagctgacccgcgacctgctgcggagccgtggcattgccggtctctacaagggactcggggccacgctgctcaggtaggaggcacagggcaggtggggggagggaagggggaggccggcctgcccaccccaccacctcctgtccccacggccacctccctccccacagggatgtccccttctctgtggtgtacttcccgctctttgccaacctgaaccagctgggccgcccggcgtccgaggagaagtcgcctttctacgtgtccttcctggccggctgtgtggctgggagtgccgccgctgtggccgtcaacccctgtgatggtcagtgcatgggatggcgcccggctggggatggggcgggactgagcccttggccaggctcacactgacccgagcgccccttgcagtggtgaagacgcggctccagtcacttcagcgaggcgtcaacgaggacacctactctgggatcctggactgtgccaggtggggaggtcccacggcgggtggggcctgggggcctgcgtaccgggctgaccctttcgtccttcctccacaggaagatcctgcggcacgagggcccctcggccttcctgaagggcgcctactgccgcgcgctggtcatcgcgccccttttcggcatcgcacaggtggtctacttcctgggcatcgcggagtccctgctggggctgctgcaggacccccaggcctgagcccagcacccgctccaccccagccagctgggcagggccggtgtggggctggagccaggcagctagcccaggacggagcaagggaagacccctccccagccctcccgtcggcaggggcagcagggggcagggtgcagggtccacataggtggtgcacacgcaagccccccggggtgctgcctgcaccgttgggatcaatgtctcatttatgtagaaaatgcagaaatctttacattcctcaagctagcccctgccccaatcctgccctggcctgaacacccccagggacagagctggtctctgggctgggggcccccgggcctgggccgggcaggctggaccatacccccagtccaccagctccagtctccacagccatcctggcccacacaggcaccccacacaaacctatttattgaatctgctggacccaagcggctctccagcccttccgtccttccccagccgctcttgtcgccttggcaggacttgactctgcctccctggccagccttgcaagaggactggggtctcctgccctctctgttgagccaggaatcccaagtgaggggttgccctgaggtctgactcttggggcaagcccgccacccactgtgggactttctggtgggctcctcagctcccaccccaggctggggcccagattgtgaggtctgtgtgcatgtgtgtgtgtatgtgtgtgtgcatgcgtgtgtgtgttgtggggatctggcctggcccttggggatggggctgctggggactgccccccttcccgccgtggccaggcgctctgtgtgctgtgtgtgccccaggctctgttgaccccgtccaggaactaacttacccagcttggtctctcctgagtcctccaccctggcctgggattggccagggagcagggcgggcattgggaccagtgtggagcctgagggtgcctgccctgctctggagggagggccaggagctgccacacccccaagtcctctcagggcccaccctcctttttcagcctctgcataaggcccctgggtacactgcagaagccccatccttcccgcctccgggcataaggcccctgaccacacttcagaagccccatcccccctgccaccgggcgatccctgctgtgagccgaagctctccctgccccgccctggccatgtgatcgtgttggtgacagaccctgatgtgctggtgctgtgtccccaaaaccggggccctccacagaggccccttcccagcgacactacctggggctcaggcctggacccccccagttcacggttgctcctgggagctgcccctcccgtcacatcagaaccttggaagctgctgctgctgcttacagaattatatttttttcttttgaagagttttaagaagttgtaactttttgtgtcttgtcatgtcagagaataaataaatattctaagtagatgctgctgtctgtctgggggtctgtttgggggcgggggagggcagtcccctcttcccataactggctcccttcagactgcagggctaggcctgcgcacccacccaccgacccctcacccaccgacccgtcacccaccgaccaaggggcaccctggcctagaggggatgctgagcgggacccgcctcctgcctctggcagtcccagatgggacttggaccccgcagttgctctctcggaccctaagtttctacccctggatctaaggcggagctgggtttgcggatcccacggttcccggcggggcggggcccggtcgcccctccccctccccgccctcctgcgccgggagcagtgcattgtgggaaactcccgagctctcctccgcgttcgcagccgccgtcatcccgcggaggagcgcgcagccccggggaggccggaggacgcgtaaggcggggggctcccggcgggcggggcgggcggggcgggcgcggcgtcctgcggggcgaggaggcggctccgggccttgaaggtcactgggtttgcgcgcgggccccccagttctccagggctcagttgatcccgggagagggaggcggcggccgggatgtaagtgccacaaatagcgaggttgggggggcagaccacctgctctttgcaaacttgatgcccagcagctgagccccccgagaactgcaggggtgaagggacggctgggcttccctgggaggtggcagcagctgggcctcttctggagacgccctcatcatgctgtgaccttcgggtgaccttcagtgtggtcaatgcacctggcggggggtggggaacgtgcctccctttctctgcaggtctggagggcatttctcatccttccctgggagaggcagacaggcggcctctggggctttggggcaagacccactcaggttcagggcggctgggcccccagggcccttcccacctctgcctcggtcattgagaatctgggcaccgcctttcccacagcccagaaccctgtcctccgccctgacccgcgggccaagtgcagcatgtgcccaccctgtttaacgccaggaaccctctgcccacagagacagcacagccttgggctgggcgaggactccctgctccagggctggaggcaggcacggcccatgctgaggagggggccccagaggctggggaggggcagacggcccttggaagcacagccccacgctgacttcctggagagacaccccagttttctcaagtctgggttcttgtgggcccacccaccctgatggctgcctgagatcccagctcctgcccctccccgccctcctccccctgggaccctggccaggtcacagcctccgtgctttagtgtccatctctgcaaagcaggaatgctctcctgaggaggggatgcagtcagctctcc

SEQ ID NO: 5150 - DNA, 6000 bp, Homo sapiens
aggcagccatggggcatacctggacctgtggccatagggtggagggggtctccggccaggaggcctcagctcgctgcccctcccatccccaggcctcagtctggaccgctcccgcctgcacctgttgtactgggcccctcctgcagccacctgggatgacatcacagctcaggtggtcctggagctcacccacctgtacgcacgcttccaggtcacacacttctcctggtcagtgccccccagctttctcagcccccctcccccagtctgtacagccctcctcacccccagctctcccaggtactggctctggtacaccaccaagaactgtgtgggaggcctggctcggaaggcctgggagcggctgcggctgcaccgtgtgaacctcatcgctctgcagcggcgccgggaccctgagcaggtcctgctgcagtgcctgccccgaaacaaggtgggggcacgggccggagggcagcagggtggtgaccagagggctggggtggggtgcagagctttgggtcctgagctgcacgggcttccccgcaggtggacgccacccttcggcggctgctggagcggtaccggggccccgagccctctgacacggtggagatgttcgagggcgaagagttctttgcggccttcgagcgcggcatcgacgtggatgctggtagggatgctggtggatgctccctgccctggagggggagccttaccgtcctccccgagccctccttgctcagcccacccctgtcccctagaccgccctgactgtgtggagggcagaatctgctttgtcttctactcgcacctgaagaatgtgaaggaggtatacgtgaccaccactctggaccgggaggctcaggctgtgcggggccaggtgggcgaggggagtgggtgaggggagaggccccccaggccgcttgggcagaggaccgaactccgaaccccattcgatgccccttcaggtgtccttctaccgtggcgcggtgcctgtgcgggtgcccgaggaggctgaggctgcccggcagaggaagggcgcagacgccctgtggatggccactctgcccatcaagctgccggtgggactgagggacagcagaggggcggggcaggaccgaggcccaggggtgaccagggtgacatggtggagttgggggtggagcccagggcttaatgcactttttccttccaacagagacttcgagggtccgaggggccacggcggggggctggcctctccttggcacccttgaatctgggagatgccgagaccggctttctgacgcagagcaacctgctgagtgtggctgggcgtctgggtctggactggccagccgtggccctgcacctgggggtgtcctaccgggaggtgcagcgcatccggcacgagttccggtgaggctcccactgcccgctggctgccagccccagggctgagccctggctgcctggagggcccacctgattctgacagaagtttcttccaggggaggtgggggaagggcaaacaccaggctggaaaggaaaggtctggccgcacctggccccaggagccgggaactcccccacactccgaggcagagtgtggtggggggtcctgggcaggtggacaggacccctctgtcgcccatcctctgcctgcagggatgatctggatgagcagatccgtcacatgctcttctcctgggctgagcgccaggctgggcagccaggggctgtggggctcctggtgcaggccctggagcagagtgaccggcaggacgtggctgaagaggtgcgcgcagtcttggagctcggccgccgcaagtaccaggacagcatccgacgcatgggcttggcccccaaggaccccgctctgcctggctcctcggctccacagcccccagagcctgcccaggcctaggccccacagacttttaggctggcccagatattccccagtggatgggcagagcccccaccttcaagtctctccagtgtgtggggacgggtccctgtgagcaacaaaactgcactgtttctttcacctcagagcttgatttatttgttggatggagaagccgttggagggcggagggtggtggggtagaggcctggcccctgcggggagggaggcctgtgtgcacaggtgccccacatcctggtcctgtcctctcccactgtgcctggggcctcctgtgggtcctcatcttcctgggagggaggagctgtgctacaaagtaacccacatgggctactttttttttttttttaaatggagtttctgtcacccaggctggagtgcagtggcatgatctcagctcactgcaacctctgcctcccaggttcaagcgattctgcgtcaccctctcaagtagctgggactagggcacttgccaccacgctggctaatttttgtatttttagtagacggggtttcaccatgttggccaggctggtctcgaactcctgaccttaagtgatccgcctgcctcggcctccaaaagtgctgggattgcaggtgtgagccactgcgcccagccccaagtggggtgctttggatacaaagtcgctgttcggcgggtggggttgtgcctccacttctccattgcgctggcccagcagttccacggatcacctgtgtctgccctggaggccacgcctcccccagggcaccctcatccaccggcgctctgccacctgcccgcgccccgcgggtccttgtgcctgcaggggcctgaggcccggaaaccaagaaaggaccttggggacgcgcggcccggcctctgcgcgcagaactgccaccctgcccgggggaacccacggccagggggcgggtgggcgcgtggctgtggcctggctgggcgcagtagcctcgacggccaggagggggagccgaagcccggaggaggccgagggcggagcgcgcgcggcgccgagcggacgcgcctccccgcctaggtgctggccgagcgcggggcgggcaggcgagcgcggcggcggcggcgagcgtggtgagtgtctgcccggcggctcccttctgctgcgcccatccgaacgcggccgggctgcgggggcgagaggtgctgcggcggccgagggaggtgacagctgcccgaacaacgtggcctggcgggcgggagggggggtcctggaccagcggatgctccgatccgcggctgctctggcgtgagacgccgtgctcggccccgacggttccgggcgcgctccccgcacatacgtgtccccgagggtgggtgtccggggcccgagcccaaggaagaaaggccgacccgtgtgggacgcacacgtgggagttcaccggacatctgtggacacgtgcgtggccggagtcgcggtggccaggcggaggacggagcggtcggctgagccccagcagtagggcaggggcctgagccggcctccgagcgcagagagcggcccccaacccgcttctcctttgtcctctggccgaggcatcgcgcagttggagtccccttccgggaccctccagccagcaggatagaaagcaccgccccaagaggacggggacagcgggagattgaatggggagccgccggccagactcggagcctcacccccattgcctttcttgggggtaggaggagcctggcggcttcttgggtggaggattttacccctgcagattcggaagcagcggtatcttcctgtggggtggtctctgctctcctgctgtctccctggcttgcctgtggcctcagttcacctgactatgaaggggggacagtgacggctcacagcccggggcccggctggggctgcagggtttctatagcaacatcagtgcagggggagggccctggccagctgtctcataaaccaggggtgggaactgccgagtgagggcagagaaaggcggggttggcgttcagagggaacccctgccggttcttccccaggcagagcccctcactgtcatcattctccacccagaagctcctctccgctgcactgggtgacgtgcgggcccaggcctgcctctccgccctgggatctctgggcctgcttctcttcttgggacgaatggccgctccccacctcggtcggcctgacttccaggattgcccctatcatgcaggtgtcctcatcccagactggagataggctcccaggaggaagggggttgctcagtccctggagggccagggtacacccctgggagggactagagtggagatgaagggcccagcgcagcccggagagctgtggccagtctgcacccgaagagtggggcggcaggggtggggggggctaggagggatcaggtagaagttcagaggtcagcttgtcaccaccactggctgaggcagggaaaggcaggtctgacggtgaagccctgagtgggacgggtggtggggcagagggctctgggcatgccagctcgtgtgccctctggacctgccaggtgagcagggcctgtgggtggcaacagtggcctctggcacccagctagctcttccctgtggacagcaggccttttttgtggcccagcatgaggcttccctgacatgcatctgcccctagcagacacacatcccacagacacgagtgggtgttagcccatctctgctccacagcaccggattccctgtccaggtacatacagggtaccctggcccggagaaagcctcattctcagagtaccagccctagacagatccaggccaggaaatgctatagggttcaacccacaggcagcagacaggaacacatgtgtgctgggggtgtggtggccacgcgctgaggtccctgtcggtgggtggcctcgctgtgccaggtcagcctgagtcagacccacccctgctcatctctcctctcaaggctgccggaagcctctgcttgcccaaagtgaaagagaaagtgcccccccacccaagcccgccccaccccgccccacggccaatccctgcggcccctcgcctcctcccccggcagcttccccttctgtgtgagtgctgggctggagtgtggaagagccatccagagtgagtgcctggggcagagtgagagcaggaccagcgggcaggtggcggagcgggggtcggtggtggatggcccagccctggaaagccgaggtgaaggttacgagtccctgaggatctgtgggtgtgagccagccgcgtggccctgggcaacggcgctgccggtgggtgaaacagctggcctctggggggcccagggaggggggaaaggcccccgaagctgggattttatggccatgaccctatgggaggcccctgaggctggctgtggctccccagccttgctgcttagtgggagaggcctgtcctctcctcctctgtagtggatgggggtgccagccacagggggcctcagaaggccagccatcccccacccccaaggcttccaggggtcccatcactggcttctgtgtgtccatgagtgaaactcctgggaggggtggaggggaggaaggggcgggcaaggggctggctgtggggggtgtgggcatcgtggggaggagctctgcaggccctaggtggagctgccatgggaggagagctatacctgggatagctgagcccaggtcggggggtcttagggcgcccgggaccccagcccctagctcgaagggggcaggtgccggctgctgctctctctgtgctgaaggatgtgggggatggtcaccacagctgtccaggtcgaggtgctccggtaggcaccctggccccggcccctggcactgcccccagaggtgcctggccctttaaaagccggagctggctggggtgcacgtgagccccgagcgtgagcggcgtgtgaggctggctgggaagacgctggcggtggggagggggggactgaaaggaagccaggtggtcccaggggtgagcatgggactgggtggcaggtgcctcccgctgctgcaccctcaggacgcagtgacggcttcagtctggggtggtgggtgaggggctgcgtgagagagggaggctgggggaggattactcttcg

SEQ ID NO: 5151 - DNA, 6000 bp, Homo sapiens
ctcctctcctttgatactaagatcatcggttatctcctgattccagaatctaatgaagacccctcaggctcatcttcctgcaatatttttactctgatgacaactctcattctagtggttgtttcttcccttgctttctatgataacacatcatatactcctttttttttttttttttgagatggagtctcactttgtcgcccaggctggagtttagtggcgcgatctcggttcactgcaacctccacctcctgggttcaagcgattcttctgcctcagcctcccgagcagctgggactataggcacacaccactgcgcccagctaacttttgtatttttagagacggggtttcaccatgttggcccaggctggtctcaaactcctgagctcatgatctgcccactttggcctcccaaagtgctgggattgcaggcgtgagccaccgcactggcccagatactactttcatttaagtcttaccttgttgcctgcttcttctcaatctcttttatgactcttcttttttttgcccatgtcttaaaggctgcctagatgctcttctcacttcatgctctctgtgggtggccacatccattctcatgattccacttaccacctgcaaaataactgctttgaaatatctaccctcagctcaactctcttctgagttccaaattttatactcaatcacctattagacatatttatttggatatctcacatacatcttcgactcttatatccaaaactcaactcaccatcttaccttttccccacaaacctgcttctctattgcttccccagcttcctaagtagcatcactaatgtacgacccaagaacatggaagccatcttagaatcctcccatgctacaccctttacttctagtagttttatccctgtaatttctctcttatcttactcctcttttctaatcctactatcactaccttaatttagaccctcattataagctggggaatagccaaaattatgttgatgacacgtaacctgtccatttcatttatcttattaaataaacccttcaatggctcctcagagcctggaccatttgcatgacatatattgtccatgatttggctccatttacctttcctgtttttgcttcccacactagcccatatgctcaacactccagccaagccagtttgtgcaggaccaccaccactgaagcctggatgccacccttcatggccagagctattttctttcatgctcttgtgatcttgaacatgtcagtttattctgcctgaaagtcctttctctaacttttccctctgctatgcttctaatccttcaaatccagttccattgtcatctctgtgacactatttgctgatgtcccagccctggtctggattaggaagccccctatatccacaaccccatgctctcctctattgtaccttctgttgtcagttgagaggtctgtcttcacagcttaccatgagttccttagtcatgtcttaatttttgtatcttaactataaagttgcacatagcaggcacctaaatgtatcttcaataaatgaaggaagcaagaaaataaatgaatttggattcttctatttgaaaaacttcctgaccccctaaaactcctatcccttacgccagttataggtctctctcctcccctgtagttaggcctccttaaagaataagctctactccaagtcttcagttcctcaccttccactcactccttagttactgagtgctaattagccttcatccttaccactccacctaccacattgtccccaaggtcaccagcctgccccctaggccccagccaaatccaatggatacttttcagtccttacctcactggcctcctctgtgtcattccaacctaatgacctctcctcacttcatggcttcttctgtggccattccctgggcttcagtggcaccactcacctccctttctttctcctccctgtctggccacatcctctcactttcctttgagggctcctcctcttctcaacctttacatgttggagcttctcagcatctgtcctagaccttcttttcttcctaatgtacatgctctccctctgtaatctcattcactcccttaccttcacttaccatctgtcacacttactatacaatacagcttactgtatacaaagcaacacaaattgggttgttgaggacatttcaggttaatgggtcttgcccaaacagtaatttttcatttttcccagtgagaagatccaaaaagcttttcaaccaacctagaaatgtaaacctttaaggatgaggatgaaacaatcaaaagtgtacttctatgagttaatggactttattggacatatatttaaattcatatatcatataaaaatatataactgataaatattgtcttttccattctcataaattatgaagcaattttatgcatactcaacacaagcagtgtctttctcatcattaggatcactttttcagccatcttacatgttttcccagaacagatgtccttctcttcagtttaagcgaagggcttgggagaggacacagcacagtttgaattcacagatgatgcagtccttggaaactttatcctaagtcacaagtttcctttgcatcacactagaacagttggttttttgcatgcaccctgcctgagtatattcatgacttcaaaacatcacttaatgtaatactttttaaaaattatatttctgttaactttttttactgaaatataacatctatatggaaaaggccacaagccatcataaatattcagctcaatgaactgtcagagtgaaacatccctcaggtccatataaccactcaggtcaagaaatagaacattttcggcagcccagaaacctcttccaagtactactgtattgctttttaaagcaatctttaaaaagcatattttgagacatccaacacatgcgattatgaggtcatactaccaggaatagttaccaaagctgtgttaaatttctttgactacaatacatccaaaatagcattgttgaggacatttcaggtcaatgggtcttagccaaacagtaaaaatagttagcatttattggacacttaccatatagtgccaggtatatagtgctttatatatattacataatttaatccttaggcccactttatagatgagaaaactgaggcagagacaagttaagtaactttcccagtgccacacagcttgtaaataggagagtctggaccccgagccagggagtctggctccagagtccacaagcttagtcaccataccatactgccctatccagtggtttgttgttcaaaataaagtaaatgagagcaaaccctgtaatatgagagaccttgtaaggactcaaatataaggttactccctctttcctgagggatgattttggaaaaacaaaaaagcaaaaacttcaccctatattcaagcttatacggcatttgcagatgactcccaaatatttatgtccatcccagaccgctcctctaagttgcagacctacctacccaaccagcacttcaaagtcagcagccccaagtcacagtcatcatctcctcatacgaaccccctgcagcctcctgctgctccttttgtggagcacagccagcctcaccaccatccatccacccagctgcccaagcgccgtggatatgatcaaggaccccagtctctccctcactcctcttccaaaatcacactcccttcttcttcagctgaaactgtgttccttctccacagaagttcctgatttctttgtgccatttgtacacatctcaagtccagaaaacctgtttttctcacagtctactcgcagtcctaaggaagaaggacaggagtcagaactcttcccagttcctttaagattgcttgctctttgtctctgtctgatttcccctctccccatattctctcccaagttggttttttgagccccttcccacttccctgcccggtttcctcctcacttaatttttctagggagtatatcgtgagtgggaccaccatccccaaagctcttctttccaatatctcccgatctctaccctcaaatttgggataaagagaaagtgggggaaagggagcctgggggtgaaggagagaaaagagacagaaatcatgggataatgaaaagtgactaacaggggagaaggccgaggttacgatggaagaaggggaagagacagcgggtagtgaaaagggcaggggtgagaaaagggaatgaggagaaggcgtgaggaaaaggggatgatgaggtgaggcgaaagacacagggagaaggggatggggagaaaggtggggagaagagacggggagaaagggataggaagaaaaggataaaaggagaggtggggaaggagaatctgatgtaaagaggctggagagagatcaagcagaaggggtaaggagaagagaaaggggagaagagctggggagaaaatgatggagatggggcgagaagaagaggatgggagaaaggcagaggggaatggagatgacggttgggaaaaagaaggggcgagagggagaccagggcactgagggagaagaggggaataggggatggaaagaagatggaagaggaggaggtgagcagcagggagcggcgagaaggggaagagacgagagggcgtagagaaccgaatgggaggagaggacgggagaagtgacggggagaagggaagggaaccgggacgggggcgcggcgcggcgctggggccggatccggagccggggcctggggccgggaagtggaggggcggagggaggccgggcgggcgccggggggaagggggggcggcggcgcggagcgcgggtgggggcgggggcgggggctccgcgggcggaggggcgggggctcgggttaccgcgcggagggcggggggaggggaggggagggggcgcggggccgcggcagcggagctcgcatcctcggcggggcggctgtgcaggaggcggcgcccgggcgtcagcggacggaccgatcgacggccaagggcgcgcggaccgacggcggctgcccggaggggatcgcgggcctcggagacagcgactgcggacgatgcgcggcctcaggccccgcgcgagcgggcgctgcccggggggctgaccgcggccggacggcgccccagcaccgggcgagggagcccgcgtcgcgcggaggtcagtgcccgcgcccgcccggcccgtctggccgcgcccgccctgcccgccggcctcccctgggctgcggcagcggcggcggagccgggggctttgttctgagccggagacaatgggggagggggggcctgggcctgcgggacccgggcgggcgtgaacgtgagcgtgggggcagggcctgggggtctttgtgtgcgtgtgtcatcgagtcggggagggtggcggcgggagcgtgcgccgggggtgtggggtgcgacagcgttgtgttccagtgcatcgtcggagtgtgtcagtgcgtgtcactgggaggttgtgtgtccctgggcgtctctctggctgtgtgtgcatgtgcgtgtcactctgagggtgtgagggtcagaatgaccgtgtgtcatggtgagcgagtccctgtgagggtgtgttgcccgctctgtgggagcccatgtgtcagaatgtggaggatgggtgtgtgacagagaccaactgagacagagacaaagaaactgagtggggagaagtacagagaagcagaggagaggcaggcacagcctgaagtggatggaggggggggtcacccagacgtgttctgagtgggagattggagcaactgggagtttgtgtctgggatacccagctcagaatcccgtgcaggggacagagcaaggtcaccgcaggcgtgggtcccacgtggagggggtggggagagggaggtctagaagcacaatgaactcagtgtggcgggctgggcccacagccacaaggtcataggccagaaaaatattgtcgcttatgtcaacttctcaaatacccatagggacacag

SEQ ID NO: 5152 - DNA, 6000 bp, Homo sapiens
tttgcctttggggatatatccagtaatgggattgctgggtcaaattgtagttctgttttcagttctttgagaaatctccaaactgctctccacagtggctgagctaatttacattcccaccaacagagtataagcgttctcttttatccacagcctcaccaacatctgttattttttgactttttaataatagccattctgattggtgcaagacggtatctcattgtggtttttatttgcattcctctgatgattagtgatgtggagcatttttccatatggcaaacactcattgaccaatgacttgggcaggacatcagttccctccagaggtactcagcaatgaaggaggcctcgttcctgcacaggaagagctgaatcttgtggggtggagtctcacagatgttcaaacagtgacaacagaggttcatcttgttttgtttttttttcctcagcaaacgcttgttgagagcctacccttgccaggccctattatcaagctggggatttacagacatgagacttgtgctcatggtttatttcaggggattagtagaaaatgagccaaaatccaggcagcacatgagcatgtgagggacacatttacagtgtttacgagttaggagaagagaggcgaatcactgccctttcaagattactgggagcccagaaaaatgccttttatcctgctccaagaatgaataaagagaatgtgcttgctatctgcctctctaataacacagagggaacaggcagagaaaatgagagggaagaatgaagggtagaaacaaactactaagaaaaccacaggaaaaggtgaggtgcctccggatttcaaagctacaagtaaaagcttttgacagagtccaagggggaaaacaatgtttgttcattcattcatacatacatgcaataagtatttattgagcatctaccaattgccagacactgttctagggatatagcagtagttaaaacagacaaagtaactcctatcctcatgaagcttacgatacggtttggctgtgtcctcatccgaatttcaacttgaattgtagttcccataatctccatatattgtgggagggacccagtgggaggtggttgaatcatgaatcatgagggcaattcccctcaggctgttgtgatagtgagtgagctcttacaagatctgatggttttataaggggcttttccccttttgctcagcacttctctttcctgctgccatgtgaagaaggatgtgttcacttcccctttcgccatgattttataagtttcctgaggcctccccagccaagctgaactgtgagtcaattaaatctttttcctctgtaaattagccagtctcgggtatgtccttatagcagcatgagaatggattaatacacttacattctatgtaacaaataagtaaaatatgttgtataggtaaaaaaatatatcatctggtgctatgtcttatggagacaaattaagcaaggaagggggacagagtgcgatggaaaggattattcctctcctaggtgaagaagtatttatggagtgtctatcatgtgtgctaaatgcacacataaggcagagatgaattcattcatttgttcattaaatatttattgcatgctttctttgtgacagtcagtgtgctaaaccctaggaaaacaaggtgtctgccataaaggaacttccagactagtgtgaaagtcagtcattcaataacgcactgttcaaatgcacaattacaaacgaaagtaaaagctatgaatagggccgtgtgtggtagctcacacctaaaatctcaggactttgggaggccaaggaggaaagatcccttgaggctaggagttccaggctgtactgtgcaatgatcatacttctgaatagccattgctctccaccctgggcaacaaagtgagacccttatctctacaaaaaatacaaaaattacccaggcatgatggcaacagtccttgctactcagaggctgaggctggaggctagcttgagccggggagttcaaggttgtagtgatctatgatcgtgccattgtactccagcctgggcaacagagtgagactgtctctgaaaaaagaaaaaaaaagctatgaatagaatagttaaacgaaaagaaaaactaaatttaacagagtttaattgagcaaaaatcaagttatgaatcaggcaaccctaagaaccagaataggttcagagcaactctggggctgccacgtggttgcataatacttatggacagaaacaggaaagtgatgtacagaaaacataagtgaggtacagaaacagcgggattggttacagctcatgatttgccttacctgaacacagtctgaacagttggctgcctataatgggctgaaacttccatgattgatacaagagtaggttacagttcactatgtacgaagaaacttttagggtgaaactaaaacattaaggaggcagctttaagttaaacttaacagattataatatgtacatgtacttaagttgggggatcacagcaggcatctccaagggagtgatatctgacctgagatctaaagaatgtataagaatgaaagacataaacacttgttgtaaactaccgtaactaaaacagtgtagtattgcgacaaggttgggcagctagataatgtaagagaaatgggaggccggagctagactcacacacctatgaaaactgatataggccaggggtagcaggtcagttgcaggtcagtggccagatgtgagcaattcaataaatgttactgaaaaacacacattagccacatggaaaaatgaaattgtatccctgcctcacatcctacacagaaatcaattccaagtggttgaaaaacttaaatgtgaaaggaaaatctttaaatcttgttggggaaaatatagaatatctttaagggcttgggtagaaatagacaagtcacaaaaatcactaaccataacggcaaaaaaattgaagattggtatatttggttatactgcaattcaaatttctattcatcagactacaccacaaaaaggtgggacagaaaagaaagaaagaaaaaagaaagaataagttacaaattacgagaaaacattactaattcatgtaactggcaaagaagggatatctaaaacatataaaacccctaaaaatcagtaagaaaaagacaacagaaaaatgagcaaaatttatgagcaggcatttttttttttctgaaaaggaaactccatgggaaataaatatatgaaaggtgctcaaacttattagcagttattaggtaatgcaaattggattcctgatacatcattttacacttatcgcattgtcaaaaattaaaatatctgcctataataaccaagcacctgcaggtaaatcaaaagtaaaggcatttgattaagtcaaagagagaaaattaagtttgtttattcattcacacagcaagaatttttgagcctgtggtggtgtgtgtcttggggagaagggttggtaaagtgttatgggttattgttttcaccctgattcttatgttgaagccctaagccccagtacctaaggatatgaccttatttgaaggtagagcctttacataggtaatcaagttaaaacaaggtcattaggatggaccctaattgaatatgactggtgtcttcataaaaggggaaatttggacacagggacacacacagagggatgaaaatgtggagacataggaagaagatgccccttctcctagcccctctcctacaaacctaggagaggcatggaacagatccttccctcacagccctcagaaggaacccactctgcccacaccttgattttggacttccagcccccagacctgcgagacaataaatttttgttgtttaagccgctcagtctgcggcactttgttacagcagccctagcagagtcaaacaggtggggatctgcttctgggcttctctgtttcacacaggtcctgaggcaagaatttgcctttgcctgtaatcaagggcgagccgggcagccaaggttccgaaacgcaccgtgaagaccctctaactgtgcctactattctgctcccctccgatcggcgcggggctcttgtccttcctctctccacccagcgaatgaatgaacgcaggagcgctcggagtacacgtcttcaactcggcgacgcccctgcttcggccccaccccgcaaacacccgccccggaccaggcccagggtaggcgcccatgaggtatgtcgaatgaatatattcgcgcgctctttgcagctgcctgaattcttccttccccagcatccccctccgcccggtcacccagacggccttctccagccttgccgagcttaagtaagctgaggggcgctcagtgtggcagctctgcgtgtgcagggaaggggccaggatgcagaggggcagcgcaggagcgaggacgccacggctcagcgccccgccagcctcatgatggagcgctgccctgggggcagggctgacccagagccagcggctcgtgagtgagagccccccgaccacggcccttctcggggagcgggccagccgccggggtcccagcctgcggggtccgcccgcgcttttgtcctcccgggcgtgcgtgtccgggtctcggccggttccccgtcggccaggcggagctgcggggcgacgccacgagtctgcgggcccgcggcggggagcggcccccggccaaccccagttcgacgacgtgttgggcgtctcactccgggtgggttccgcggcggggtgtatttatggagtattgaagaaatatctccgtcgggacggccggaaggaaagaggccagaggcgcggaggccggctagagccgggaacgaacgtccgaccgggaggttgggggccggagcgggaggcgtggggagaggtcgtgggcgggaccgcgaagggcggggagtggggcgggccggctcggattccggaaggctgagactccagtgacccggcgggaggagaggcaactttccctgtcgggcttgagttgggagaggagcagggcggccttgtagggtagggacagatgcggggaggctcccgagtctctggcagttgagtgcccaggcccccttcgccctgtccaggagactgttggggagtccccaggccctaagtcacggggcacctcttagagctacgcaccctagttctgtctttagggactgggcccctcattccggattgtgtgttaggggtgatgtcctcccccttcacctcaaggaagggacttccagtgtatgaacctttggctgtagccaggaggggcctagtgacctgagcaccccaggccatgtgtgctgcctgctccaggggcctgaaacatccttcctgtgtgacctgcagctgacccctccctaccctctggtccacgacaggctctcccagccgccttctgtgtcactactgttctctttgcctatttcctgcaggcagagctcagctcctgtgcctttggtgtggggagggtgttctgcgcctgagagctgccctgtccagggcgggcaagacctgaggtgctctgttcacattgtgtctgccaggacccgtccctgctcctgaccatcaccgtcactggggtcactgtgctcgtgttggtcctgaagagcatgaactccaggaggagagagccaatcaccttacaggaccctgaagccaagtacccgctgcccttgattgagaaagaggtaatgggtcagccctgtgggtggaaggcagtaagtggatgatggctgggatggcagggcatccagacagtcatctcatggcctccagttcactccccgccgccctgtgtgtgtgtgtgtgtgtgctggaatagcgccaaacggacctcctttcccaggcatctcagctgcccagcaaggcttctagaaagctgacagaacctgcctatgttttgttttatcagaaaatcagccacaacacccggaggttccgctttggactgccttcgccggaccatgtcttagggcttcc

SEQ ID NO: 5153 - DNA, 6000 bp, Homo sapiens
gctgtgcagtaggcttagagaaaaactagtccacagtgaaggaggatgatgggctcctagagagttgtctccaatttaaaaaataaactgattgatagactacttgatgtgtttcaatgttttgaaaggacagtttggaataaattgattatagacacttgaatgctaggtacttaagaaagttgcatggagaaagaggcaatagttaacttcaatcaaaataaaggaaatataatcatattatgctaactggatcaattacatacctttataatagtataatgaatagtactctacctatatagggtgatatagataaactgaaggatggaagatggagaaatacatgtgtgtattaccagtcttcagagtataaacacatatcttatttcctatagaaaaagtaaaataatggcccaaactgaaaaattaagaattagtagtataagcatgctatttagaaatacggagataaataccagaagaggtagctgggtgaatagagattatatctagggagtagaaactgagagtgtggagggctgggacagggtctgctgtttttcattataaacctagtgatactatttgatttttaatgtaatgataaaaataaaacaatatgattaatgtggtatttcatttatttgaaaatcttaggagggactgtattcattaagtttttttgttttgtttgtttgtttgttttgagacggagtttcgctattgttgcccaggctggagtgcaatggtgcaatctcagctcactgcaacctccgcctcctgggttcaaggattcttatgcctcagcctcctgagtagctgggattacaggcgcctgccaccacgcctggctaactttttctatttttagtagagatggggtttcaccatgttggtcaggctgttcttgaactcctgacctcaagtgatctgactgcctcagcctcccaaagtgctgggattataggcatgagccaccatgcgcccaggctggagtgcagtggcatgatctcgactcactacaacctccgcctcctgagttcaagcgattctggtgcctcagcttccggagtagctgggattacaggtgcctgccaccacgccctgctaatttttgtatttttagtagagatggggtttcaccatgttggccaggctgttcttgaactcctgacctcaagtgatctacctgccttggcctcccaaagtgctgggattacaggcgtgagccactgcacctgacctgttttcattaaatattctaaggtactgggaaatcaacaatattgatttagcacctctaaaaggaactaaaaattctccccactttggtactcacctgcactgtggtgttttatttcagggaacccagtaacatcagcagtggcaccagcagctctagaaacatattctgtccccataaattgttgttatcatggtgaacaccagcaagtgatgcacttaggtggctttacaggcagcagtaggctttacagtgggctgaaaaatcccactaaacagggctgagtaggagggagcatcctagtgggtgcacacaataaagaagagggctcataagacgtttccagagtatgctcagaaataactggaaggatgtgtgtgtccccagccataaccactggagccacaatacaaggaaatcaccaatgttgtgcataactccatttgttctcctggactggtgttgcctaggcaagtgctgggtagatcagaatggatggggtggaagaattaaggggcatccagagagctatttgatcactggaggggaaagggcatggggggatgcagacaggtggcaaaacctgggtccaagatatatttgtcccagatatataaattgtcacttttctccctccccttctgacttgcacacttacaaagaaggttcctcttccttttctaaccatcccccaccagggaatttttcaggccttacaaagaagggagaggacccaggccagttgggagggtacacgtggacctacatcactctttttgaggaagtgagtagggaaacctagttataaggaagcaaggaaaatagagggagagtgagtactaaggccagcgccgtctataaacagaacaattcccgtgtgacctgaaggtctaggaagacccgaggtgagaaatcttcactcccctgcctactatggtgcgccggatcccgccatttgcacatctttgggcatctcagcatcccctctcatggtcagaaagaaatcaaatgaggattcaagtaggtgcctgatacttttcttttagactaaccagaggagcctctcccattccccttttccctggtccccacaaacatcatattgttttaatctgtctccaggtataacaataataagacaaagtccttaccctcagagagctcacaatattttggtggaggtttgggtataaaggcaaatgtgaaaacataattttactataatggggtaaagttaagaaagagatctatgcaaacatagaaaggagtgcacttaagtcagtgaaggttttctggcttagaagaaccctgacctaaaggaaaagtaagagttacctagataagagcagggcagaacaagagaaactgatccctccacttctattgagtcacctgaaattatattcattttttggcagacatatacctcccccaaacattcggctctagttgtgccagttcttccttgtcagccctcttaccttggcctgaggcttcattgtctccagtcaggcgactatctcatagtcacactccactcacggcagccacattctgtattccagaacagcacttcctgacagcactataacattttctagcagccacatttaagaggtcaaaaaacaagtgaaatattttactaatatattttatttaacccaacatatctaaaatatttaaaccatatttttaaattactgaaatattttacattttaaaaatattgtctttgaaattaagtgtatattttatacagcacatttcaattcagtctagccacatttcaaatgctcaattgccacatgtagctagatagtggttatactatggagctctaaaattccgcccagactgagtgtgcttggtgtttctccattaaacagatgaggcccatcagtctgaggcacaactatgtattttctctaagtctctgtacccccaaggccttgaaaacaattcggaaggaagagaaggcctatgaggtttcagctacagcaggcactccctttagatgccaagcctagaaaaccctaaactgatgcctaacttgcagctgaatcacctttcagcaatcagattcagtgcctcaccaacacatttgatccagggagtctccagtttgtcctttgtccagtagaagacccactacaaagccttgataattcatcaaagtgacagcaccttcactgggcagtctggtgagaggacatctagccctgccaccctggttcctgttgggaacagtatcagatacgttgtgttagattcacatgaatctaagaatcacatgggcgaaaaatattgagagcattctgttaaaacatttccacaaattgggaaaagaccatctttaaaaatctgttggggccgggcgcggtggctcacgcctataatcccagcaatttgggaggccgaggcgggcggatcacaaggtcaggagatcgagaccatcctggctaacacagtgagaccctgtctgtactaaaaatacaaaaaaaaaaaaagaaaaagaaaaagaaaaaaaaaattagccgggcggcgtggtggcgggcgcctgtagtcccacctactagggaggctgaggcaggagaatggcgtcaacccgggaggcggaggttgcagtgagccgagatcgcgccactgcactccagcccgggggacagaacgagactccgtctcaaaaaaaacaaaaaaatctgtttacagaggtaaaaacacgggtattacatggagcataatttgaaatccattccctcatattcagccaagaactacaggcccagagaagggaagtgatttgccaaaggtcattcaacaaatccctaggggctgtgatgatccgtgtccttgccattacctcccttgtctccactaacaaaaatatttcaatgggagaatgtgccgatctaaggcactcctaaagtacttgctgagaatgacagccctggggagacaggtcggcagccctgaacaggcactgccttacccgggcgtagtgccccaattcgccacctcttggagtcctaggcggaggatactactggggcagttgtttcgccaattccacatctcccggagcctggcctggcccagcccagccccgtcgctgtgacccacttcctagctgcaggctggaccaaggggaggcacatggggagctccacagggaggccacgcccacgagggcagctcacagaattagaaagccgacggggtgctgtggtcaggaggcgcgtgggcggcaggttagtacttaaggtgcagagaccacccccaaccctttgactggcggtgggcatcccggaaaggcatggctcggccaattccagccccgtttccacgctcagcacccgccctgcctgtgcgcgaacggctccggcccgcacgggtcgccagaggcgactgtgtgacactcggagtttgctggggtctccgtgggcgggaggactttccagcgcaatggcgactccctaagccccgcagcttctgcgcccgggaaagatatccaagagatgcaaagctctactgggcccaggctgccaccccagaggcccccttccgtcccggggccggggctaggccaaggcgggcaccaggactgcccagcctcccggcccttcgcactggtaaccggttccggggcggatgctttttgcatctgacccggcgcgcccggtgacgccttcgcgtccagacggaagtgcgggcggaggatccccagccgggtcccaagcctgtgcctgagcctgagcctgagcctgagcccgagccgggagccggtcgcgggggctccgggctgtgggaccgctgggcccccagcgatggcgaccctgtggggaggccttcttcggcttggctccttgctcagcctgtcgtgcctggcgctttccgtgctgctgctggcgcagctgtcagacgccgccaaggtgagtcccgcccagcctcgctcctgacggaagctcctcccctaccaccggccttgcggaaactgggtctgccaacctgctccttggcccattcctgacagccatacgcctggcctcacagctccggcagacccccgccgccaccagccccgcccctcccgactgcccggcggcactctcgccctcagccccgacagcctggcaggcagcgccccacggtcgtccccagccccgacagtgcccacagtccggacagcagccccccaccgccttaacatttcccttcccagccccggctgcacgcatcttacacttgacaaccttttcacctccgagagcctttaactttccaccctaagctcttgacagcccacctgcgccctccgccagcctcacaggccccgcatgccccaagccagaatgataggaagcccccatctgacagagccttccctgtcaagggccgactcagctcagctcacccctgaacacttcccttcctgtggtgggaacttgcccctcctggcctacttccctcccaatagggcctacggagcatctctcacctgcttcatattctcacctaactccctccacgagtcccttggtgcctttcttgctttctctcttcctgataatttagtgggtaagggaagaaccaaactgcaagagaggtgaggttgtggcctccctggttcgatttcttgaccttctagttccctcatactgttctctggtgccccagctctccagacctgccctagctccatgcatacctgtgcttcctctttgatgagctagctcatcattgggggagaacagaag

SEQ ID NO: 5154 - DNA, 6000 bp, Homo sapiens
tgaaggcagcatgcttgttaagagtcatcaccactccctaatctcaagtacccagagacacaatacctctgcctaggaaaaccagatattgtccaaggtttctccccatgtgatagtctgaaatacggcctcatgggaagggaaagacctgatcgtcccccagcccgacacccgtaaagggtctgtgctgaggaggattagtaaaagaggaaggaacgcctctttgcagttgagataagaggaaggcttctgtctcctgctggtccctgggcaatggaatgtctcggtgtaaagccgattgtatattccatctactgagataggggaaaaccaccttagggctggagtcgggacatgctggcagcaatactgctccttaaggcattgaaatgtttatgtatatgcacatcaaaagcacagcacttttttctttagcttgtttatgatgcagagacatttgttcacgtgtttaccttctgaccttctctccactattatcctattatcctgccacacccgataatgatcaataaatactaagggaactcagaggctggtgccggcgtggatcctccacatgctgaacgccagtcccctgggcccctttttctttctctatacttggtctctgtgtctctttcttttccaagtctctcgttccacctaatgagaaatgcccacaggtgtggaggggcaacccaccccttcatgtgcaacttcagtaaagacattgtgcatgtaacccctcccaagtgctggcaggccactgcacatgtggacagcccatcccaagggaagaatcaggggagaaataaccctgggccaatgtataagaccccaagtaaaggtcaaaccgtgcacttgatctcttaagtcacctgttggtcctcttccaagtgtactttgcttctttttattccttctctaaagctttttaataaactttcactcctctaagacttgccttggtttctcactctgccttatgcccttcggtcgaattcttctgaggaagcaagaattgaggttgctacagacccgtacggatttgctgctgctaacatattagacatgattttaatgtttttgttttttcgaggcagggtctggctctgtcacccaggctacagtgcgatggcatgatcttggcccactgcaacctccacctcctgggctcaagccattctcccacctcagcctcctgagtaggtgggattgcaggcacctgccaccatgcccggcttttttgtattgtttgtagagacagggtttcaccatgttgcttaggctggtctcaaacccctgagcccaatcaatccgccctcctcagcctccgaaagtgctgggatcacaggcatgacccaccctgcctggacttaatgtttttctgtctgataatttgctttttcaatatttgtctggaggctggggcgtggtggctcacggctgtaatcccagcactgggaggccgaggtgggcagatcacctgaggtcgggagttcgagaccagcctgatcaacatggagaaacccccctctactaaaaatacaaaattagccgggcgtggtagcacatgtctgtaatcccagctacttgggaggctgaggcaggaaaatcgcttgaactgggaggcggaggtttccgcgagccaagatcatgccattgcactccagcgtggcaataagagtgaaactccatctcaaaaaaaaaaaaaattttgtctggaatgactatgtatatattcatgtaattaaagtaataaaagtttagagatagttcttctcatacataatcttatatctggtatcttctttttgtctccagtacactatgctaggtcaggccaggattattgcagtaatctcctaacttctctttctgctgttgatttggcacacttccataaggcggtcagaataagctttgaaaattcaaatcttttttttgagacggagtttcacacttgttgccctggctggagtgcaatggcacgatcccagctcactggaacctctacctccctggttcaagcgattctcctacctcagcctcccgggtagctgggattacaggcgcccgctgccacgcccagcttttttttttttttttttttttttttttttttttttgagatggagtcctgctctgtcacccaggctggagtgcagtgtcgcgatctcggctcagtgcaagctctgcctcctgggttcacaccattctcctgcctcagcctcctgagtagctgggattacaggcgcctgccaccacgcccggataattctttgtatttttagtagagacggggtttcaccatattagccaggatggtcttgatctccccacctcgtgatccgcccacctcggcctcccaaagtgctgggattacaggcgtgagccaccacacccggccacacccagctaattttttgtacttttagtagagacgggttttcaaactggtcttgaactcctgacctcaggtgatccaaccatctcagcctcccaaagtgctgggattacaggggtgagccaatgtgcccggccaaaaatacaaatcttactaagtccctctctggttaaatatctttgaggattaagttcaaacttttagcagtttgtgataaggtcctggtctcatatctttcgtagcatttctttccattctcccaccctttgcttgaagctttttttctaatataagcagtagcttctagcctttgcaaaagctattttctctgctttcaactttgttaattcctattcatcctctaaaaatcagttttaatcctgcttcctgggagactttacagccccactgtaatttagatattcctctcttctgctattgcaatctgcgcacccctcagtcactcttatcacactgcactgaggttgttcatcttttcctaattttttggaatttcctaagttttggagttggctttcccactgcgcactcagatgtcttaagcacatttaattttttcttctgtgtgttgataattcatattctttgcccatttttctgttgagttgtgctttccttactgatttgtagtaattcttatgtgtcaaatacttctcagtgtttgtttttagtttttgttgtacttcaatttttaatgtttgcatagtaaaatatataaaatgttttcttttttttttttttgacttgaactcccgacctcaaggtgatccgcccaccttggtctcccaaagtgctgaaattacaggtgtaagccatggcacctggcccataaatataatttcctaagattgaaaatttattcggctgggcaccatctcaaaaaaaaaaattattcaacaaattcattgaatggccacttaggtattggcactctgtcagctaccggggatacaatggtgatcaaaaagacaaagcccagctgggagccatagcatggagcctgtagtcccagctactcagagggctgatgcttgaggatcccttgagtccagaagttcagatccagcctggacaatatagtgagattcccatcacttaaaaaaacaaaaaacaaaaagacaaagcccctgccttaaagcttatattctaaaggtggaggcagacaataaacaagtaaacaaatagttcacagaattaattgcttttaatgactatgaaggaaataaaatgggagccagaagtaggcaaaggatgtgtacataaaacagttcaattgaatgggtttcccataatttacttaaccatttttatttagtgttggatttttatattgcttttagtttttcactgttatactaatacagaggaattatttatgtttattttcatggaataatttcctacaaatgtaattactgaatagaaacaatcaggattttttttttttttttttgggacggagtcttgctttgtggtctatgctggagtgcagcggtgcaatttctcaccgcaacctcagcctccggggttcaagcgattctcctgactcacactctcgagtagctgggattacaagccatcatgtccagctcatttttgtatttttagcagagacggggtctcatctcaccattttggccagtctggcctcacactcctggtctcaaatgatccgcccgccttggcctcccaaagtgttgggattacaggcttgagccaccgcgaccggcctctaagttgctttcaagaggtaaccacggtgagtaagctgaatgtgctctgaggggtagaagcagaaaaagttacctgtggaaaaggcatgtttccgcttagcttagggataagctaaatgtagagctgacttgggtttagtagtaaggggcagcagctaatgcaaaaccgttagctttgggaacaggacaacctggattctaagcccatttttgccatcctgtgatcttcacaggttgtacgtagccctctctgagccttagtttcctgaaattcaggtaggttttgctcaacctttgtatttcccaccatcttttagatcaagcactctctggcgcctccaaattgaagacagcagctgcggaattgatgtaatgggctgaatcagcctcagccgcgaaatgccgactaatcacaggcacctccggcggcctggacaaaaggtttgaagtccctgggaccgcacttccgggtaattaaggctacgctttagacgccagggccagcgagtcgcagccgggtgactcgagtgccgcgactgcgcatgctctcgccccagcgcccggcggccacctctttcccgcgggcgggccggggcggggcactgaagggggcggtccaggaccctgacttgtctcgcggttactgggccggcgcgagcacgcgaggctcgggggcggcacggggcggggtttagcctgtggtgggcgctgcgggtgtttgcaggaggttgcagtactcgctgggctgaggtcgtctcgggtgaggaggtcgcgccggaagtggctctagccgtggcgcttcggcgtagtaaggagcctgcaacagagttttgttgtttagggggcgcggcaccgcaccgctcccttcaccttgcagcagccatggcgaaaggcagagtcgccgaacgatcgcagttgggcgctcaccacacgacccccgtgggggacggggcagcggggacgcggggtctcgcggcgcctggcagcagagaccaccagaagggtgagtgggcccggggagcagagctgggggtggcccgaggcttctgtgtgtcgggtggggaaaaggacccccgctattctcggagagtcgcggggaaagaggggggcctgctggcgccgcggcgggagcagagaccgtgggggagttgggcttgggcgctcgcgcagcacaaggccggacgccgagtaggtgcgttgtaaatgctgtttgagtagaattcatttaaaagaagggatgacactggcttgttgacgctcaggtagattgtaaggttgatgataacgacgctaggcagagctggaaggagctgtactgtggcattcgctgcgttgtttttacagatgaagaaactgaggcccagtgtgggtatatgacttataaagtcataaagccagatcagtgaagtagtagttaggagcgaggacttaatacttccaggtggcagtacacctgggcttgagtccctgccctactgtttacttggaaccttggacttggtaactttcaaaaaaagctcagtgtctgaactgtgaaatggggataataataatatctacttaataggtggtgcgtgggttaaacgaaataattcacgtaaaagatttagagcaatgcttggatatgaagtgggggctaaataaatattagcaattacttagttacagctaaggtcactcattctaaagtttatttccccactacatcatcctgacatttctcacggctttatttttggtttttgttttctctttattcctactgcctctataattgcagaatctcacggctttaaatattgttttaaggaaaaaactgtacgtagaaactaaatactt

SEQ ID NO: 5155 - DNA, 6000 bp, Homo sapiens
tatacaggggctgaaaaagtgctcatgagtccatcttttctggaaagcaaagaccagcctgaagcagtgggagctgctgcccaagcggtagtgaactggagagaaacaggccctggattttcagtgaggatgtggatctgaagagtcccccaaatgcctctgaagtctgacatctctgcttagccctaggagtctggttccctgccttcagttgcagagtgatgtgtttgtgtcattgttgatgtcacctcctaaaaagaccttcactttctggctgccacaaagccatatgtgttgctccccatatacagcctgacagagtaaatggagaggaagtgctggatttgtgtatcactggctatcagttcctcatgttgttaagcctcacacaggtgtgctagcattgaactgtagagtgtcacatacctgagtttgaaaataaaagcacatttccaaacctctggcagcagccaaatgcctcctcattttatggagttgaattacagtcttaccccaacccagaattagatgcctttggatatattagtgcattccagaaccaagtcagaggtccccaacccttggtcgttatactatgggctacctcacaggggctggatcagttcctcctcttcccttccccattcctgatcctggtttcctgtatcttcctggtctatgatttttttaattaacacagtttgctgtgattgagtctgctgagtttttaaccaacctgatttccacagctgaactatttttgtctttcttacagctagctgcaggggaatgtggactttccaaatctagttccctaaaaataaactctcctgcccaatacttcacacctttttttactcccttctctgcctaccaaagccagaggattcagatgagaacactgagacccgagaaaatggcagaaccactagacggaagctgggtctttgaatgagcactcccagtattgaactgtgacatgaataagaaataagattttagtatattaagccacagagattccaggatgtttatagcagttagcctaccctaatgcatacatttgaaccagaaattgtgtactttaatagcaaaattccaaaatatgaggttctagcttaccagttacatggcaagaaacaaaactgctagaaagatggtaagatagtaaagtcttacctgtgataacttggaaagcatctcatggttagcctatttataagtggtggaaagaatcagcgttggggtatggaaacttctcttggctgcctttggcaaggtatggcaggagaaataattggctatgtgggagcaaaaatgaaaaagaatatagagtattcagaaatgtgaaagattgaagggtgagaaaacctgaccacttctaaatcccagacagactaaaaagagctttgagtgggagccaataaaatttctcagttgaacagatcgactcagccttatggcaaaggctagattaaggatgtggccctttgtgagttcaaatgaacttagtgtattcaccactaaatttgaggggtatggtgctgagaaacaggaaatacttcttgagaattatgactgggaaaggatttggggtatgattattggcacatggaagcagaaatctaactttgtgagggaatttacaaagaaacacaagccaggactaaaaacccctttcattgttcaggtgaggaaacagctttgaggaggaaagaaaatatatcagagagatacctgcaccctcatgtttattgcagcagtattcacaatcgccaagatatggtattaaaatgtgtccagcaacagatgagtggataaagaaaacatggtgtacatacacaacggaatagtattcagccgtaaaaaatgaaatcctggcattcacagcaacatagatggaaatggaggtcattatgtgaagtaaaataagccatgaacagaaagttaacaccacatgttctaattcatggaagctaacaaaagatctcatggaagtaaaaaacagaatagaggatactagtggctggaaagggaagagaggaggaaaagacagatttgttaaaggacataaaattaggaggaacaagttatagtgttttatggcactataggatgactatagataacaataacatattttcaaatagctggaagagaagatattgaacacccccaacacaaaggataaatgtttcagatgatggatatgctaattagcctgatctgatcactacatcttgtttgtatggaaacatcaaaatgtacatgtgtataattatgtattgattaaaaataaaatttttttaaaattaagaaaacttttgggatcttagcttatgccggcaggaagcagactgcaaaagctgtgctattcccaaggaaggcatactccctaatatccacttcaaatgtggacaagcaagattatatgcaaatgaatctcccagagggatgcaaagggccgcagaaaacagtggatgtggaagtttctctcagaaagcagatcagaatcaaatcaaggttaagtgactgtggaaggcagaatttctagaatagccctccaaagatgtcccaccctaatccctggagcctttgaataggagctccaggggtatggagctttgttgtgttacattagatggtacagttgaccttaagatagggaggttatccaggtgggcccatgagcccttaaaagcagacagctcgccgggcgcggtggctcacgcctgtaatcccagcatttgggaggctgaggcgggcggatcatgaggtcaggagatcgagaccatcctggctaacacagtgaaaccctgcctctaccaaaaatacaaaaaattagctgggtgtggtggcgggcgcctgtagtcccagatactcgggaggctgaggcaaggaatggcatgaacccaggaggcagagcttgcagtgagctgagatcacgccactgcactccagcctgggcaacagagtgagactctgtctcaaaaaaaaaaaaaaaaaaaaaaaaagtagagagctctgcttgagcccaggaggtagatgctgcagtgagtcacgatggcgccactgcgctccagccaacagagcaagaccgtgtctcttaaaagagcagagaactttctctggctaactgtagaagtgaaagagagactagaagtatgagaaggactcagtgtgtcattgctgctttgaaaatggaagggctctaggagaagagaatggtccctggctgacaccctgcaaggaaacagggacctcattcccacaacctcaaagaaatgaattctgccaacaacccaaatgtgcttcgaagtggattcttccccagagcctctgggtaagagcccagcccagccagcaccttaatgtcagtttcgtgagacccagggcagaggacccaactgagcccactcagacctctgacatatagaagctgttaaatgataaatgagtactgtttaagccgctaagtctatggtaatttgttggacagcaatagaaagctggcacagcgacctttctaaggcctcttcattggtattccagaaattctatggctggtgatcactgtgactctcattctcctccttgacacaaagccttgccttccctgattcattcttccccttcctgtcttccttcgttctttttgcaataagtgaacaaatgctagaaagctagctctctttcgggcatggtgttaggctttaagaataatcatgaagaggccaggactctgcctgtctgcctccctggtgctgtgatgatagagtcatgcatgtttctgagaaactggggcttgtgctcacccagatcatgaggtcggtattggagatgtgtaagggctgttaccctggtcttttagaagttccctgcatttgtttagagcagattctctttttgttattgatatttttcacacaaatatctaactttatgaccagtaccacttatataaaaaagaattcgttatccatatacttttcctataaaagacattcattttggaaaaatctcataaacctttgcccaagacattgcttacaagccagaactccataattaccatgaagcaaaaaccactgaaaatccggctggaaaaacatagaatacactctgctggtacacagcacagataaacctcatgttcatcgaacaacaaaggtggagtctgacttgaattctggcctaccagaatatgaaaggagttattaagagaaagttatttcataaaagacccctgtggtgattactattgtaaagttaaaaatccttggggaaagtgtaaaatgtttaattttgtaaattgccctcctacttgtgttatgtaaatgtgaatgtttatatgtgcctggtttctttgaaaaaggaatcacctgtagtggtgtagagatttcaaatgtgtaaaaggagactcaaaggaaggcagaaggttctagactcagtatttaagtggacatttactttcatgagcttcagcatcataccctgcagatcacaaggccgaacagctgggtggaaaaatcactgattgcgggaggaaaagaggcacaacctatgctcagtctcctttagggacagagatgtttctaggagtacataaacgatggactccacaggcagtaacagtgaatggtgtgagaactgagctgctgggggaggaggaacagcagggaatatgggaattgggagaacctttagcagttcacactgtgctatctgccttcctcatttgtgtgttttctgagtcagcattagctaaattttccagaaggccatccacaaagtacagcctgggcgttcaagggacgtcattcatttcccccagtgaccttgacaagtcagaagcttgaaagcagggaaatccggatgtctcggttatgaagtggagcagtgagtgtgagcctcaacatagttccagaactctccatccggactagttattgagcatctgcctctcatatcaccagtggccatctgaggtgtttccctggctctgaaggggtaggcacgatggccaggtgcttcagcctggtgttgcttctcacttccatctggaccacgaggctcctggtccaaggctctttgcgtgcagaaggtaggtttctcaccagatttccaaactgaagcaaggcttcagtcctaagcctcctaagctgttgactatggatttctgggaatgagggtgaccctcagtgtcaacagcaggtctaattggtggtactgctctgccaaaaatgtaccaccatattgtcaacttcaccaaaatgattgacatttacgtttgtatcatctggacttttacttttggttatggaatatttttaatgaggacattttgaaataaaacactgaagagaaaccatttgatttttactcttttttgtatgggtggtatttaaattttttgtagcaatgggatctcgctttgttgcccagcctggtcttgaactcctggcttcaagtgatcgtcctgcctcagcctaccaaagtactgggattgcaggcatgagccactgcatccagaagtaataatttttttttaagtatttcattgaagacgcaaaccatgattgtaaaaaatttaaagcaatcactaagcttgggaataatgggtaactttcactaaaattggcctgtttttatgttttttgggagtgttagcataattattttaattttgattttatcataccatgaatgaggtgcaatgttttaaaaaaatattcagtaaatagcaaattagctgaaaaaaatctgtaaaaatataagtttgaaaattaagccatcggctgtctactaaaggaatgacttaaagtgatcgctgggcttttgagatgcctaaatggaaacctcattttgcactgtaggcaaaaaaattgtaaccacaaatcactcattgcagctctgggcaaatgaaaatctgagcactttaataggaaaatgtgtgttcctatgctggaagatgacctgagatataaaatatgctagaaa

SEQ ID NO: 5156 - DNA, 6000 bp, Homo sapiens
attacattctgaagcaattgtatcaattaccaacagaatatgggagtagtacttatttcccacgttttctccaacacttggaaatttccctattaatttgtttttctcaatttgataggtgaactgtgatatctatggttttaaaatgtatttttattttttaacaagttttttcactcttttatatgttcattggttatttatacattctctacttgtctgttcatattcttgactcatttttccatttggatattcttgcccctctgttttagtggcttatatgaattctttatatattttggttttcaatctttggtctgttaactatcttgcaaatattttcctccgggtctaaagaagaaatttttacccagcagcattgtccagtgactgaatggaagtgaagctgttcagaagttgcataaccacttgctagggaggaatttggtacctcccttgactttttgtgccttctttctcatattaatagaatatctcagaaaagagcttatcctactgtattatggttgtttattttttggcctcatccattcaacagtgatctctttgagggcagggatgagggtctgtgagtcacctctgtattgccagtacccagctttgggtctagcacagagcaggcactcagaaaatatttagtggatgaatcaatggacagagggttagatgggtcttgttgctggattccggccagggtttgccctgtaactcagctaggagttgttttggatccttaaatagggtgacagaagaggagcaagaggaccctttgcccctagttagaggaaagtgccctctgggtggcttgtcttccctccattcatttgcatgttagatactctggtgctcagagacagcaataatgacaatagccaatacatgtagtgcctttagtgtgctttgtacacattaattcattgaattctcacaacttctccgtgaggtaagcagtatcagtattatctccatgtacagatgaataaactgaggcacagtgtggttaaggaattttcccaagatcatactgctaataaacggcagaactgagatatgaacccagctgtctggctccgtaatctgtgctcaagagagaacatgaaaaacactaggcctggtacaacgtaggcactaaacaaacgtttctctcttcatttaccatccctccccaagaagtgtgccttttttgttaatgatatctcagacctgtagcttggcaaaatccaatcttggccctacttttcctctgtagcttttgtctctgaaccatacatccatccttgctggaagtgccaacaatccctgttctcctaggaacctggcaaccccaattcccatgcagccagcacagggattgaggctttccatgatccaggcctgtttttatcctttagcacccccaaatcctgacactctggccccaaggctttgcatggtgctgccatctggaaggtacagatgaccactgacaaccctctctgaagagtgaatggccattggccaagactggttcactgttcgtctttaaacctcaggtcagggtaccctatgcagaatgtaatcagttggtggctgaattccattagtgactggccttctctaactctagtatcaaaggtattttgaatgaaggcttagtgttgggggagtcacagtgtggtggtacttatgcgtaggaagtcctattcagctcgccctcagtcacatcaagagaagagctgcctacccaatgtaaaagatgggtgaaatccagaggctgtagtagataagctttatcaagaatcttcagccccattgtatatgcctcaaggcactcactctcctcttgtggcaggagttaaaggagaccctagattctaactctcaggataagtttgaagaactacgttgtactggagtctctgctaggcctgcttacacctattatctgattaactcctcacaatgatccccagcaggaggcaggatttatttaaagtaaaggagaggaaacacttaggagttagataaatgaccgaacttgggaatcagaaacatccttacaatccaaggatgatttttagcagcttcctgagctcagaaaagaggcccgtattgacacaatgaaactcagactggatctacctatctggagcaaaatgggcagaggctaggacaactggtcatttacacaaaacctcaggagcacaaccattacttgtaggattggatgtatggtaactgaattcaggactaaaggtatgaattgctacccaggtattgtttacgagggagcttgcaaagagacttttttctgacctgtgactgcaaaatctttgtgagcaaagcctttatgccccctcccacttcctttgtttgcaaccaagggattaggggtcttgagtggaaaagttgaaggtactgggggtgaccagtaccttgaagaaaccagcctttcattttgaatattttatcaacctatgcagatcattgtactactgatggtgaagacagacattatgaatagaaagccaatgtgctggagcccagctagcgacgatgagatgagccccttggtgctcatagctttagttcctgttagcttccattaggggagagagggctgatactggtaggtagagaaaccaagtattgctaaacagcaggatggaggtcacggagctgagctctggcctggaaagggagtgaccatatctggaaggaaactcacatgatcctaaccactcactatgtgtcctgcactaattaaagccctttctggaacattctctcagttaattttcacagcctgtcctcagtaaggtattgtctacctacatttgatacatgggagaaattgagccctactgactttttgaaatgtgtccaggctctcataactaatacatggtggatctgggattagaaccctggagtctgcctgcacctccagagaaaattctttgaacaggtcaactcaaacctgtgacttttcagagaggagaacctgttcagcattcttcttttgttgtattcatcccctctacagttacacattatcttagaggatcagctgtacaaaatttaagatcacacaattcactttgttttcttcttgaccctcatttttttaaacttgggatttaatttttttccattaagaatgtgaaaagaatgagtattgccttctctttctagtcctgtggtggtttaggaagatcccaagaagggctgaacttccagggctcctcctgggagagggggcagaacagaaggaaagattacaccttagcctgtactcaagggcattgcttgtaagtctgtccaaccagaagaaagttcagatcctttatttgtgagctggattatacctctggaagagaaaaaagggagagacaagttttactccctcctggaggcagatttctctaccttgattttttcagaaattgtgtacattctctcctctcatgtatgtatctcctacataccatacacacgattcttctcccccttctataccccagcccacgccaacccacacccactgttctctcttccagctatggatcaagggaaatcttcccgggtccctagttggtatctgttttcatagcatctttggggaggttttgtaaacaaagcattggtagaagggcccttggctgatggggccataaagtgccctttctttggttttgtgctctccctctcttgtggggccagtcatttgaatccagaagatatcccaggatggagctgccctgagtatttctgtggctggttggaaggctggcacacaacaaagtgggcatgcagcaggctgcctccctggcttaggccaaaaaaataaagcaactcagagatggagaagaggcaggaaatctatgttgtaaaaagtctttgtttaaaggaattccgttcaggtgctgagaacggggtgttcagcagaagaggataatatgagtaaacattggcagtaagaacaaacacagcagtatcactgtctgcgtctggcctcctcctgtgctcagtcacaggtctctcccaccgccctctatgatagcaatcataaacaacatgtagaagggctttacagttcacagacctcagttcccctcagcggcacttccttgcagggtttctttatgcactggatgaccctggttccacataaatgaaaactgggcttaaaggacacatccatgtcctgggagctgtacagacttaaagaaaaacctagataggggcaaaaattggggcaggcggtgggggtggggggtggggggtggggggggggaagaagtggtcgagagagtcatctaataggtcaccaatgttgcttctgggaggttgccggagggttggctcctttcagccaggtttagggccaggtctggacacactcaggaggccggtggctgaagggcagagggcagggtggaggcccaagtgaggccaaggaaggagtggatgccgctggggctggcacttccttggcttctcagcgtcctggcaaccaagaaaagattccaggagtcgactggtggcaccaatgcgagaagccccgggcggatgaaagaagctgacccgtgcgaaccccccaccccctccacaaaaccaggagattcctgcccaagagcaagagatggaattcccctaacggaggaagctgccgacctaagggctgggactggcagcgcgccctctccgggagcttcaggtctggggcagcctgtgcaggcgcgggtggaggcccgggcgcgtccctgggggcgggagccaggggcggccagcaggtggggcctgggagctggactccgccccccgctccctccccgttggtccgctgccgctcagcaccggcccctctcccgagccggagcgcgattggtggcagcgcttgtcgctcggagggggccgggccgctctgcttcgcggctctccccgccgccgctgccgctgccgctgttctcctagcagcgcgggccggtcggaccgccaaggcagccggcgctggcgatgggaagcggcgtggccgccgacacaggcagtggcaaagtttcccagacgtacacatctggacgcgcggctgccggctacccgtgacccctctaggaagggttcagggatttttaatttggaaaaaaatccacctggtttcctttgtcaaggtctctccgggtggccagcggcaggagctgcaaacttgggcacggcggctacaccggcagcggaccgggctttggagaacctcgggactcaggtgctgaggtgcccagcggctccggacgtgctacggggtgcgagcgcgggggagttcggggcgcacgacaaggaagggcccccgggagctctatatggaggaaggagcccagaatggtgtgcaccaggaagaccaaaactttggtgtccacttgcgtgatcctgagcggcatgactaacatcatctgcctgctctacgtgggctgggtcaccaactacatcgccagcgtgtatgtgcgggggcaggagccggcgcccgacaagaagctggaggaagacaaaggggacactctgaagattattgagcggctggaccacctggagaatgtcatcaagcagcacattcaaggtacgggcgccccggaaacttgggtcgcccatgaggcccgggagtgccccgcgcggcgcggggtgcgctggggctggtgcgcatcaactcagccacggcggggctctggggccgcagatgcgtggtagtcgtggggcctgcgtgtgagctcctgcctgcgttcgggaccttctgtctgcggccgtgcgctcttccccggggcacacgtgtgtgcgcagggctgcacgagcggatgtgtgcagctagctggcggtatgggggcgcgctgcgcacgtgtccaaatgtgcgtgtgactctgggctggttgctcgcgggctctcgggatcgcacacaagtccggctcagagtgtgtgtgcatgtgaatgtctgtgtgtgtacaagaggga

SEQ ID NO: 5157 - DNA, 6000 bp, Homo sapiens
cagactacaattactgacctccaagactgatcacatttcctatgttatgcacacttgtagaactgtttctttacttcagaaaacaaaaatgtttggcatcttgaaaacatagtaatgtttgaaaatataaataataaatttacttgtgattatttgactggtgttggcatcccccaatagaatgtaaaccccaggaacacagggaccatggctgattttgctcaccattatattcccagcatctaatctagtaggtgcccaatacatttgtggtgaatgactgaaagaacacatggcaagtccagagcccagaattctggttctactggtgctatcttgtgtgacttggatagaacactaaacttcctctgactctctgttactgcatttggaagagggtcttcaacaagatcatgaagtgttcatgcatttctatttttttgaaacacaaggaaaggaatacaagatatcatgacagaagatggcccagtgggtagctggatgggaggaagtggcaaggattggttggctgagtatccctaggaaatggcaggaataactcctgcttctgagaaatgtgatttctctaagttgatctagcctttggaaaaattgtgaagggaaagaagtttctctgtaaaacttcctttccccttctgcatcctcttctgaaacccccacacccaccaccatcatcatcatcaccatgccaccacctccaataaatccatgtcatcatgtccctcattcggccttgcctgtaaatgtgggattaaattcattcatgtataagcgtttttagaacttcctattgctgtactctcctgccaccaggttttgcattttccaacttagcctgttatagggaatgttcaattagtatcatttaatttgtaaagactgaacttcaggcagtggggtgaggaggactttttaaagtggtcacagggagactttcataaggttcctaatctcacccagaagtgctactggtctgccagccccacctcagtgcctggctcctaagagcacaatgaaaatccaagtgcacgaattcagtttctacacatcattttgtaatcaaagtcttcatttgggtaccctacctcccagcatgaggactaggataaggcaagtgagaaattcaccttgggaacagaatttaagagggctccaagaagatcaaaagcaagataacactttaatgcaacagtttaaaatcaaaattgaggcaaaaacccattacgaacaagacatcaaatttttaataaggcaggatcactattattgacttttttcttttagctcagcctccagtatggctcagcttggcacttcctttggctctcacttccttcaattctgatgaaacacactgagaatgcacataatggaacatgcaaaggaggcacatttgcgctgattgcatcactctgtgtggggagctctctgggacaactcccacggcccaggccagggctgcagccattcaagaacagaaagggaccccaggagaatctcacttgatactgcccctcaggatgagccctggagcttgggttcagttcccaaaggcccagaaagaggctctgattctggcacagcattgctgttctctgttagaaccattactgttctgcacatagaaatggcaaagccctatacagtgtgttcacccattccaccccgagtactgaagatgagatctcagccatgaaacagtgaaatacttaacttcctgctgccctaaaccttcctgtcatgataaaagccatagacaaacattattgattgttttctatcactcaaagagcaaatgcaagaagggggaataagggagggatttctccttattgagctgagggaacatgataaactgttacagggaaggctctatgtcctgaaagacttatagttattcctgagaataccccacctattatctctcaaggggagctgtggtggggtggggtggggaacatttcatcagtgctgtcagtcagaaatggctgcctcggggtaactcagctctcctctgctatgtagccagggaaagaatgccaaagaaggaatgctccttaatttaagtgaattggaggatatttttgtaatgaaaattaatcctttctgaaaataaatgatggcagggggcccactcctgaaccaagtacctgtactgtataacagctgtggccagaccaaaaactgtaagcctcctggtgttgcaaaggcagggttgatctcaggcatcccataggtgatattcctcagctcctggtgcctcagcagcattgcctcccacccacagtcccaatatccatcctgtgtcatctccactggcctttggtaagaaactagagaccaaatttagtaatgatctctcacaattattttttcattttattagattattgattaataagaattttaaggtatctcttaataggcatttgtaataggcagtaggtagatattctgtggctgcagatactgtgacacatacctgtgggggtaacttcagcccctggggatagtcacaagccagttaaacagaaaaactcaaagacctgactaacttgctgacttccgcagtgtccttgcgtgggagatggagagaaattggaaacactctcagaggacaaggtttgcttagtatatgaagcctttgcccttgatatttcctctgtttggaatattttcccccatatctgcctcaaatttctcttctatagtaggcagaataatgctcccctcccccaataggtccacatactaatccctagaactgtgaatatgttaggtttcatggcaagaagaattaaggttgcagatggaattaaagggctaatcagctgatctttgagttgggattatccaggtgggcccaatataatcacaacgatccttataagtggaagaaggaagtagaagagagataatcagagagacagcgatgttggaaggattcaaactgacattaatggccttgaagaggaaggaatggggacgaaagccaaggaatgtgggcagcctctagaagctgaaaaagacaaggaaatagaatctctcctacagtctctagaaagaatgaagccccactaacacctctctgtcagccctggaagactcattttggacttctcacctcaagaattgtaagaaaataaatttgtgtggttttaagccatcagattggtggtaatttattacaacagtagtaggaaacaaatacacttctttagcagttgatctcagctccaatgtcatcttcctaataagactttccttgacagcccttgcctgctaaagtatctccccaaccaccaggcgttttctataacgcactttttgtttgcttctgattattgaaaattattgtatttccatgtcattgctcttccctctcataagaatgtaagttatagaaaggactttgttgctcttattcacctatgtatctccattgcttaggacatgggaacatagtagacattcaataaatatttgttgtgtgaatgagtcgtaagctaatgaggaccataaaactcatgccactgctaaatcacaattagagggcagctgttagaagagtcccaaacccagtaagtcctgtattgcaaggaactgcccaatagaaaacaggaataaaaacaattagcaagaataatatgaaatcagttgcttaattccaggcagtggaggcagaaatcttgaatagtaaatactctccgtgaacaagtgcagacaagagtcccgtgattgccaataagtaatcagtttggaaagaccagagaggggtcaaatataggtaaactgagttaatcacataaactgctcaatcatcacaattattaaaagatcacacacaaaaatacattaacaggagaaaaatagtaaaacaggacaaaacagtaaaattactttcttttactactgatgggtcaattttctactggaaattctgaaaagtatcaggttcagctaaagactgcagtgttgatcatctctccagttttcctagtgtgaaatgaaataagcagacctggtacttaaaaagacactttaagaaaggtctggccccagagaggcaggatccgcctagcccagtgagtgaggccgtcctgacacctcgtcaatgcccttgtgtcaacattctagaaaacggactcctggctcattgctccgcctagagccgcgccacctccaaagggtagcaccggccacccgctccgcaaagtccactctcagccgcgcaaaactagaaggtagttgtcccgaaggggcctgagcgctcactcagtcagccaatggccacggagctagggcgggacctgagggtatcctgccaatgggagtatggcagggctggagggagtgcctgggtctcagggctgctgtggagttcgcacctccagctcgggccgatgtggaagctttggagagctgaagagggcgcggcggcgctcggcggcgcgctcttcctgctgctcttcgcgctaggggtccgccagctgctgaagcagaggcggccgatgggcttccccccggggccgccggggctgccatttatcggcaacatctattccctggcagcctcatccgagcttccccatgtctacatgagaaagcagagccaggtgtacggagaggtacagccccgacgggccccgggcagggagggccgccaggctggcccgggctggccagggccttcctggttggacttatggccgcccctgggccgactagtcgggacctctccgtgtgccggctgccctttgagggacacccgcttcccgggtctggaagggagaagtcctcgacgccgtgcccccttgcagggggagccccgcccctgccggtgacccactccgggccgaggctccgaggcgatccagtcctgattttcccgctaccgctcgagctcttgctcctgcgcctgcgccgtttggctcgccagccgcgccgccacttcaggtccagggtggacgcatgccctcaggtgcgggcgtcttgcgagtcggcctcgcagctctgtggaagctgcacgcggcttgtcggaaaatcaaggcgttctgagttctagatggttaatagcaggttcttcggtgtctgcagtcgacgaacgactggtgtaggcgtttgctgtgagaatggagaatgcaggggaacgcccctgactgagaagcgggccctgggaaacgattgtgaacgcgtgaatgaattgatgactaaaatccgctgcgggggtcctacagcgcagatggtaatgccgttctgactggctgggaacggcaccttagcagatacttaaaaggcgccttctgtgtgccactgtcactgccaacttggtgactcatttaaaactcataaccagccggtgaggtcggtacttcgctcctcctcattctgcggaggggaaagcagcacggaaatgccctgtgactggcagcggaaaaggcgaccaccgcttgtgtgtgggtgtcccgacgtccggagggggcaggagtttccacgggtcctgggacagagctcacctgttttgttttgaattacacttatttatatgcaactacaggcctgacgctagcggtgaagaaggcagatacagccttttaaggagttggcagatgagtgggagagagaaaactaatctcattatcggccacaggctgtggtcagtgttttgaaggaaaagtacagggatgtttggcaactgtggtatttcaggtttgaccttaaatccttacttaaaccaatttttacaaggattggtctaggtgcccgggcgcggtggctcacgcctataatcccagcactttaggaggccgaggcgggcggatcacgaaatcaggagatcgagaccgtcgtggctaacacggtgaaaccccatctctactaaaagaatacaaaaaattagccgggcgtggtggcgggcacctgtagtcccagctattcgggaggctgaggcaggagaatggcgtgaacccgggaggcgga

SEQ ID NO: 5158 - DNA, 6000 bp, Homo sapiens
tttgaagccaggcctcactgagtttgggtcttttcttcaccaactcctccagctgtgtcactagggaatggggcttaacctctctgagtctcagttctccgatagttgtaactactaggcagggttactgtgagatttaaaacacgtaaagtggttggcatatactaagcactcaacaactattggtgaaacaaaaaggagaaaatcttatcctcagtaatcttcccaggaagagagcaggtttggggatgaccagcagcttgggaagggagcaagacttgctagagaagtcctaagtgggtaagcaagctgaaggcaaatattgacttgctctgggtcacaatgggcatgttttttaaaaaagacaccgtgtggaagaaaggaagaggagatatgagatacacacaaaggagaagaccactgggggtacaggagaaatacgggggtttactaagtttctgctgtgagttgtgtgaattacaacttttctagctctctgtaaagagctcagtaaagctttcatttttttaaaccaatggactgggtgttggctgttttagaggatgcaaggagatgctgagtttgaccttaagtggcctcaagggtatagagcaaccaggccatccgtaggagttacccttctgcattgtgttactgtcgtgagggggatcttggaccaaaacttaagtgggcaagagcaagaatgttatttaatttctgtatcaagtccccatcccactagactggcagaaaacattagccttgggccttcttggatttccttccccacctctccagttacgtgatgccaagagaccggggagagttcgtcttgttcctgcctcaccctcgccattcaagtatggctgagggtcccctgcctctgttgtctagaggccctgccctgggacaagaacacctttcttcaaaacagcccttgtatgtgagccaggcacagtggctcacacctgtaatcccaacactttcagaggccaaggttagggggcgggggggatcccttgacgccaggagtttgtgaccagcctgggcaaaacagtaatacctccatctctacaggaaaaaaaaaataatcttaaaaacctaaaaagcccttgtatggattttctaacacagtctacacacaacctgccctttctgggtggctgtcccccagccacctctacaacagacaggcagggaggctgggcacaggctccctctcaaaagaacttctctctctacttccctcctcctgacatggggcaggatggagatgagacaggagatcacttctccctcccaggttccagttaagacattttgtctctacatcagtcctctctttcactggttctacagtcttccaagttcccctgtggatacaggctttgagcacctgaaggagacaggaaaggacacacctttcccagtcagtaagggtcacccgaacttaggctctgtacttgttctccactattccatagtataggtcacaccatgagttttgcttttgtctgtttttaaccaggccgctgttgattgtggttattgaaagggtttatttcttcaactataaccccactccattacgtcaccattgtcattgtaatgaccccctctgccatggtcactggaacactggcactcctagtcagccagatagagacaaaggcactaaggccagaacaacatcagagctggaagggactttttgtttgtttgttttgttttgttttgttttgagacagggtctctctctgtcgcccaggctggagtgcagtggcccgatcatggctcacggcagccttaacctccctggctcaagggatctggaaaggacttttctgaagctctgcaccagcccctttactgcaccctgcctgaggccacacccacccagtagccggtgagtgtgagaatccaatcccggaaatccagccctagttttcattttgccaggagaatggctgggaattctcagagcggggtacccttgctcaaagcaagctctcagagtctgaccttcttccagcccctagcaagagaaacaaaaggcatggctagaggtggggaagcaccagagacccagcatctccccgacagaggcagacgtagccctgttacagacatgaatgattttgtatgccacacaccgctctgcgtctgtgtcttggacatcttcccctgccagtaagcataactctattctctgcgcttgctccacagtatcccacagtacagacaatatctgttttttgtctgtttgggttttgtctgtttgaaccagccccatactgatgagcatttgggttgattccaggaatacaacccatatactacaaaggaagtcctttcatgcctccgtgcgcacctgactccacactttttcaaagtaattctcccacccacatggtgggcagtgtggtgcatgtcctcagtgtagacctaggtgcagggaaaggtggaatttgtccacagtcacacagtaagtttgtgctagagatggcaaacacgagtccccaagactccagacttaacactctcttagtcccagttgatgctcccttaacaccagactttttgtttgtttcaaatgacccagaataggcaagtgtgagggttgcaccaggcaatgtggggtgagggagagaccattaaataaccctgattgatcaaggggctgccgtgtgtagtcacccatgggatgaagtagcttggactatctccccaacttgcaaagcacattcatacccatgatctcatcttaatcttctgggttccatattattatcttttccatttagaaataaggaaactgaagtgcagaatggtaacctgcccccaaatcacacaactagtagtagtagagccaggactaggagccctgttctttaaaagtaaatatattattactgctaaaaagaaagatagcattgctgaaagtgtgaaaaaactgaaattgtaactacaaaagaaaataacaacattgcagaaaatatgaaaaaaaaaaaccttgaaagcaagaaaaacaaactaaaagaaaaaatcttactgggtgaccatggacctgtcatctcatctctctgaacctcagttgtctcatttttaaagaaagggaatgaggataagcacagcgacggcagccagtacatactgagcaccgccttaccaaatttccaagtctgacctttccctgcaggcttcatgcaagtatacatatttcgtacggctataatcatgggaagcacaattttgtttgccgtttttcacctgacactatcttgtaaagtttttctattgactacacagactcagctagcaccgtcccagcagttgcatttttcaaggttgattaacccctgtccctggtgctggatatttcttgccaccaagttttcactattttggctgatgctgcaagaaacatcttttggcttctgagaaattctccaaagtcagagactgaggcattcagaccctgaactcctgctttcccaaggcttttcacccaaccccatctgccctctgcctcagggcctgggcagagcctcggccttgctgacagcgtgctggagaggctcaccaggctcagcagcctcagggcaggctcagtgaagcttgtaggcaaaggggctgaaggggtctttcttttgtgttcccctgactgttcctaagaacatgtgcatttatgcttcataccctaactaggaaagttctccttaaatctaacccccaaatcccatcttctgttctttctacatacaatataaacttctttgggccacagtcttgtgagaatctctccaaaacgtataggaagacataatgttgtctttacaattgcacggtgtcctccaactgttaagcctgtcccaggtgaggttaagaatttcagtccctctccactgcctcacatccatctggccagatgcgtttcttaaactcctctttatcagcctggggctgtcacccattctacccattggtctgccagtcgctgtaaggttgtcatgtaccagaggcatgagtacaaatgatgggggtggggacgggggacctgaggagctgggttcaagctatgcttccctgcttgctggcactgagaccttgggggaagtcatgttactggcctcccttcagctccctcgcagcttgggtttccccatcagaaaattggaagcgattagaacctgtacttagcaagagttctgggacatcccttgtgtgaaagtgccagatacgctgtaaagcagtacctaggagtgccccacctgggaccacttttgaaaatgtccaagccccaccccaccaccaccaccaccacaaggtaacgttctgccccacttttctcatccatgttgggtggagacttgcgccatccctcggctctctacatccatccgcaccacgcccaggtgaactcacactcgggaccctgaacccgcccactccaggccttgcgggcccttctctcctcttctgcacgccccaccctcctttcccacccagactccagtgtgcccacaccccactccccatcttagcctgcctttcccctctcccccagcgcacgcgtgcatcagggcactcacgaagccaccccggcaacatctgggagcacgcgcctccacatctggaaggtgggcgcaagcgtagcagggccggtcgggttcctcgccgccccccggccccgcaggtggtggagcagggcggggtgagggagggggaggccagcggggctgggcggggcccggggggcgggggcctgacggccgggccgggcggcggagctgcaagggacagaggcgcggcaggcgcgcggagccagcggagccagctgagcccgagcccagcccgcgcccgcgccgccatgcccctggccttctgcggcagcgagaaccactcggccgcctaccgggtggaccagggggtcctcaacaacggctgctttgtggacgcgctcaacgtggtgccgcacgtcttcctactcttcatcaccttccccatcctcttcattggtgagtgcgcgcagcgagccgcggaggaggggacgggagagcagggagggaggaggaggcgctgcgcgccgcaccgctcggcgtccccttccggcccgcgaccgccgtccgcctcgttcccggggtcccctgccctgtgtcctgcccgccggtccccgcactcgcacaccagctcatcccttcactcccccggtgcccccgatcccgcgccaaacacagcggacgtttgtgacccatgggatcaccaagttttgcttctgcagggccaagagctgggatggggaaaagggaaagaggaggtctcagcacgcagtgggaaactggagaggggtcgggcctcaccctccgtggcgcagcttagggagccgggtcacccctcccgcaaggcagcctccctgtcagccgcagctgggcctagggaagagggaagcctgtgctttggagtctgggatggaggcccagctaacccctatgctttcaccgggctgagccgcgcagtggtccgtgatctctgacagtcccaggcccgcgccctgggcgaggagaggcgagagctagggacttggattcccttcccccgccaccccacccgggcatgtgtctccagagcgcaacttctcaggctctgcgcaaagtagctccgactcgccgacgcagcgaccccggcgcccttgcttgcaaagttgggcgccacggccgggacaatcgtgcgtgcctctccactgaggtcccccccatctctctccaagaccttgactcttccagaccagtcaagtctatcaactcatagggtgtcccctgcatccccaaaacgtgttcattcactttaagaaaacaagcaaatcttaaaattcatatacagctttggggaagaaaggaaagattgtcacaaaattagatttacaagaggttgctgcagaagcagagttgctagttattaacaaagacagttagatagaaatagaaataaaacatacaaaat

SEQ ID NO: 5159 - DNA, 6000 bp, Homo sapiens
attcaacaaaaatttattgagtacctactatgtaccaggcattgtcctggacacttaagatatatcaatgagcctaacggatgcagatgccctgtggaccttgtattccagtgggaaaaaaacagatatttaacagatattaaagggtgaacatacaaaatagataaactacctaatctatagctcgtaaataaatttattaatatagaatatatgtcataagaaatatataaaatatgagatagatattataacatagtttataaagaaattatccagtacattagaaggtaaaatgtgtcattataaaagaaaaggagagattgggactcctgaagggaacgggagaaggcaggctctgacgtattaggtagagaggtcaggggaggcctcaatgagaaaatgacagtggagcaaaaacttgaaggatataaaggcattagttctatgtaacagattgtttctttttggcatcccaaatgatcagaaccaaatttgaggttcaagcacagtactctagaggcccctgtggtctgtacgtttgtaatcttttgtcctcgagaggcaggataggacagtggttaagggtatcggttccactgtcaacctggattcaaatactgcctctaccacttaccagctacgtgacttagggcatcatatttcatgtctcccagcctgagagaaatgcctccctatgcttcaaaatgaagataataatagtacttacctcacatggctcttttaaggattaaatgaaataatgtacacaaattcctttgcacacaagaataaactcaataaaaaaacagctgtgattattgagctttggtcatgtcactcaacgtttatttacattttctttggtcctgattctttatcctcattgatattttaacattgttttatggatcctgcccctttggtaagctacttcaaatcctttgtggattggggtaagttataagtaagtaaataaatacataaataaaaatctggatagggggacattttcactgaagcaaagcatttcattaccaagacagtgaattgcaagtgggccaaaagcaagaaagatggactctaatctctaacagtccaccaagaaccaccagtaaaacactctctggtttctcagaccatctttttctccccatctcctctttcttaaatccctcttcttccctctatcatgaaagggtaaatgagttacacaaaacggctcaagaagactcctaagtcgtcacaacctcacaactatttcgttgccatgggcctcacaggactcttcctcatcagagaagagaaaggaaatcaaagcagtcactttccgtgtgttggcagggtgctggttaagtgaacagagtcagacataagctagaatctcgtttagtgagctctgtggccttgggaaagcccctggacctttctgtgcctcctattcctccttggtaatagcagtccctcctaaggtgttttggcagatcaaacgagagaatgcagggaagcaacgtggatagcttatttttaaagccctcagaaaatgctagatttccttcctgaactgcaccctggggtaacactcttcaataagagggtgtatagggtggaaacagggtgaggagactagtttaggtatatccctatctgacagaaactcaatacaagaaacaaaagaagaaagatctttgttgttgctgttgccttactactttctagaggtattgtcatacttcttccttcccatagccctttaagatgggcattattatccacatgtgacagctggggctgggctttgaacccagagcacacagctaggaatgtttgcgaggcaccgctagctttccgaagttgcctttacaagggcagccattagcctccaccacaggacatcagaggcagcactgacaggaacctgtgaggccccagtgcacctggagtaccatgactctgtgacccctgagctggggacatcaagaatctgggccaggctgatgccactgaagctctctaagccctactttctccccttccttccatcagcccaaagggctttcatgttaaggcatccctgcttctgtgaccacgtgctatggaactggctagatctgaatttgaaacacacacctcttaagtgaccttaagtaactcacttattccttctgcttcctctactgaaattggggatgtcaaaaggcctacctcccacagatgtcatgaagattcaatagagcagtgccttgagaaaacacaaaacactacctggcacatactaaagtgcccatgtatagtagctgctattgttcaactgatgcagcctggagaaatcagcctcatgccgaaccatggtgatgatgctctcggggggtagggagcaggtcctggcgtacaggctgaaatgtctactcacacttccacacaacccaagcagtatggcctttttacccaatatataatcctcccccaccccacaggaaactccttgagggcaacacagggacctaattgggtctaggtctctaggtcttttcctaggggaaaaaaaaaaaaaaaagaccaattgaggcccagcctagggcctcccaatcagtgccgttgatccacaaacatgtgctgatgggcccttctgtgctgggaactggggaaagggaagacaccccgccctactttccaggagttcatagtgcacctggggaaaaagagaaggaaccactatcacagcagacagaaagtaatgagagctgagtgtccctggaaatgtggggagaaggaggtggtatttaagctggaccttaaaaattagtcaagacatgggagggatggcattccagactgaacagggacaacgtgaacaaaggcctagagacaggaaaacacagggtttgtttaaaaaacagattagtgaggtgaggctgaaggattgggatgggaggggattgagatgggagctggcaatgaagccagtgagcctcaggggcagggaacagaaataaaagtcatagctgcatggagaaaatgaggagggagggccagcaactttaaacaggatagttacagcaattatcttagaagcgacacattgagcctgggcagggtggctcacgcctgtaatcccagcactttgggaggccaagacgggcggatcatgaggtcaggagttcgagaccagcccggccaacatggcgaaaccccgtctcaactaaaaatacaaaaattagctgggcatggtggcgggcgcctgtagtcccagctactcggaaggctgagacaggagaatcgcttgaacccaggaggcaggggttgcagtgagctgagatggagccactgcactccagcctggacgacagagcaagactccgtctcgggggcgggggggtggggggagtgacactttgaagaggtaaaggagtagccgtgtgactatcagagggaagagtttccaggcagacagaccagcagtgcaaaggtcctgaggccacagggctgccacgccgatgatgcattaaaaaggccaatgtgactggagcgtgggagaagggggagggtggtagaaagagaggttaaagagctaaaaaggagccagttcctgaagggctttgcaggtcatgaggggcctttaactttcccttggatgaaatggagtgctagtgtaggatttccagtaaaggaacgacgtgctctgacttaaattttaaaggatcgccttgactgctgtgtagagaatcagctgcagggggccaagggtggaagctgggagaccagtaaagagactataatggaaatcccggggggcgggggtggatggtggctggaaccagggtggtagctacgtggtggctcgcctctgattccccgtgtaaaaaatggagtttaggatccctgccctgtgtgcagcccacagcctcaagcccccatggggatggaatgccggaaacctctggccagcgcactagcagcctggagaatacggaagattgtggcaggattgtggggcacatgggcagctccctgctcgtccgggcccctggtgcccacgagaaaaccaaaacaggtgcgtgccccgcgccgcacgtcaggagggcaagactcagtggagggaggggctgtccactcgctctagctccccagaggctgaacagggagaactgggaaaaaggacgcctcctcagcgtcctagaacgagtcctcggcacctggtattgcatgcgccctagtatggggccgctccacttgcgcaggtgttggcaacatgcggggagcgccacggcatgcccccaatgagccgactccctcccccaactctgccccctttgtctcgctggcccctactccttctgtctgcctgtctgtcccgtcccaggttcagcgcgcacggccctgccggggtccctctggcagttgccgtagccgcgcggcccgacccggggctcccaagaggagaaaaaatcatgaatgaaatggatgcgctgctcccactcctccgccctccttgtccaagcaaccttggcatgggggcgacgactgcggagactccgcgcagagttgctcgggagagggaggcacctgagatgaggtcaggggttaagggtctgtgatccggcccccttcgtgccccgggagcaggccgctctcccggtcccccgccccgccagccctgcgcaattcccggcgagcggcggaagcccgcccgggggcggggcggagccggggctggggggtgccaaacccacccggcggctgcgccagcgactctgcagctgaagcgcatttggtgaggcggtcgggcgagggagcgcgcacggagcgcgggacggagcgccaggcggacggaccgaaggacggaggcaccgaaggacggacgcccccgcacacgcagacgcacagagctcggcgcggcccccgtcgcatacacactggcacagacacaagcagggacacacgcagacacacgcacactcgcgcgcgcatcctcccgccagcctgcccgcctgctcgccggcgcccggagcccgctctggccggtaagtgcggcgcctccgtctgcgcctttgtgtgcggagccggaaggtggagggcgcgggtccctccttcgggcggccccgcaactgacaccttctccagccctcccggccgaggagccggcgcccgcccccgccacgcccccgtggggctctgggcgcccgcatgctgggggaggggtcccccatgcagaggagggggcttgtcgcttggtagccgggagggagcggcagccactccccacgaagcccgtgcgcggttccggggaggaatcgggatagtggtttggggtctgagcctctgcggccggcggaggctggtgcgcggctctgggctgcatcgcctctccggagcctgaagcccctgagggagattggaaatcgccgctagccttctggcctctaaagcgcggctcccagccttcccattgcttcgcctccaccgaccctttagctttagcctcccgcgtcccaccctcccctagaatacaagcttagcgcgctcccctcccccagcatgctgcttgtttctggttgaggcccaggctcctgcaaaaccggagattgcccgggtcagagccttgggaggcttaccttatcaaggatcacagggcttagaagatcagggccagacgaatcctgggaacttattcaaccttctcattttacagatggggaaactgaggcccagtaaggtggcggaccaaggtcaccagagagttagtggtaaagctttcattagaatctagggttcctggttttcatactcatgctcccctcctacacaactagatcccacccacattgaagccccagaaccccaaaattcacctgagtgtaccacgaaagtgtgtaattccagccctgccccacttggaggggcaggtgccattcattttctaccttccctacctatggtaccaaaaaaaggggagagggggctttaatttgcttccttcaacctcaaaggagagctctc

SEQ ID NO: 5160 - DNA, 6000 bp, Homo sapiens
cactaaccacctaccaaagaaaactgctcacaatcatataaatgtggccaaggaatgtccttaagtgaaaaaaaagtcaagtttcagatctgaatgggccaacgttgagaagaatattctaaaaagaagaaaaagtaaacttacagctgtctcatgaatagtatattcactttttgttattattgttgacaaatatattaatatttattcaatcttttatcaattcactcatttaatctttcacttataagtttatccagcatttactctgtgcaaggcattagtctaaccctgtggataaagcaatgcagaaaacagacaaaaacgtaagctgtcacgagctgacttttctagtatgggactagataagaaatacatacataaataagatatacagtatgttagatggcaataagtgctatgaagaaaatgcagcaggaggagtgagaataggtcaggaaaaaagggtttcagttttacaaagtgtgatcagagaaagcctctctggcagggaaaaattcaggtaaaaataaagaagagtttactcattcatttttcatgaaattaatattcattgagtaactactatgtgctgagagatgcaaattcaaaataatctaatatgtgcttgtacacttagttagattcctctcaacatttattcatgctgacactgaagcctcaatttttatcatctccaaaaaaattattatatttataattaattaagtctaattgagtttgactactaagtgtccagtaacacacaattattttatctattttaacttgactccacacacaactaagaagtagtgtcactttctttattgtacaaatgagaaaatattcttggaaacgtgatggcaattatccaaggttatgaaaccattaagtggcaaaaccaggattcaaaacaaagaaactgtgacgtggtagcctgagcttgttctactcagcacactgcttccttggtgattataaatctggagaatctagccagagacagagccccagagtgctaacactgaataaagatttcatggggccacctgagcgacaaagtctttctgctaacatgtgcggactatgatcacgtcagcaaaagtatcattctgaagaaagtattgtttattttttaaatgtttccatcatcttgtaacaacgctatcctctaccttttttgtttttgtttggctagaactggaagggaagataaaaagatatagtggacactatgtgagaccctaaataatacagaaaaatacccaagaaaatattttaaacctatgaacagcttcaagtactattagccatcacatagaaattattgaaaatgtctgatttactactctgaatttaatagctgcacaatgtcagtggttttgaaaatgattgtgtaatcgctaaaataattttgtgaaattatttatctccttgtacaaaatttctttccattatatatttaaatagtcgtaaaggttatgatttccagtgctttataaaaatggacattttaaaataaatttatactagtattttatacctaattgtgtctctttaaaaatatacctttaaaaagcactaatctgttgcaaaatttaaattgttcattttatctttaaatctatttccatccaatttctacttcaaaatatttctaatatatatttatgtttgaaagtgttgattatcttgcatagtactctaaaataattttaaaaatgagatagcaattgtttaaatttttaaaatttcttgtgaccattaggctcttaccttaaaaaacaattagaattgagtaatcatcagaagtaataaaacaatataatcaattttaaattttaatgaatattaaatgcaaaatctaagactgttatattcttaaggatatcaatagggtttgtgtttgtttttcaattcatattttatattgttacaatatggtattttcaattatatattttatatttcaaaatgtttactaagaaaacaggttcacataaatatatagatagaaatgcaacaggttttgctatagtcttatcattcaattcttttaactatggtcgaattaaatgccccaaatcacataaagatctatcctttaaagttatttttagttgattgaccaggtttacaactttctttagctcaccatttatgtatgtatgcatgcaagtatgtatacttgcatatatgtatatgcaatatcataacctctgcttaaccaagggcattgtcctagaatttccttaaccccaaaatggaatatttgacctttccaaaaagttatagttaagtgaagaagatcttattatagcaccatattacttaccagagaaagataaacttgaataataaacaaccattagcatttatgagaataatccctctatttctatcctaatagaatattgaaataaattaaatgttatccccaaatacatttcccagccgttaaattctattttatttataaagaatatcattaaaatactctcaaataatagattcataatgtaatttattttactattattcaaatatttcttatttgcttaaagtacctatgtccctatggggaaacaaacatgaattccacttgtagcctgtatcagactaaatatgctatcagtgaatctgatcaatgcaaattccctacatgtgacatcagcatcaagatttgatgctataggatttgtacaaaaagatactcttttggattcaaaacaatgttttcaattagtttgaagtgtggtcccaagctatgtctgcttctgtattcagatccattagtgatattcatgtgtcttcgtgttctggaaactccacttgtgagtggttctatcattgcagactaggaagaggtttttcttcctcccagtatgtattgtgaaacgtaattaatgagtgtaaagcaattggtgagtgccagatgaaaggcaccatagtgggtaagtaccaaaaaaaattatacaagcactgcacagtgtgtcatctcagctgggtttgctgatgaaattgcaggtaattatctctcattgtggagttcctctggagaaaggaggtctaaagtgggattggtcttacctagaacctaggactgtatctcagtgaaacttgtttgtttggctagaaattactttttaactccaactccatgagtaaacaaaggtttctgataacaactaagtgagctaagtaacaactgaggcattaaatttacgtacagtttacattttataagtttatttccagatgtgctcaagacagtgagggtaggtaaggtttatctctagggtgaggtctaatcaattgattatgattgtaaggagggcaatgatgaataggattctgggcccacagaaagggtcttcaggaaaaagcaacatgagaaattagcgggacttttatggcagtgaaaacggagagctatagcaaaagtgcattgcaatgtttatgcctggtataagccataattactatggttaaggcagaaggggataatgatattcccacacatattgcagaaaaggcctagggaaaaggtgcacccagtcctgcccaatcatgttcagttctctaactacaaacagaaaatatatttagttggatttttacctaaaaagtggctaatctgaaaataagccattgaattctattaagccactgttcagtaactaactgtttgattaaatttaacctgcttttcttcgtaccacagtagagacagcttaaatatcttttgagacaatattttttcggggttggtttaatttctaatcaaactctgaaggggcctttgggcttcagaaaatttaaaactatagaattaccttgttctttcctcgggccaattaactgggcagattctttgcattccatttgaagcttactagctcctgcattttagctaaagtttcgtttctcgctcagcagttgaaaacctatctccttgtgcagcagaaaccaagtatgaacctcaggcatattgagctgaacggcccttggcgccatccccaaacgctgatgtgcggaagatcccagtttcactcttctccctttcataagctctgaaaggaagtgtaggaagtatgccaagttgttattcaactctagtatttaatcaagcattacctgggcacttctgaaattctccagcttctaaagtgagagtaaaccagagagaacacagggtggaaactacttaatcgagaaggctcctaggataagtgaggatcacatggccattctcaggccccagttcctctccaaactcctgaaagtcagcaagaaaccgaatctcagtcatgatgattatttttcatgtaacacctcacagcgttctcagggatcccaatatatgctactaattcactttgtgttaagtaggagtttcttaaaaaaacaatttcagtggacctcagaatagacgcctcactactgaccccactacattttctctacttaggctttaagtacacaaatagggcaatctactagagtacagaaaaattgtttatgatttcagagaatgtgcggctggcatagagcaacaagtgcagggcatgacttgtttggattcctcacctgcaaggagcagggggcccagcacatgtcagaaattcctgctataccagatgactttgccaaaatctttgtcctttttttcacttagggtgaaaaaaaaaattgatgacccgtgttttgctaccactgacgagagtaataccttgtcccaaagctaaaacgatcaacctatgaaaactggagggttgggcttttgttgttgttgttaaaggcctgaatgaggtgatatcttaatgcttacagctgagaagcaggtcagtcaggttcctgggcgctctgttacacaagcaagatacagccagccccacctaattttgtttccctggcaccctcctgctcagtgcgacattgtcacacttaacccatctgttttctctaatgcacgacagattcctttcagacaggacaactgtgatatttcagttcctgattgtaaatacctcctaagcctgaaggtaagtgtgcgttgggtcacttaggtctctcgctttctctctttcactctctactctctctcttccttgattatttaccaaagagaatcgcagtggtctcaactttgacagaacagcctggcaagtagctacggcaatccttgcagagacaagtagttgttttattaagtaatgaccttccaaatgagtatttgcactcctaaatgagttagctttaaaaattactgccaaatttgctagattacagaaccagcagaagagttaaataaaagccttatttaaaacatacgtgactatgaaatagaattttcttaagtcagatcttagtaaaggtttcaaaatgtttaaagtggaagtggcagcatgaatataaattgaatcttagatttaaattatgcatttgtgctgaaaggtttttgctttaagtattagaggtttttgctttaagtattagaatagttttggaaaaaatcttctaataaaatagattagaagcttctataaatctttttcaaagattttcttaattaaaaagttgggaaactgttgtacagtacatataattatttagcatgatatgtgtacatgtctaactttcactggaaatctaaaaggttacatcagttactacagaaaacatcctatgaaatgaaaatgtggtaaaatttcttaaaattattttcattttgtggctatataagcctctttttttattaaaaggatgctgatttccatttatctactttctatttagtctgtagaggctgctcctatagacattacagtatgatacagaaggctggaaaccctatgcttgaaaattttgatctagaactttcctttcggagaaactttctttctttctaagcttgacactcatcactaattagttaagtactgaattttatgactgaaaactcccaaggtagcaggtcatatgacaaactctaca

SEQ ID NO: 5161 - DNA, 6000 bp, Homo sapiens
accttatactcataaacatttcctttattacatggcttttcaggtttttttggagttaataattgctttatttcctcccgtttgcttagttttctatgtgcctatcaccaatttattcccaaactctccactaaaatgcataaatgtgttatcagtatgctcacccacactggtgaactacatatttcatttttttcttggcaacacctcacctccacttctgccctgcttcagtgtgaatggattgctctctttgccagctgcatgtctgctaccctaggcttcccttcacaattgtggtggattaattttatgtgtcaatttgactgggctaagtgatgctcagatagctggtaaaacaatatttctgagtgtgtcaggaagtttctagaagagattagcattttaatcagcaaactgagtaaagatcactctcactaatgtgaacagacatcatccaatccactgagggcccaaatagagcaaaaagacagagggagggcatatttgccctttctgtttgagctcagatatctttctcctgcccttggactccagtgttctcagttctcaggccttcggactcagactagtacttacaccagaggctcttctggttctcaggccttggttcttcatgcttggactggaactaaagcatcttttctgggtctcccacttgaagacagcaaattatgggatttcttggcttctgtagtctcctgagccaatccatcataataaatcctttctatatatctaaatatattctattggttctgtttctgtgaggcaccctgatacactaatcattttgaaatcaccttaatctcctctatattggatcctctttttcttggattacacatacctttactggctaactttttttttttttttttttgagacagattcttgcactgttgcccaggctggagtgcagtggcgcaatcttggctcactgcacctcccgggttcaagtgattctcctgcctcagcctcccgaggggctgggattaccacccctggctaatttttgtatttttagtagagatggagtttcgcaatgttggccaggctgggttcaaactcctgacctcaagtgataaacatgtctcagcctcccgaagtgctgggattacaggcatgagccaccagccctggccagctaactttttttcttaaagatgggatctcactctgtcacccaggctggagtgcagtggcacaatcatagctcactgcagcctcaaactcctgggctcaagtgattctcccacctcagccttctgagttgtttgaactacaggtatgagctactgtacttggcttggctcacttcctactattgatggagcacattttctagtagctcttgagaaagtatgtatggaaggttaacaatttttagaacttacatgtgtaaaatatttttcattattccttcacacctgattgatactctggttggtgttacggggtgaactgtatctcttcccttcaaaaaaaaaattaaagttctaactcccagaaccccaaaatgtgactttatatggaaatgaggtcactgatgatgcaactaatttagggtaaggtcacaccgaaataggaagttcttgtaagatgatttccagctgacaacagataacacaagggaagacgccatgtgataatgacaacagagattgaagtaatacagttgcagaccaaggaacaccaaagcctgccagcaaactaccagaaagctaggaagagacaaggaaggaatcctctacactttcagagagcacatgacatcttggcttctgatttctcgcctccagaagtgtgagacagtgactatctattgttttaagtcacccagtttgttgtatcttgttatggcagccctagaaacctaatacagttggatatagaattctagtttgcaaataattttttctaaaaatttagttgctctctgtgtcttagcttccagtgctgctgaggagaagtacaatcttgttctgatttccaatccttagaatataattttttatcctctctggaaacttctaggatcttctatctattcctaggattctgaaattttatgatgattacatgtgttaaacatccacccgggtgtggcggctcacgcctgtaatccagcactttgggaaatcaaggtgggtgaatcacttgaggacaagagtttgaggccagctagccaaacatggtgaaatcccatctctacgaaaaatacaaaaattagcagggtgcggtggcaggtgcctgtaaacctagctactcgggtggctgacgcatgagaatcacttgaacccaggaggcagaggctgcagtgagccgagactgcgtcactgcattccagcctgggtgacagagcaagactccatctgaagaagaagaagaaagaagaagaagaaggagaaggaagaaagaagaagaaataaattaccagacagggaaaggaaaagagcaaaaaaaaagtccacaaactcagttcctaagaatagttcccgttcctaccaaagtagaaaaaccacataattcactttgggtatggggtaaggaactttgaagggtactgtcttagtagtgggatacaattaaccctacataaatgactgaattggttccacctaaaaaaaatcaaaacccaaaagaacaaaattgtttttcaagtaagtaaattttacaaagtctagcatcttgttaaaaaaaaaaaaatttccaggcatgcaagaagcaggaaattatgaactgtaatgaagagaaaaatcaatcaatagaaactatgccagaaatagcatagatcatagaattagtagacaaggatattaaaactgtcattataattgtagtctatgtgtttaagaagctgcagaaaagttgagcatgttaagacataaaagatgtaagacacacacccacacccaaatcaaactggtagaggcaacaactacaatgttttatatgaagaatgaactggacaggatttcaatattagatattgaaaaaagattaatgaatatgaaaacatagcaattatccaaaaggaaacataaagaaaatcttgaaaaaaaaatgaacagagcgtcactgagctgtgagacaatgccagttagttcaatatacatgtatattatgtacatgcacatgactccaatagtcacaccaaaggagaggagcaagagaatggaaagaaaaaatatttgaagaaataagggcaatgtttgcatttgtcttgctctacctggtattcctatcaaggcacctggtatatattaggtgtttaataaacatttcttgaacacatttgcagcaaaaaaaaatgacaacgagtaagagataagcacctgagtgttactgcaacgtatttaggccatcagaggacaaaaaaggggaataatatggagaaaaggcttggtagaagtggcatgccttcagcagggacccacgaaatgggttcaactgagtgtgtacaaagtttggagactaggaagggatgaagaagggcattccacacaagaacaacacaaatgaagatttggagcctggcacagtggcccacgcctgtaatcccagcacttcgggaggccaaagcaggaggactgcttgagctcaggagtttgagaccagcctgggcaacatagcaagacccccatctctactaaaaatttaaaaatttgccaggcatggtggtgcttgcctgtagtcctcgctactggcaagactgagacaggaggctctcttgagctgtgattgcaccactgcactccagtctggacaacagagagaaactctgtctctaaaacaaacaaaaagacttggaatcaggaataaatatggttgaaactatactatctggactgaagtggtggttgcacttagtggtaatgagaaatgaagttagttggatgagttagggtcagagtatgcaaggctttagaaataggaaacaggagagaaaccattgaaagtttctgaacagaacttgtgatgatgaaatcagaattcaaggggagaaaaaggagcatagtggtggcatccatgatggatttggagaagaaaatactaaaggtgaatggaaagggtggaccaggggcaaacaggttattaaaacagtcccatcatgaagtgttgaaatgctggatgtaaacacacctaccacagtatcagtacagactaagggcttggataaatgttagtcaaatccaagtactaaaattcttcttggttcgcgaaaatttcagaagtggctcaaaaatctgtaatgcattaagaatattatttgcttcacaatatttcatttacttaagattttataagaatcagctgcttataaaattgttactttgtggtgcaccaaagcaccttgttctctccctcacccagatatgtttcatgctctttgtactttccaccccttaacagatttggagggaagattcaagccgtggatttttaaatttaaagcaatgctgtcacaaattgagaactgacaacatgtcattacacatttaattgccaccgaatcccagagtttaaaaattgtaaggacctaagagataggacctctcgttgtacagatgcggaaactgaggctgagagagggtaagtgaacagtcccaggtcacagagctgctaatgggcaaggtgggactagaatccaggcttgactcctctacgctgagccaagggttcgaagcgattgggataagggaagcctgaggcagggaacgagagtcaggaaagcagctcttcccaaccctaggaggccgggggacctcgtcaccgcggaaggagcggagccaggccgacctaaaaagccgcaagtccaggtacccttaccctgatggccgcggcgacacactcggccaccttcctgatctcgcgatactagccggtactcacttttccggcttcccctaggccccgcccccccacctcagcccttctgtcgtcatttcctgtgggtctgtaggttaagggagaagatggcggcgctaggggaacccgtgcggctggagagaggtgagtgcagccgaggctcggcggaggtgggcggaagggttgggggagtgctgtgtcgctggaggggaggaggagtgacccaggctctgagatccgggccacgctgtcccttgtgccggcgccagaggccgccgttgtctctgtgcctggctctaggaagggcgcttacggtattttgtctgttaaccgtaagccctcctctgttcacacggactgttccaaggcacagcacaactaaacacaacctgcccgcttcgcagacacacgccgcacacgcgctcccttggtgagcacagcagaagcagcattcggagacccgtacacccgaaaagcaaacgtcacacacccggttcgcacagactacactcattgcctgtacagcacgagaacggacacacggtacaattcaacagaacctcctttccccgctgtttgcacacaaactccttcattactttctccacaacctcgcttgtattcgggttggggtatttgctagcttttgtgcccctcctagaaatggagaggttgctttaaaaacaatcctactgacttggtcttgggaaggaggttacgtaagtaagccgaatagtggtagatgctaaaacacttgcaggtgcagtgtttttcatttcttacaaaccctacaattgcaaactggttggctgattgcttcctagagcagactgtcaaggaaaataaaaccacctctgctgagtaattagagatagagaagcctacgaaaataactggctatgcgcctaccatgatttccagcattccagcgtttccagtccttttacagatttccagcattccactctgtccctaagtcctttatttcaaacaatttcaagcatgcttttcatacaccagcattagaaatcattgataggaattgagaagtacaaataaacattttgagtactggtggtaaaaaaaaatgtatatgtaggatggaga

SEQ ID NO: 5162 - DNA, 6000 bp, Homo sapiens
agggttgatgttttgttgctgctatggtctgaatgtgttctctctaaattcttctgttgaaatcctaacccccaaagtgatgctattaggatataggatttatggtgaggtgatgaaaccatgagggctgggcccttacgaatgggattagtgcccttataaaagaggcctcagagagctgccttgccttttctactttgtaaggacctagaaagaaggcgccatctatgaaccaggaaatgggctctcaccagacattgaatctgctgatatcttaattttatacttcccagcctccagctctgtaagaaatcaatttatattgtttataagctactcagtttatgttattttgttattatagcagctgaaatggaataaaacactaattatagtaagaaacaaatatgctcttctgatatcttaagttttgaccagtgcctatatgcgtaagataaattaggaagtggtggtgaacagtcattgaaaaacccaagaaaaaactagctgagtgactcacattttataaggaatgatgggctgatcaaaatatccccatccataaatttggatatgggagcatggaaccaaatctccaaggccttctcaccacccccacgcccatcacttcagaactttaaaagtgagatagatagttgagaggctggggtgagcaggtgaaaaagcaatcttctagttctctcacaacacattcactgaactttcttggcaaagggaagcctcttccattattcattcacattctactctgggtcaagtacaacgctagttgctcaggatataatgtctgttctcagtgaagtatcacaggcatgtttggggagatagaggagtaaacagaacattgcaattcactgtggaccacagtcctcaaagagaacaaaaacatttataatgggcctagcttgtatcccacagggcttcctatcgtgctttgtacagagacgatctgttggcctctgccactttctatataagcaaaggcttcacggtgtgatctggaacatttgtaccaccactgagagaattcaaagccagggatacattctttgtggtaataggtgtatttggtggtggagagcttaaagaattttgactagttgatgactaagaaaggcaagaaaataattttttcctctttatagaaaagaggggctgggcacagtggctcatacctgtaatcgtggtgggcactttgggaggctgaggcaggaggagaacttgaggccagtttgagaccaacctggtcagcataatgagaccctgtctctacaaaaactaaaaataaataaataaataaaaataactgggcatggtgacacatacctgtagtcccagctactctggagcctgaggcaggaggatcacttgagcccagcagttagtttgaggttgctgtgaggtgtgatcatgccagtgcactccagcctgggtgacagaatgagaacccatttcaaaagaaaataaaaagtaaacaaggtttggggactaagacaaggtagatttttattggtctcaatcaaagaatctttttgctactgtttatgggttcctagaaattcctaggataatttcaaggagagaaatagaatgtttcttgtttgctttatgaattaattatttaaatgggcaaagaggtaggggtgtgtgtgtgcatgtggtgggagaaggctgggagggggcatgctcttcccagttggtcctaacctatctctagctccagttagttgcttctgttccatcccagcactatgtgcctgtgcattctccatggcggccactccaactcttatgatttttcagacagtgctctctctccttgggaattcttgcttaccgcctccacactagatgctgctttactctttgcaccaaggagcaacattctcatacctccatcataacacaaatccccttgcttcataatctgtatatgcatctgtgacagccactagcttgtatgaacaaatgggcatagaccacatcactagcacggggtcagtctacactgcagagtcagatatgtaaggccttgttctgctacataattagctatataacctttgggcaagttagctaatcattgtaagccttcatttccttttctataaaatagtggttataatagtacttatcacataaaaaagcatttagttatgcaaataaaattacataatatacattcaaagaacttagcacagagccaggtaggaggcagacactcagttaatcttacctgccttgcgcaagtcctcctgagagtagagtttttcctcagcagcattcctgtcgtattttagtaattcagattaccaacacctaagaaatgcaaatattaaagtcctcaggcattgaaaactttaaaattatctgggataggaacaaacagcaaaagggaagcataattcataaagtttaaacacgactcaattaaaatatccaagcttcaatacaactatcatctctagtacatcattccatctcacttttcatctccctgaaagcactgcatagctgtaccggattgatctcataaactgcttttgggaaacaggtcccagtcctgctttttactatcccaagaaatatccttctaatgagccaacaataaatattaccagttatttgcttctggtacttatgaaactgcacagtgatatcacattgtggaggtacagagagggtttgaggcgagtgagcatgatcgttctcacttttagagaaacccggtcttgctgctcttcgaatgaactgcagtagggaataaattgaggcaaagaacgtctctagagccagcatgaagatacctttctctcagctccaccagggttgaggccagggggttacagttaaacttattcatgccaaaatttcaagctgcactagctgaaagacgttggaaaaaccagggtgcactccaggtttcatttcttctttttctttcacactgattacaattcgattttgtgtgtgtgtgtccggttatttgaaaagataaaagaaaaatcaaacagcaacaaaaagcagccctccaggtgtccttttccgagcccgcaacggttaggtgagtgagtgcaaggcatatctataattcagctcgggaatatttcccttaataattaattgagcatcacaaaaggaggaggcccaatagagcccttgaacaaagctgccgccccgaggacgacagtgacagtcctggcgccaaccaaccagcccaaggtcggatttgctccagcagtccggggcatagcgctgccactgcctgcttggtccatcgggcgagctgggagaggtgtctagggagaccccgtcgccacgtgggcttctggttatttgtgtgtgtgtgtgtgtgtgtgtgtgtgtttgtttgtgtgtgtgcgcacgcgctcgcgtgtgtgggagtggggtggagatggacagcaaaacccttttttttttttttttttttttaaatggaggtgggcagtgggagagatcactaagatagagtcctcccgggagccaaacctctcgcccggttgattctggcaagcctgagacaggcaaactgtctactttcctgttttgatgtggtccgaagaaataaacaagaaacaaggagagacccttcctcaaactgtaactccagccaattagcatgaaaagctcaagaagctattaaccagaagtttcggctttaggggaccagggacttgcccgaggccctggcatgcgcggcggctaggtttaactttcaactcatagtgaccttttccttaatttaatgcaaaaaatctttcccagaggtggagatttaagatgctaatgatacatacgtcctatgaagaagcatgttaaaccaccatgcatgcaccagaaaaactccacctctacatgccctgtctatagttctccttatttccccttacgggagaggcccgtaaaagaaacccacaccctgacttcgaggaacagcccacttttttttttcttggtgttagctcccttgtgcgcacaagctttaattaaaagaaagaaagaaagaaaaccaaaaaaacttgctttttgctgcgatatcccttgatttctgtcctgaaggatccaaagagccctcagggagtcgataccagagccgtatttgtttttgcagcaacaggttggctgcgggctcttcccccgccttccaaagccctcagcccctggcccaccctgcaacttactcatctctccaaccctcctcccctagaactgctgcctcctgtgcgcagcccctagcctgggcctgattccaatttctgtaacattcccctgcccgggattgaatacaggttgaaagtcggtctcctccgcgcccctgaggcccaaccccggcgctgaagcctcccaactcctgtgtgcaaaggagacggagactgagggatctgggcgctctggcaggcacaggagggctccccgcccgtggcctcgccggagatgcacccggctcccaacccaacaaacccgctttgggaggggatggggtggggaaaagaagacggggctcggggctcgaggggagatatagagaaagcaagttaggtagaggagatgtcccagaggaccccattttcgggactgcacctcccattggagctccccgctcccaagccctctggggactcccgcgctgccgtcgaaacccctattccggccccaacggggacacttctccaggatttgctcctcgcctgtggggaccacagccaaagactcctggaatcgatcccagatcctgggagtcggggggcccagccggggtgcggggagtcgcggcgtcgtgactgcacccgccccgccgcgccgggaggcgcccctggcgaccgtcgcgaacgccacaccctcggttcggccctggccccgcccccgcccagagcgcgttcgcggccaggggaggcgtgtgctgctcccgcagccagcgagagcgagagagggatggatgttggaggaggaattcgggcttaacaagtgatcgctgctgtctaggattttgtttcttttcgggggaaccttgacttcctttcccaggcaatccctcctgtgctgaactccagaggaaccaggagtcttggggtcttctctggggcagccccaacccccacccccaggctccagccgcgaggactctgtgcacccctcgggccaggcaacagaacttgttccgtggatatttggagcctccacctgccaaacccgagtgattccttttaccaccccccgccccccacccaggatcattcttcccctcctccagctgttgcagcttgagggggaaaaacaagccagccggtggattttctttatttttatttttcgccccgccggggaacggtaagtatgatacctttttttttttttttttttttttgtatctttcctctaccttcttattttggctgttaagaaacagtggacatttgagggataaataatatcgggaatgtgacagaagggcatgaatggaaggcggttaaaaataaaccaggaggtgggagaagggaggtgcggatgctgcgcggcgctccggggggccaacagttgttattttcccaaacccggggatgcggtgagtgcgccctgcttaacgtgctggagcgggaaccgaggtctggaggcgagggcgcgattaaagatgtcgtttcccaacgagaggggggttaagatttagcatcgtttcgcctcctcccagccgcaccggttcccttcttttgggaacagccggtgaacgggtctgaattgctgcctcttccaacgtttggatttgcgtgcattttccgagcatttgagcaacatacataggggctgcataaatggcgtgcgttgaagtgtatatttctcacggtggtggcttttctgattccctctctcagtttctctctctttctctctctctctctctctaaggttcaggtaccaccctgacagtgacacagttgcaggaattagcactgagagacgaac

SEQ ID NO: 5163 - DNA, 6000 bp, Homo sapiens
agtggtttgtccttagacaatctgtctttgaatttaaagtctttatcgctaagaccttgactttaaatttttcatcactacaaccttgaatttaatttcaggtcttcaacatgatgaccttggatttaatttaaagtcttcaacactatgcgctttatcatattattcacagatgcatttttgaaatgtagtatgtaaaagtatgtaacgtgctgtttattaacaaaagattgttcacaacatctcatgtagtttaaatttgtaaatactgcttctgttttgtttctcctttatacacttgactgtctttgtgataagtgacatgaattttatgttaggattaagtatgttttcctgaaacttggattttttttgtaattatataattgagagttaagaatgaaatccttcaagtgttaaaaactcacattttaaaagcaaattttggttccaattctgtattttgtataattgcttattttccataaactaatattagtcagcatttgcttttaaggtagaagatgggatggattcttgctgacctgctgcaaaagtagcaggtccactcaaagtcatctcctagctttgactgtactgtcttgtgtgccccaccatccattttcccccaagaacagttattttatagagaaaactgtaagaaaacaagtggcattcaaggctaagcagctgccattagggaacatgaagacaaacttatcctttcattttcacacatgtcaaggtgttctgaaatagactaagtcatttttcatgtttacttttcatttaatagagtataatcaggctatcaaatcctattatggctatccttttttttttttttttttgagacggagtctcactctgtggcccaggctagagtgcggtagtgtgatctcgacttactgcaagctccacctcccgggttcacgccattctcctgccacagcctcccaagtagctgggattacaggtgcccaccatcacggccggctaagtttttgtatttttagtagagacagggtttcaccatgttagccaggatggtctcgatctcctgacctcatgatctgcccaccttggcctcccaaagtgctgggattacaggcgtgagccaccgcccccggcggctatcctttttagaaaaaaagtcaattgtctttatttagtttgttataacaaaataccttagactgagtcatttacaaacaatagagatttattgctcacagttctggagggtgggaagtccaagatcaaggcatcagcaaatttggtgtctggtaagtacccactctctgcttcaaagatggcaccttcttgctgtgttttatgtggtggaaagagcaaacaaacttcctcaggcctcttttataagggcactaatccccttcatgagggcagagcctaaaggccctacctcttaatactattgctttagggattggatttcaacaatttgggggaacaaaaacattcagaccatagcgtcaaaccacttaattttttcaaaaccgaacttttccaataaagcagtaatcaaaaactagtaaatcttggcaattaaggctggccctggaatcccttgccattttttctttctcttttctgatgacctctctctctatttccagagtacttatgatgccccaaatctcccttccaaccctgtctaacctttgctcctcagaatgctttgatttgctttatcctctcatcagaattcacattctcttagtatgttgaatgagtgacctctagttcatactgaggtgtagttttttgtttgttttttcagacagtctcgctgtgtctcccagactggagtgcagtggcatgatctcggctgactccaacctccgcctcccaggttcaagtgattcttatgcctcggcctcgtgggtagctgggatcacaggtgtgcactaccatgcccttttttgcatttttagtagagccagggtttcactatattgaccaggctggtctcaaactcctgtctttaagtgatcctcctgcctctggctcccaaagtgttgggattacaggtgtgagccaccgcgcccggcctaacgtgaagtttgttggtaacaagcttctgtattttctgctattggcaagaatgcttattcacacgtaacaggaatttaacagttggcattaatgttgcccaaaccagactctacttttggtggtgaaaaggccatttctggctctgaggacccttgaaaacacaactgattttttttactaatttctctgaggcttgatatatcactagaataagacaaatacctaaattaacagtagcttaaatagtttgggggtggttattcttgcgaatagtcagaggtagctagttcaaggctgacatgatggcacagtggtgttatcaacagtccagattggctccatctttctgacctgccatccttagcacaagacttttcctctcaaagacgatcatggttgcatactggctgctgcaggcatattgtattcacaaaaggatgatgataacaaggtaaaatgaagtggaaaatgaaaagtgaggcatgaggctggagaggtaaactagccaggtctctagcagccgtgtggagggcaagcagagaaggggcaggggatgcaggaattgacatgggcaacatggggacctggtattaaggaattgtaatggctcaagcaacgcaaactacagatctgaattagcacagtagcaatgtgaaaaaggaatgaaattgagatattgaaatggtaaaataggcaggaatggctgagtagatgtgagggagtggaagaggtcaacgttgattcctaggtttctgtcttcatttatgaaaaaaattcaggaaaagcagtcactctttaaagatgaattcagatttgtgcacattaagttcaagatgtctgtggaacatataagtggagatgtccagcagtcagctggatatgaatatgaagatagggggagtggtcagggatggagacagacttttgaatcatctgcaaacatacatcccaaggtaaaagagtagatacactatagtctcccagggagcacacacagccatggttctcagtctaatcctgggacaccaaattattagtgggtaaaggaaaagaatctcaagaccgaatggtcaagaaaccattctagggaaccaaactaggagagagtggcatctcagaagccaagcgtgtcaaggaaggaatagctaacaggatgtgtgtaaggtatgtacacaaaagagctttggaatccatcttgggaaatatacagtattagctgttttaaggagacatgctttaaatatcaaagcaagtcatcctgatttaaaaaactcccacttgtatagaggaataccaggatttgagcaccaccaaatggaactcattccctgacatcccaaagccatcagaataacagtagaagcgtcaagacagttactatatgattttccctgcaagacattcagtaatctatgattccccctgcttaaattttatctcatgccttcttccctgaccagttcaacacaagcagccctgagatgtaatatcttctcaccctgaccctcaaagtgtgtctcatgctttctaacagaggccatcctcttggaggaagacttgtacttttggcctgtagccccaccctccctcctatggcgttcttacagtcagttctgcagtgagtgggacactttccaaatataatagcaaatggaaacttctaattacatctgcacataaaactaatgttccaaatggtggttgcggttctggtgagtgcttataattttttgttacctcagcatccatttttgaatatgtttaacttttaataacagaagcaagtctcagtcaccattgacagtttccagtactataccccacgcaaatggctctagctggtggccagagataaacatgcagtgatgtgataacagggcactactgcagcttcaaactctggttcaagttcctcccacctctgccttttcacctgcttgcttttaaatccaccagttagagctctccagaggaaacctaactggataaagttgctggcccaaaggtccgttcctcccttccctctccctgttctccctgatctccgtgtgtgtgtgtgtgtgtgtgtgtgtgtgtgtgtgtgtgtcctctaggcaagctgtgtaccacccagggtccgtaagtactaaaaactcttaaactttcacaccgctgtgttattgaaaccatgcctacaatccagtccctgaggcgaggccaccctgaagggacagactcatgcaggcggatcccctggtcttgctcttctgtccctgcctctggtggctgctggggaacagtagctaccagctaagttgatagagacactcgaagaggttcattcaaaacactggtccccgagcagcccagtaagcttttaaacgcataacattttgtttgggtctcaaacaagtcacaaggcacggatacggatgcggctgtggctgatggctatttggatgctgcccaagcctcgcagtaggaagcagcttcagactgcagcagggccgcatagcccgatagccaggccctggggcacccagggcaccagcaagacgcacagaaacgttttgaaaaacattttaatatacttaaaaaaaaagtaaaagggaaaatcagaagtctttggaagtttcctactgtttttatgtcccatagcaaatccgaggaggacgccccaaactttcagttccctggggttttgaaggtgctcattgggtcctggccacccggccttctcagaacctgggccaggaggctgagctccgcgcgggggtggagggagaggaggaggttcctgccgaggtgcggctgcgcggtgcgggagccgggagcctgggagggcaagggcatcctgaggggcggggccggggggcggagccttgcgggctggagcgaaagaatgcgggggctgagcgcagaagcggctcgaggctggaagaggatcttgggcgccgccaggtaagaaggcccgaaggcctgctggggtttgggtgagccgagccgaggtggcggcggcagtctgggcccgggcggagggtctgtgggggctacccccgtcctcgctttccactcgacccctgccgggcgagcctcccgaggcctggcccttccaacccgtcaccgcggcccggtgtcctagccgaacgctggcttcattttatctacgaggaaggagaaacggggagcgcgccctctcccagaagcagccccgttacccccgtcgcgccccccattccctcgggggcagcctcgcacccgggcccctgccatcgctttcgtctcaagggaagctctagcggtccagagaaactgcgccgggggaaaggccagccctccgtggtcacggcagttcctctctcccctcgcggtctaaatgtgtaattttgaaaagcaggtgtcgggcgaaacggacttttttttttttttgagatggagtttcgctgttgcccaggctggagtgcagtggcgcgatctgggttcaccgcaacctccgtgtaccgggttcaagcgattctcctgccacagcctcctgagtagctgggattacaggcatgcgccaccatgcctggctaaattttgtatttttagtagaaacggggttttcccatgttggtcaggctgatcttgaattcctgacctcgtgatccgcccgcctccgcctcccaaagtgttgggattacaggtgtgagccaccgcgcccggccgaaacggacgttttaagtacaacgtgatgttttgttttcttgggtcggctcgggccgcacccttcttagagtctgactgctgacttttcaaaaaacaacattaacccgggaggctgaggtagcggtgagccgagatcgcgccattgccctactgcctgggcaataagagcgagactccgcctcaaaaacgaacaaaacccacaaagaacaaacaaaaaaaaccaacattaagcagtgt

SEQ ID NO: 5164 - DNA, 6000 bp, Homo sapiens
gacaaatatttctttctcctctcgaaccactagtcagcctggatattcatgaaagctgaaagaaggggtgccaaaatgcctagctcctggatttagactcatggaatatgagaaaggcttagggaaaattcaagtcatggggagattcctgctaggtgatgccaggaatctcaatgacctgttgattagagggtctctggtcatttccacttgtgtgtggagaaatacatcatttgcatatgtatctagtcaagaagcccttttggagcaaagtggttgggaaactcatttactgggtccaccaaaggaaacccaattctgccatgtttttgcaaatactacacgtccctttgctctcaatagcaaaagtgatgttatagttttttttacttttgtcagaatcaaggcttcggccacctgtgcaatattttcccatggaatgcagcagtaaatccaagtaggtatatccgtgctcagagagaattctccatagttctgactcctgaaaaacaagtctcattagctctcatctagtttgatgactaaaagtgcacagcagttataccccagtggaagtgatttttctcacctagctgctctctaactcttacggctatctagttgtctgagctgctggtttgttttacttattctccaactgaactcattccaaaccaagaaaaaggaccaaatgaaattttcagttattatcatacttgctccttgaataagaatgctagagtctggaggcagaagaagactaagttaaaaaaaaaacagcctgaaggaattctggagtgagttttgtaagtctaattgtcaaagaagataaatggtctcagtatctgtagtaatttctggttaagcctagagggatcactgagtgccaatccaagcaggtggcactagaggcagattgttctcctagcatagagtgagtttccagctgctcatgacacattttcttatgattttccctaaaagaaaaccaaattttctactccacctcttcctttcctatcattccacttattgttgctgctttgctaacagccagcttagtaagccatcacacaagttagtgtgaggcttggttttaaaatagataacagagaatcttgattaaatagtatccaactttgtagcataacacagctaattcaggcaatgacatagagatgataagaaacaacatggtttggtagagggaacatttgatttagactctgcccatttttagctgtatgacttacataagtcattttgtgtccaagcctcattttctcccatatgaaaagtgaaggggttggattaaatgactaaaatccccttccagccctatgagcccaatgtattatgatctctgctttgtttccttcttaagaggcttcctactataaaatgtgacctatttacattttaagttgaagtagcccacaataatgaataatcaatttagatttttctcatctcctttgggagaaattaaattcaagcctctattcatttgatgttttacaacaagcttcaaagttggccatgttcattcacagtttgatattttgagacaccaataaaagttttttaataaaagttcccttgacttaaactcaccttcctaatagaagtagtgatttggctcacggaaaaatgtttccagagtcaacatgagaggactggatgaacctacagcctcactcaagctgttgcatcattgctgctgtagcaacagagccctctctgaatacccaaaacacacaattttctccaacaattctaattgcccacccagtatgggaatttgagagcctttggtgaataaccttgatcactcttttgaaatttggtacaacacttgcacaatcacggcaactgtttgtaaatatcttttcttctccgccagtatgtagacatgcacacccattcacaagtaagcccgcaaattcattttcacattttcctcttggtttgtttttatcatgggtatcacattgcaggaagagatgctctaacttacaagaatggaattttctgactatcattgccctcttcaaggcctgattagtttgtagggtggatgggatacaatgcatggtctacaaggtccatgtcaccagccatgatctttaaacaacctcttgcactttctggcactgctgcaatggcccatggtggacacctctgctgtttgtccaaacttctgctaaatagagtagtgttggtatttgttgtgttgtgaactcctttgttgtcagagaagacttcagctcttcaggtttgcaagggcaagatgtaaagctaggactgaaaggattgggttttgtttttcggccggcttttttccattagtgcaaaaaacctgatgcaagggcagcaagataaacacaatttcttcattgacccagataagaacctgtagaaaagtgagagatgcccctaagttcctatttcatttatcctaaataatatcctgaataactactgatcagtttttttctatgtccagccttgcttcactttccaacctccaggccaaatattcattttgatattttacaaaatccttctggtttttacacagggcccttttgtgctgagaataaaaccagctattggaacagacctcactgctttgtagagtcagaagttgacctagagaatgggtagcaacaggtcctcagtttctctggagacacccccaatccttgggtgagtgttgaaacctgacaactgactgttagccttgtcatcatcctcactggagatggagatgttgcagtcggagcctcactccttctggggcactgtttcttctcatggcaaccattttgcctgcctggaaacagcctgttgcctttgctagggggcaaatacacacactagccaaggaagttggtccagcacatctctgaggtttctcccccatggacccatggagcgaattccctgagataaatgatcagaaagttggctgtctggtggtttaatactccataagagttacttcccttatagaaagtcatcctttggcatctagatttttctacaaatcaccttaactccctccctttctctttctcctggaaaacctcagcattgcatctccatgttgcacaacacagatcagattatctggtcactatagagatttgtatataaaaaaactacttttttgaggattttgtatattgtttttctatttgttttctacagcttgaggaaagagctggcaaactgtgaatctaacttgatcttgttgccagcagatatattttggcttcctggtaagagtctgtgttaccagggacaatatattgccctctgatcagtattgcaccctaaatccacaaattcctccagcccagtcttacatttttttaaacaaatcccctagcttgtttgctattatttataaagagcattagaaaatgtatttatagacctggatgttatatgtttaatattaatttagcctttaataatgttataggtttgtaactattcttcagaaattataaagaactcagtgtagactgaattaatctatttagtatctgtaattttgcagacatattttcttacagtattttctatgtaaccacacatgtagaattataactaattagagcacaagaagtttcttcagcaatttagagctaccaattgtttcttgactatatagtcacatttgacaaatttaagaacccagtctttagtgatgcaataaacaaaatgaaccattaagaacaaggaattgcttaaatcccttagctggtgaggatatacatctaaataattcatctttctaactcaaggaatggtgctgattttttaaatgtttgacaccaggccttgtttttccagctgagcattctcattttgcttttctctaagactatcaaagacaaggtattaatagtaggattattcctagatcagaatgtttcatacattcctaaaggtttatgtggaaattggcttaggaaaactttgagtagcagagactgaggatgagtgctagagatgaaatcaggacagatttgttgcagttaattcttgccaagcaaattagtggtaaatgtcacattgttatgtgaattgagcacatatttttaaagaaagtttacaaaaaatttttagaaccaactatgaggcaatactgtatcactgggggctgggagtgggggcttagaatcatactgaaattgtttaaaagcagcccaggtagtttctgtcctcaggtgaataacagactatataacttccccgaaaggtaaaacgatagccactgcagagacgaggtgtcttccttccaccaaatactttctgagatggtggtaggagtagtatttttaccgtggtttaaaaagtagtcagttacatagaaagtgtattggtatgtatttgaacctgctcttcattaaacaaacagattagatgtaccctcgactggcaataattgtatctattttcaagtacagctagctgtcaaagcatgaagctcttgtgtatacacactgacacttggttcacgcatgaagaacagtgcctatgcactttgtgtagctataatgtaggtatctaggtgtaatttcagtgaaatggtgtatagatgtattgtaatttaaatgtatatgttatttttggctattcatctaaatgcagtagacatgttgatcggtgttttgcaaacatttctttttccttcttagataactagtcgtgaatcatttctcctctttctcagtgtggcttgggaatatatatgagtgaagaatttatctgtgaatcctttgtactgatgattgtttgaaagtctgtgtgtgtccagcacctttgtaaatacacaattcagagcagggatgggctgggtgtgtgtcctggttcttagtgaaaggtcatctcatgtctgtttaatacatggtgaatgcaactgtggaacttttgattacctagacttaggtaggtttagaatgagaacatccatctacagtcctcctttgcttggtggattgggctcagaggaacaaaaagttagtctgactctgtgcatattagcatcatgtctttagagaaaggtcagcctctctggttgccaaatactcatcatgatgctcatgacttaaaggttctgaggagccttgtctcccttggatttttgagtcagggtacaggaaaaaacattgctgactaactaactgcaaatgcatctgcaggtgaaaccctacgaaagcacagttctggctataaacttcagagttctctgtaaaaaacttagagcactagaagcacaggaatagtgagtgtacagcttatgcggttgtagaggggcaactgatgaacacaggtcccacatatatgagggagtatgacgttctctacctaatatgttctgtgtgcatgttttgaatgattgaagatgggattaactaatgcaagtttacagttgcctcctaaaacacacattctgtataattatcgctaaatacaatgctgtgaggtctatagttcctgtaacccctttctcctccccaaggacagagaagaactagccatgtgctatagggaaccctgagtgccctactcttttcccaagaagggtaaagcctacaatatcatcagggggcatgaagcacattaatttgcagtggctgcttcatatgaggagatatggtggacaggctaatttttccttgaaaatgtggcttcttcaactcctttcaaatttaggatggaatacttcctgaaataaaactgggctttatgcaggattctctttgaaaattcttgtatgtccagaacaaaagataaaactaattgtattcctcacattcacaatccccattggtctgaagtcacgtagcacagagcatctatagcacatagtgtttaaagactaatgaatgcaaaaagataaaatcttcaactaatttttgaattgtttctcatatatgctactagaaaatgccttgttgatgaagcacattttgggtagttgag

SEQ ID NO: 5165 - DNA, 6000 bp, Homo sapiens
tgtagttgattgcaatgatcactctgattctccacttgctttcgttttatacaactttgcagtaacctcctgatatggtctggctctgcatccccacccaaatctcatcttgaattgtaatccaaattgtaattgccatgtgttgggggagggacctcatgggaggtgattgcatcatgggagcatttccccccatgctcttttcaaaatagtgaatgagttctcaggagatctgctgattttgtaagacagttttccctgctcttgctagctttctgccacctgccaccatgtaagacatgcttcttccccttctgccataattgtaagtttcctgaggcctccccagccatgtggaactgtgagtcaattaaacctattttctttataaattagcctgtcttgggtatatctttatagcaatgtgaaaacagactaatacacttccccttgaaggtggaatgacctgccctattccctgacaatgggctcaactaagtgattttctttggccagtgggaagttagctgatactattcacacagaagcctgaaaaggtactcatgatcttctgcttgctctattggatttctgccattgccaagaaatatgcttggtccaagctgaagaagagagagagagatgcatgtggggtggagcccagttgcaccagtgactatagctgagaccattctagatcagcaagcagttaactcagccactagatcaaaaagatcaaaaagagccacttaaccaatttctgaccagcctttagagtcatgagaaataataaatgattgttgttttcagctattaagatttcaaatggtttattatgcactcattgctaactgattcaaaagttatacttcattgctgaaatcatcttatttggtggcatcttctcttagcttttctattttaataattatgacaagtatctcatctttttacaattttgtgcaccacagtgaaaagaatagtcggtaagagaccaaaaaatgtaggtctttccatttcctaagagcattatcttagacgtttattcactcaacggtgtacaaagcattagaaatacagacaatgctcttgtgaaatcaattatggtttggaggttgggggggacatagacatgagcaaatcatttctatccatcacaataagtaatagtaggaaatatgtattataaccacaacctctgagatgaaataacctgagttacaatcttgcctctatcacttcctagctaggttcccttatttaacctcaagtccaatttcatcaatggcacctacttcataagattgttggaaggattacatgagttgaaatctgtaacatacatagagacaggcttggcactcgcaagctttcattaaatgctagttattaaaacaaatgttaaaaagtatgagagaacaaaaaataagactatatgggatgagggctgagtggaggagtagccatcatgggtcggcgggggaccttgaaaaaaaagcagaaatttgcacatcagtatttaggactttaggaccttttatctatatttcaagaaataaagaatagaggattattaggatatcatctagttccaaaatacaatatctatagaatattatctaatgtaacatgtttagtaaactcctgctgagtattgaattttaaattcaaagtagttttgaaaaaataagttgttttaatgaaattaattcacatgtcattacgtgtgactatacaggcaagcttgatacgattatcccggaggatattctggtccctatgtaatactattggaagtgaaaagagaatatttatttccaggatttataacacagcataaagacacaaactttaagtatgtattgtgcttcaatagagttgcctacagcttgttaaatccaattaataaacacaatagacacattcacttttttatttttaagcaaagttactgaatttgttctatttgctattttgtatttctgattacaagatgctgtcccctgctgtttgctaatgattacaccagctatagtcacgaacatacagtgaaataagataacagttttgtttaatgtctcacatctacaaatcagagaagaacaaaagtagaaatctgcatgtccgtagaacaaatctagcatgctagcactgtgcctcctcttctcccaagtcatgtcatttcaataagcattttgtcctctccatgcttttggtaactagatgggctaatgggaagggtggtggtgtaatattatttcttctgaaagagcttttatagaaatttttacttgaacacatactctgtcattgttaatagtacctggcaacctctactgcataaatatctataattatgttttttttcagcaacaatttggtttgcatgtgtactttcatgacagttagcttgtttactacttattccaattctttttgggtgaggtcattcagtgacaaatgtggtattgccatcctctgaaagggttacaaattcatgcctggcattcagggcagaaaatgacagcctgcatgctgataattgatatacagctgttccccatgttaccaaaaccttaatgttatcgcaaaactggaagaactggcattgagtagatctgggttcaaattttggctgtgtcatttaccaagtttgtgattttaagcttcattttttccatcttcaaaatctctcagggtgttgttttgagtactaaataaggtgatatatatgagaaaagtgtaacaaaaaaccatgccatatggatgctcaataatgactggttcaatctaaatctaaaaatgaaagccatgtgacgaattcaaggtcatatagtgtgaatgagtcaatgatgtgggtaaagatactgtagctgctgaaggggaaggttaacaggaaagagaagctgttcctttttccattttggccaaatagcacttacctgtccctgctgctttgcctaatagattaattcattctgatagtattaaagatgtctggtagagagctaataatcagctctgaaaaaaacaaatcattggccttcctttgctgtcaaaatccctaaaaagaaaattttcatttcaaatggcttctagcttacttcagaatcagaggatagactcctttgaagctatctagtgcagctagtgaatgtactttttaatcgtttattagtggataaactataattagcatataagggtaagagcttcaaaacacaaattaaagtcaactgcccactagtgttttgaatcaatcaatacagcattcacttaaaaatagaagcaatgccattaaccctcgagaaattcacattttcatgtaattcataacatcaaagctctccaaaaagatggggaaattacaataaatcacaatccatgtgtaaggaaaagtctttcctcttgcatgtactgacatctgagatgcacgttacagcatgctctcagtatgcaaagaacattacagatgaaatttttttaactcaaacaaggaaataccgtggagtataatgggaacagaagaggaaaaaaatagcattttgtataaacttagatatgtctctgatgttctcttaataaatcttttctcctttctgtttgatgctaccttccgttatgatttactcactttctttaaaactgtttttaaaccaagtacatattctgttctctcaaaaataaagaaaatcagtgcaaagatcatcacttagggcatacaaaacagaggaacatttatttaatctattccatatatatatatatagtactgtttaaattatcattcctaattttattgattcctatctcaaggttacatacataaatgacataaagtgaatgcccatagattaactgaaagggccttatgaaaattatacattggagaaagaaaccaatgtaaacataatattaatagcattattttgttggcccagtccctctaaggagacccagtgaatttgaaatgtgccaactatttctctaacacgagttaatggaaaagtccacatcctggagcaggggatgttggaattgagttgtcaagctgtcctggatgtcttgtacaaactgaacaggccaatttactgcaacactgcataggctgaaggctactatctcgcctttacagttgcttcctcctggtaagattatcctgctcgaccgcagcctccctcccgagtagcttttaagctactctggattctttctgatgagcctattctttttttttatttatttatttttattatttatttgagacggagtcttgctcttgtctcccaggctggagtgcaatggcccaatctcggctcactgcaacctccgtctcccgggttcaagcaattatcctgcctcagtctcccgagtagctgggattacagacgcgcgccatcgctcccggctaatttttgtatttttagtagggacggggtttcacaatgttgggcaggttggtctcgatctcctgacctcatgatccgcccaccttggcctcccaaagggctgggattacaggcgtgagacaccgcgcccggctaagcaatagtactgtgttaatcctcagcttgggaccagtgtgcttgactgggagaggctcttaacctgcaacctgaaagcaacagctttgtgtgtttggtgataattttgaatcttagtggtgatttgattttaatgtcttcctctttgtagctcaaaactcctggatttctggatgaaaacaggcaagctttttgaaaaaactgacttctcccacacagcctgaacctcccagcgtgggggttgcttttagactcagctgttctggctctgccctccaggtggcagcagagccacatctctgaagctccaatcccctcttccctgacttcaagtgttaatgcaattgaccaatcagtgctaagatgatgggaggtaattgggtaattgtattttactgatcacaagcagagaaagggaaaggaaaaggggaaagaaagaggggcagaggagggaaggcgactgcagtccgaaaggagcttttggaagctaggaccctaagcgtcaggacgtggcattggtcgagagaaagcctgggctggcaagagctgccgccggtgctgggagagcatttatttgggagaaaaagaggggagagagcagagggagggggaggaagagagttcaaaccgaagtggatggaaggggactggggtttctgccgcgcagggagccgtgagccagggcgatggcgctaagggcggcgcggagcagctgcgctcccgagaacgcgtctcctcgcagaggactagcagacatcgggaaggtctgcgccaacgggaaccaacttgtggctccaaaatgtacccaacgcagctggaaatgagatcaaagctgcagttgcatttgagaaggatgagaagagccagcgattagggaattttttttttacccgttttcttcctttttctttttttcttctttttctttttttctttcttttttcgtgtgtgttttttttaatttgcctaccaccctgtctgtcccctcacttcgccctccccatttgaaataaaagccccagtctcaacttccatcacctcggcgctcccggagccactaccggctgatggaggagaaggggacccgggggctggcaggggccaccggcgagggaccgcatcctgcgtctcccccgtgatcccggccccgaccgcggagttctgcaacacctggaggatctggaccgggtgctgggggtgggggcggggacagaggaaggaaaggcaccccgagccttaaaaagaaaaaaaaaaagtagcggggggaggaatgggtttcttcttgacagctgacggagccttgaaattttcctccactacctccgcccccgcccccgcccccgccccccgcactccatttaacgtgagattatgaaattgcagaggcggtggagggaaggagacaggatataaccggagtttggaggggagaggggaaggtggctggccgggtggc

SEQ ID NO: 5166 - DNA, 6000 bp, Homo sapiens
gacttggatttctggatcaggcctccccagtctctttttcccctttctcctttgtgccttaagatacagcccagaattgctcagaatcagcaacgggagttctgggagcggacctcacacctgggtctggactgagctgcgctacttactctcctcactgtcagtatctcttttctcctgggctctgcaagacctgctgtggggctcagaatttccaccccttatcccaggcaacttcctcctgcacatctcacctttggcaagggacttgggcttggggaacacccagtcagtcatggtccagcttggagaacctgcaaagtcatcaaatgagagagctagcagcacagagatgaaaactgggggccagagaggaaaagtaacttgcccacactgtacctgccctctccttctgctgtcaacaatttcagcctgccatgaactcctcattcctgaagggaagcatggcctctctccctgggtgcccgctatgccttcctctttagtccaccagcacccactttgtcactttgttcctccccaatccttccaacactttagccagaggaatcttttttttttttttagagacagggtttccccatgttacccagggtgatactgaactcctggactcaagcaatctgcccacctcagcctcccaaagtgctgggattatagacatgagccactgcacctggccaggaatcttttaaaaacacaattctgattatatcacactcctttgcctaaaaacatgcaatggctttccactatggcctctgagccctgttgtctggcccctgtttcttccttcaggctcagtcacactctcctagttgtgtgctgaaactggctcctccaagctcacaagagccaatgggaaatattcaggaatttgttggtagctggaaatcgaccatggtggggttactttataccagaaaaatcaacaaatgctaaaaatcctattttttttttctggagagctgattggtcagtccaccgctgctccatccccactgtgctgttccatcacaggaccgctgaacatgctgttgttctgcctggcacgctctcccctctttctttgctgagttaactctattcttcaacacctcagctcaattcttacttcttccaggaagccttctgtgatatttctgaacaagtcaagtctctaacattcaccttttcttcttagcctgtatcacatttgtaatttgacacgtgtgatgaatgatgagcacccgtcttccccatgggaatataaactttccatggcaagagagaccatgcctggttttactcactctctttgctgtatcacctggcacagtacctggtcatagaaactcacatctgctgaatgagtgaataaattagagaaatatacactagacaaggctctggcttctgtggcaggagtacttttgctcacacatctccacattctcctctgcatttcccagcctctcttgctgttacatttgtcctgttaccaaattctggccagtggaatggggtgctctgtgtcctccatttccagccatgtcctctagaatgccacaagtagtcctcaagtctctttctcttccctgcatggctggaagtgaaggaatcacaagacagaagcagcccagattcctgagtcaccaactggagaagagctgaccaaatgagtcatctgaccctccttcaattgagaaaggagggagatgtacgcttttattgagttcatctctgacattttgagttatttgttactgcagcagaatccagtttaccctgacctaaaacaccatcccagttgtcattaactcctactctttgggcaagccatgatgtctctgaatctccgtttccttattggtaaaataaaaggattccacaggtgatatctgaaatcgttgcaatgttaaaattcagttattccgctggtatattttcctccctcctgcatagcaccatatgtagacaccacaaatgtttgctaaataagagaacctcctatatttgaaatccttttctccagataaaagcattttagtaccttagaagttcagagtgattattcagaatatttaaacatctaacatgtacaatattgatcaaaataacaatgggaacatttcatcaagaggctggggaaccttcaaagatccatccctcagcctcgtagatgcctcctaagcatcttgctctgtctgctcttagaaatgtggcctcagcacttccaattatttgtgggtcccagcctcagactgtcttaactgatccactcagctgactcagttaactgcctttcccaataggcatactctcatttttcaaaggaacctagtgatgccttttttctgtgggttgtcattaaaggccactgtctgcatatcagtagccaagaagcaaacatcgtatctttgatgagatatatgagggtgactggttgggtagcaaaggtagcccagagtcctgatcactcaactgggctttggatcccctggggtctattcctagctctgccataggttcactgtgtgtgaaagaggcacaaggcaagctcttcttcttgggctggggtccctcttcctgttataaatgaaggccactgcagctgctgtcatcccagtaaccatagtaacaatggatcatgtgacaggtgtctgattccccatcagacattttctgatattaagtgttcttcatccttcccctttaaccccaccccagatcctgttatgagtagtggcattgatggtctcccagggcagccgtttgagcatgggagacctggagctgacagcattaattaaacctctatttccacaaaacattttgcattgccaggcccggagccaagaaaacctcccagggcagctcttatgtgagagattgctaaggctgtcaccagggactgcagtgcttcagctctacagtttgcagcaaatggggatcagtaggaaaatgtgcctggcatacagcaggcacacaataaatacttgtggaaaagtcagtttactaaaatggagctcatatcacaaatgggattccttcaaaacactggaaattctgcataagatgatcatatgaattattccacggttactgagtgcctgctatatgcacccatgggtgataacatggagactctaaagatgttagcttgttgaaggaatcccaagtccatggggtggctgaggctcaggggcacattgggaagtgtgtagagaggagtctggaaggcttagcagggaccacatcacaaagggatttggataaaggttgagtctcttgggtttattcttggagaacctttgagagctgtgagtgacatgatcagctttgtattttggacacctccttttgatgtcactgaaggaaagaactagagggagactattgttttgatcaaatagtgttctagaatttctgaacccaggccttaagacaactggcagcttctgcttcattcctcttagaatccagccagcatgctgtgagcagctccagcaccatggagaggtgacatagaggacaaccaaaatgcaccagctgacagccccattgtgatcccagtggcagccagcacctactgctcaccacgtgagttcaccattgcaccatctgcaatggtgtctggagagctgatgtcccagtccagctgaacccctagatgactgcagtcccagaagacaacatgttgagcaggaaaaccacccaactgagcccagccaacccatgaaatcatgacaagtaacacaataactggtctaagccagtaagtcatcggtgggtttttatgcaagtgtagatagctgaaaaactggaggacgggtgggttcccaggtggtggtcacagctacagctcagaggaaaaggtctggctggagaggctatagatttaggagacattggctcatagaaatgtgaaagctctgttgtggatgaaatcacctacatcccttttcacacatgcccagcacacctagagcacagccaacccacagcaaatatctgctgaattaaattcaacactccatataatgaagaacactaaaaagccactgttttcttgagctaagacagtcctcatgcccggaattctaatttccccttgttctaagcatagttttatgctcaccctctctgaatcaagtgtgtactcctagctgctgcattttatcttctttatcctcctaagacaagtccgtttgagtgtggacttggaatctgcaaacataagcttgggttcagggtgatgatttttctacctgtgcacctctcttctgagcctcggcttcctcaactatatataaaggtgcgaatacctgctgattaggtaataaaggtgaactcttgggcaacccttaaggggatgcagctgtattgtccatcttcagcaggacacaggtacagcctcaacccaaacatcccatctgttccctctacctgtggcctgttcctcttccctgtaagaaccatctcccaggttggggagctgggaaatctccagctttgtgtttgaaaaagctcccggaagacccaattttacagccagcttggccagctgctggggtagaagggtgagcaaggagctagtagtctgggaaagtgactcctagagtcgcagatctggttggagcccaggtttgtcctctaacacagtgtgacctccgcaagctccagcacttcttgggcccagttgtcccctgttgtacacaaagcattaagaatggcctgaaacaaccccaaggctccttccacctggaaggctccggctcctgttggggtgggggtccggtcacgtgttggcggggagggggttgccggttgacgtggctgcgggtccagcctcctctgacgtcctcgcagccgtcctccctccctccgtccccgcccctctggcggcgggagagctgctggctcgcccggatcccgggagctgcctggaggcgggcccggcccggggaaggtgagcggctgcgggacccagcccctcgccgggagcgggcaccatggtgctgtcggtgcctgtgatcgcgctgggcgccacgctgggcacagccaccagcatcctcgcgttgtgcggggtcacctgcctgtgtcggcacatgcaccccaagaaggggctgctgccgcgggaccaggaccccgacctggagaaggcgaagcccagcttgctcgggtctgcacaacaggtgagcgggggcggcgcgcaggcccttcccgggcaaggcggggttgccgggcagctgcagagggggaactggggtgggaggcggtcgtggatctttgcgcgacaaagcttggcggggaggggacagcagacgcgttggaggacaggtcaaggagtcaaaaaggtagggggatgggggaggctaggggatgggggagacgagacctgaaggagaattagggagcggcgagcttgtggggactgagagaagaatgggggccagcagcgagacctaaagggaggggacaggaaaggggacctggataagaattagggctgggaagggtaagaggagagggaggctgggaggggaatcgccagggttagggaagaccctgagaggtaccagagaatgaggagtttgcagaattgggaagaagactggggtctgtgagagggagatgggtggtggttgtggagccagggtagggcaagtcctgccagagctgagaagaggtaatgcctgcaaagccagaggggaggtggccgcggtcccgcaggagctgggaagctagctagcggggtctagagagctgaatccgggaggaacctgaaggactcttccccaccccctagcagctctgagctccagccagtcagagggggttggtatggcctcccccaagatgtctctgcagacgtccctggagacaggagggcttttatcccatgcatttgctcatggccagagccccttcgtgcaggaaatagcccgtgctcccattgtaaagagcagcagaaggggtctggggaagcagtttgga

SEQ ID NO: 5167 - DNA, 6000 bp, Homo sapiens
ctggtgccaggtgtgttggggtgggcagtgggaggtggggaccttcctaagatgaacatgggcctatggccagcactgcacttccactgcaggaaggctctagtggggaaccgggggaagcactgggtgatgagagcactcactgtggctctcgggccacaggggagagtatggcaatggccagcagagtaggttaaggaaggtcagcatctgtgctggatcccttcctcaaaggctagctggagcaggctccttcctcagaaggaagggacatctggcttcctctgatcttttcttcctcccaagacctttggtcttggaagagactcaccttggcaagctctggactggacccatgaggccagaggaaggaagacgaaactcccagagtgtggagcctcctttgatgagctgaggatcaaatctcccccagcacagaccactccctgccttcccacctaccagtcccaggagggccaagaaccctggggtggctggggcagtttgggcagcaggtgtattgtgcaggggacggggtcacaagataggggttcaaatcctggcgtggctacttccaagcccttagtttctgttttccctcgccaggatttgctggaatcctctaatttatctgggggatttggtcctgtaactgggaaaggaggagcactttctgtggctccaagaataaacagggaagggtgcccttctccctggcctctcagcctggatttgaggctggggttagaagttgcagccaaagccagataggctgtttgcagagaggccttgggacactgtggcaatgcttttgggggccctggagcccaagggcctctgtgttggggaagatgccattctccctgcttctggtggcctcagcctggagctatgggagcatcagggcttgtcccttggcctgaacattagctccccaacaagggacataatgagggaagcctggtgaggctaggatgaggcactcctttaagtagctgctttgcctctggcagtttcttagagcaggaacggagaacatgctagaggtgaatgcaggtgacaggttggtctgggagtaacttaatgtccctttgagggatttacagaaacccttctaggtgaagtagcttttcaaggggctttggctggaggacctggtggggcaggaaaggggtttcagtgagatgcggtgttccgaatccatgagctggcaaagcctggcaacctcagacccattgacccatggggatggtaagaggaggaaatgggatcatatgcacagtggctggcagaagtaaggcccccacctttttgttttatttcaacaacaaagaggttgattcatccagaagaggaattcatccagaacagggcagaagtgggggataggaggcaagtaagagggcttttcctgaaaaaggagacgcagttggaggctcaattcacttctgcatggccttgggtaagtcacgcaacttctctgggcctcagtttgcccagctgtgagatacgggagttggttcagctcacctctggggcccctccggctctattatgaatgggtttccacatcacctgcgggaaaggtctgctgggcctgtctgtttttgcccaggtttttctggttggaactttttctgcaggtgctgtgggctcttgggcctggagtctgggcacagctaagccgtcttccgtgtgcttgctgccttgtcactgtcccccatgagacatgggaaattgaggatcgccgcggcagatcttaaatcagagcctgggccatccatctcccagaacagactgaaataacaaggtgggtggcacagatcgcctccacatggacagttgaaagatattaaaaagccagaatcttgagccccccagatcccttaacaaatttccaaatacctcagggacctgcatgcagacgagagaagagggaatatctcattttagagttccctaggaaggccagagggctgcatttcaggaaatgcctctgtctgagggcttctgaaggccctgccacctgccattggcctccctagactgcctgacctccagctcctccctgcaggtgcccccactagagtcagcctggccagagtggcagagcagagtgcccaggtatgtggaagccagactgctgtggcgcgctgttgctcaccagctctgtaaatttgggaaagttgcttaaacttttcagctctcagtttcctcatctgtaaaacgggaatgacattggttacttcaaggggttattttgagagttaaataaaataattcacacaaagccaacagcacagtgcctggcccatcttgagacctcaaacattagccactaatattaatctccctcctgtcccataaatgagcccacccagctgctgtttcctttcacaggctctcctgctcttctgcctttttacattccaaccatctcttaagcctcagttcaactctctcctcctccaggaagccctccctgaatggccctccaagggtccacctccctctgacttccaaggctaaatttttttgtatttgattgtatttgtagtgacttttctttgctgcttcattgtgtaggatccaaactccttgagcacaagccctttgcttctgtttccccctcccccttttccccacggcacctgtcacagtgcaatccacaccataggcactcctaaaacacccatgtttgtcaagtgggggattccaggaaatgggagacagaatcctagtgtttctgagagcgggtcttttgtctatttttagagtttaaatgttcttcaaaaatttcccaaattccactctgtctttacattacaaccacaccaatcttttcatgtcagccagatgtacttttccctcctctctacccgaaatacaccagaatttgaaaaatgaggcgctggatctggtagtgcaagatagagaaagctttctctaaaccctgactattctcgtcagcctgaaaacttggggagggattaactctgggtgaaaaggaaggttctgatggctcagcccaaggctattagagcttggttttttatagagggacagtcacgatttggaaacatgaagtcttagcttttggaaggtcagcaccactcttgttaggcatctcagtacgctgccactccctgggtgggggtggggagggggaaggcaggtggagaaacagacttggtagccttggagtcaggactgaggactgactctgccatcccaggtgctgtggctacaggaatgcgcactggaaggtgctgttagcccctccagcttgatgggggtggagatgggggagaggagtttatagttatgagtttgcaattgtgaccaagataaatgaccatttggtctagtgggacccttggggcaagggccttcataccatctgctctgggtggagagagggagaccttcttgatgacccgagagcccagtcctccagggaagtgcagctgtcatgttctcctcttggcgagtgagtgaatgtttgttcctggctaccctgaacgcaacaatgtgcaattattaagtactcacccccttgccagacactgctgaatgctctacacacattaccatccagtgttcacaacacccctacagggtgaggatcagtacctctgtcttctggatgaggaaactgagccgcagagaggctgatcactcacacaaagtcacccagcaaacacacagcaggttcctctgacccaggaaactgctgtgctaaccattctgctgtgcttcactgtgtgggatggaggcagcagctgcttgcccatacatcggggacgaggctttcccagaatgcctggagttttcaagccatccactgctctctgcgccccagtccaggagtgatggagagctatagtcgggaatcagagattccaggtggagatgaaggctgactgttcctctgcttcagaaataaccatttggtcagaactgaggagcatcagaggttcagccagacaaagcaccttcctagtctccagatgaggaaacaggccactggggtgggcagcctcagtcatgtcagatgtggtggcagagctgggactcctggccgtcctctccagcccaggggccactgatcacatgatattgctctgctcatgcaccctgcttctcctccactccactctgagaggttcatcaaccagtccctggtgcccatgaaggccaggcctgtggaagatgctcagtcaatatttgtgcagaggatacaggcccaaggtgctcggctggccagctctgtccccatccctcatccataaaagcagtggtggctccagattgccacctagaaagccaggggcagtctggtaggaagaaggtgggcagtgtggaggagcggcctagaagacggtcagccagcaaacccactctaaggtcccattaagacaccccctgaccctgcccaagagggacaactgcagcggggacaaatgattcatccccacacttgagaagcagaggggcggggaaggaggaaaggctaggggtgtgtgtcagggtattgcacacagagatggttggcttcagttctgggttctgaagtccctctgtgccgctggctgggcaagaggtaaaggacagctgggccaggggccaggctgggactccagcaggacttccgcggcgaggggcgctgggggggcgaaaggctttggcggcccggccagcagcgccctcgggggtaaggggaagggaggctacgcggagaggtgccagagacagccggtgcccttgcccgccggccgcccgaagtccgggtggtgggcgtggctgcccccggcgggtgggtgggggcgggctccggagcctggctgcggagtgggtgtccagggcgctcgcggctggggcggcgcggggggcgggaaggcgcgcgccgaaggggtggggaggagaaggggcgggcggctcgggggtggagccgggaccgcagcgcctgccgctcgctcggagctgtagccgccgctgccgccgctgctcttggctcggggacgcgggcgggcgctccgagaggctctggtgcctgcggctgctgctctcctccggcgcccggggctgcggcgctccgggtcccggcccctgtcccggcatctctcgggtccctgagccccggccccgggtcccgcgtccggccggagagaacgcactcagctgctcgagccgccccgggctcgcgcccccgggccatgaagaggggcccgtgaggcgcgcgcggagtcggaggaagaggagggaggagggaggccgaggaggagggcgcgggaggcggaggatgccgccgcggctgctgccgccgccgccacccgcgggtccccggcgaccctgactccagacccgaggatggagccggcgctgggcgctgcagctgctcccggcgcgtccccgaccaggtattggccgggccccgcgggctccggggcgggcgggagcggacactccgccgcagcagccgggaggggcgcgggcgcggtgggagacgcccctccgctcggggacagcagctaccggcggtgagcggaggggtggcggcggcgaggaacggcggcgtgttgggcgcaggaaggggctgccggggctggtggccggtgagcgccgcgatcacctcagccctccctgcccccattcgaggagggcagcaaacttgagacgcgcggtggcccccgaggcgcttggctcccctccgctgcggagcgcactcaggggctgctccgggctcaccgtcccacgacccgcctggctcgggtctgcggaggcgccttgagaccctgaggtccccgcgcccgcaccaactttccaaacccagctgcacccggaggcgggggcgccgctccctgcttcctgctcccagccctggcccggcctccgcacccagaccgctgcgatgagctgggcccctgtggggccggagccgccggatggtgcagagcccaccacggaaagccggaacaaccctcccgctcttctctgggt

SEQ ID NO: 5168 - DNA, 6000 bp, Homo sapiens
cctgcggaccgaggggcgagatgggagactcagccctgggcggcggggcccgacggccgggttgtgcggctcgcgccgagccacctccctcacctgctccagcggctcccgggctgggccctgcgctcgcagccgccggccagggtgcgggaaccaggggagaggcgcgggccggtcccgcccccgacctgggctcaggtttcacctcagcggggctgagcgcgaaggggcggggtgacccccccggggtcctggccccgccccttgggccggcatccgacggttccccagcccgcgaggagcccccgaagcccccttctgggctgagtttcccaccaggacgaggggagggctgggggagcgggagcagccacccgcgaaggcccgggccccgctacctgccctgaccccctgccctgcccccgctctggggccgcgtctcctcccctcactccccaaggggaggggccagtgtccccgggcccgggatcaaagacactgcgggagctcgacacgagggaggaggagggggccggaatgcaggccgcagggtctgggacacctgctctggggacaggggcggagccggccgacacctgcgccagagccgcggagcacctgaagccttcgcctcactcccccactctcagtccaggtggcccggccgggccctgccggcgccgccaggacaaagcgcccttgtgaaggccgcctcccgcccgggagctggcgaggggccccagacgcgggcggcctaggctgcctgggcagggccggggatccccactcttgtccagatcgtcgtgattgtgcccgggcgcaccggcctggagctcgtctttcctccctctcccccgcgcaccccatagcaggccagggaatgggtggggggcgctctggaccctaaaccagcacagcgtgccaggccctgtgctaaggatttaatcaccctcgattaatcccatgatgcgggctaattctcccccggagagtttaagtgacctgttagacaagaacaccctccggcccctcccgtctcaagcggccccactccgttccccaggctctgcgctgcagaagcagctttcttgctcctcctccggaagggtctcccgccccaggacttgcccttgacgttccttctggcagcggagcctcccagggctggctagcactcatggaaagttgaagttgtttgcttgtttattgcaggtctccctcccagaatgtaagctgctcaccggactggaaccttgtctgtccagtccccagtgcccaaccagggcctgcacataccaagtgctcaatacctgttgaaagtggattggaatgagaatctcccctcccatgacctggaaagggggctcaggctgtgtcatttgcccaacttctggctgcaaaaagtgaggcaaactcaaaagaagctgtggaaagcagcccaacctgagaccccctttctctgggagatggggaaggtcaggctttgggtctctggagggcagggataatggttgctatggagactgatggtggctccttgtgcacccagaaattgagaagggccatgcactggccactcaggcgtctggagcttgagcctccagcctccctgatcttcatctgtagcctaaagctggggtggggaaatgtgattccctctccaggaccctcaacagagacggtttgtgggggttaaacatgtgagaccaggccagaacagtggcttatgcctgtaatcccagcactttggaaggccaaggcaggtggattgcttgagcccaggaatttgagactagcctgctcaatgcggccaaactgtatgactgcaaaaaatacaaaaattgctgggcgtggtggcatgtgcctagtacttgggaggctgaggtaggaggactacctgaacccaggaggtcaagcctgctgtgagttgtaatcacaccactgcactccagcctgggtgacagagtgagaccttgtctctaaaaacaaacaaacaccatatgggatccatagttgggtgctggcccaggatgagtcttcaataaaggggctgggggagtcagtgcaggaagctgggtctgcagatctcactgtagtcactcacaatgttggcccttcttctggctcaacctcaccactcagggaaactgaagtgctgagatacctgctaggcccccaaggggttgttctgggggcgtggagggagaaagagggacacgtatgggcatataaacaggtgctgttcctcttggcctaagacccattttgacccagctctgcccaggactttgctgtgtgaccctattagacgagtgaggctccatctctgggcctctggtactctcgtaggtaaatgttggactggtctacctctcttcccctgtgacttggggcaaactgaaggagagaggatacggctcaatctgcccaaaggtccttccagcccaacaaagacggccaagcccaggcagggggccagggagcaggggaggggcctcctgcacacaccgcaactctttgtctctgggccctaatccggcctgggatctagagaggaaattcaggcagccctgctgctgccaagctggctagacccatgctccccttcccagttctgcagggagggagaagaaactggttccagcccaagccccttcctattctgtcctggggagtctgcccctctcccctccacaccttgctctcagaatcaggacctccagcccaaggagtgctgaagaacctcaaattctctctctgtaccctctccacagctgcagagggagggctggaggagtggccaaactggaggtttgaggaacaagttcactaaggtgttggtgcacagcagggccctgcagggctcagtggctcacacctataatcccagcactttaggaggctgaggtaagcggatcacctgaggtcagaagttcgagaccagcctggccaacatggcgaaacctcgtctctactaaaaatacaaaaattagtcaggcgtggtggcgggcgcctgtaggcccagctaatcgggaggctgaggcaggagaattgcttgaacctgggaggcaaagtttgcagtgagctgagattgcaccattgcactccagcctgggcgacagtgagactccgtctcaaaaacaaacaaacaaacaaacaaaaaacaaggtggggcagaggaagggagaaggagcctcaccttgagggccctgagcctaggtcctaatcccagttgctaactggccttatgaccaaggagcctcaacatgtcacagcttttgtgggctgtgggcagtaggagagagggcactgccactggagacctgcgctgtggcctctttggccagtgccttgctgtgccatgtgggacaaatcctttcccctccttattgggccctaatttcccatctgtgaacagttcatagcaacttggggctgctgggaggagggcaagcaagcctggaacccagagcgtggccagaaatgatgtcgacgatgcccatgaccacctcctctgttctccaagacctttgcctctcctcaggcccctggtcacctttccctgggtcttcgttctttgatgtgagaagagggcagctttaatcccccacctgatagagaagaaaactaagctgtggagtagggtggagtgagggagtggaaggaaggttgtggtttcctggtgaggtgtgatgcttagacctggtctctaaaaataaaattaaagttaaaaaaaatgaattaaaaaaaaccgcctagtctctgaggtcagaaaagaccaacactcaaattttggctgggcgttcttaaaaggatgctttcttcatctggagatatctggtggagaggattaggtaaaataatgtattactattctcagggtaccataaatccgctggcccgctccctcaggccactggcccacggctccacccatgtcacgcccctttccccgcagccaatcagcgctacctccccagagcgcccgttccctccaccactcgccgcagatctcccggtgccacccgttccagggaggctgcttggtttgggaagatactccccaggggtctccccttcccttgggggcgcagctgaggactgcgaggtgcgtccgagggccagaaagctgagatcgattctgagttcaaggatcaagtctgccctcaaaccattttacagatcgggaaatccgagacccagagaagggatactcccgcccaagggccaccgagccgagagaagcccgggccagggctttcttcgcgtatgtgggaatgcaggcgcgagccctttggggggcacagtccatacgggagctgaggccgaagccggagcactaactgtgctgtctaggggatcgagacggcactagagggctggactccttactgcctcagtttccccagcactacctttgttgaggaaacggagatggggatactggccgaacgcgcgcctgctgagacacagtgcaactgtatttagacgccccgcacctccccaaatctgatcgaggctccttttttcaagcacccgctatctctcagccctttaaaatccggccctgccgttcgagtctctcggcgttccattggaaagactcggggctccagctcccttctctagaatgaactgctctgactgccgcccggctttaccggagctttaactgcgcaggcgcaagggcagccaacccggtaaacggaagagctgggtgctgacggcgctgggcgggtcaggggcggagagcgtgctaaccaatgacttgagggagtagggggccgggtttgggccctcagttgctaagggctacccgagtgggaagcggttcaagagatggggtgaagggtggttcaccggttcttcaagtcctcagccttctggcccgcggaagttaagcaaccaagaggcgggcctaagaccggaagcaggaaggagggcgcaggaagcagggcgccgcagcctgtcgtacggtccttctgtgggtctgtcggtgccgagggcaggatggagaagctgcggctcctgggcctccgctaccaggagtacgtgactcgtcacccggccgccacggcccagctggagacagcagtgcggggcttcagttacctgctggcaggtgccaccctgacctttgatcagttccttctgggccctgacctatgaccccagtggcccccttccctgcggagtcagggtagtgatcgctgtgcttgagaagacccgtccaggttcccaaagggcgtagggaggggatttccgggacccgaagacgaaatgtgaggcagatgctcactcacacctccttctgtaccctctccccaggtcgattcgccgattcgcacgagctgtcagagctgggtgagccgggctctgggggtgggggatgggggatcggctgcctggcccctggtgagttccccagagagggtgagcaccccagcccgaggacctgggctgcccgttagacaccttgtgctatgactgaatcggcacaaggtctgttgttcattgtcctgggccctccatgtccctaagtcaagagacacgtctggggaccttatctgagtattcactactggccaggcgctggactaagtgcctttcttacctttacttgttaatcctccctacagtcatattaagtggtacttattgtcatcactgtccatttaaggaagaagctcagtgaggttagagaacagtcactgatggtcccagaaccaagattcaagtctagatctcccagattccaggattcccagattgtaactacctcaagagtgtttgcccagtgactgctgtcacagtcctgaaagaatgcactgggttttgaaaagcagaggtgaggccaggtgcagtggctcacacttgtaatcccagcactttgggaggcagaggcaggtggatcacgtgaggtcaggagttcgagaccagcctggccaacatggtgaaaccccatctctactaaaaatacaaaaattagctgggcatggt

SEQ ID NO: 5169 - DNA, 6000 bp, Homo sapiens
cccgggacgctctgaggctccccagaggtgggttcgactgggacagggcgccagaccccctccggggcgagcgcgggccgggagcggcagtgggccggggctgggggaccccgctggaagcaaggccgggggctctcggaggcttctccaggtgcgcccgggtgcgcccgtgggaaggggtgggcatccaggatgtcgggggcgggggattgcccgcccacagaccccacggagccaggggcagccgtcgggggtgggaccctgtactccagccctcccactggcggctcagcagggcgccgggcgctgaagccccaaagagcccttttcccgccgtctccccgccctccctctccctccacccctttgcccccgcgctgccagcccactccggcccctggagtcctccatctacgaccttgagccccgacggaaaacacccctgccctccccgacacccctcccccgctccggtactacccccctttgctgcccagcctccaagccggggtcctccagctccaggccccctcctccggccccgcaacggaagtgttgggcacaatgtcggtgccaaatcttcgcctctccctcccttggactctggagtctcctctcccgccccagggacagatccaggggccacagccttcccagagccatggagtgaatgcccaagaaccgaagacctacaccccaaaccaccccacgggcgtgcggagcaccccctccggtctcgcccggggaagaggggtgtcgaggactcgggaaacacagtgcccacgcccagaggctgcaggaactgcgtgctaggggcttggagggagggcggggcacccgagagccagggctccttcgaccacggcggagacatggaggagcctccagatggcctaggaaaacacggccctcgaggcccgcccgaccctagcgtgagaaactgggtccccactttggtcacaggggctagacagtgcctctggggtagggtgcagggtgaggagagaaggaggacaagagtcttgcactcgcctgacccgagctctgtccgggcctccgccttgtgggtgcactgcggatgccctctcgccgcgagaatgggcggcttttggcaataacgcctcttaggggagttattagagctgagcgtgcctggtgtccctcaaggccaggttgggcgactctcgcagaggcccctcgacagatgtcagtcagaggctaggactctgccacatctttaaggacttggacacctctgggcaccgggctaagacggcgtcccaaagttaggtggcccgtcgcaggcagcccctagtagtctggcctcctcgcccgcacaacccttcacccacaggccaggtgcaatcccgatgcaggctcctggcccgaccctctacgcgctcaggcggacagctaaggtctggctgagtctccggcaggggcgtttggaatgtgaccggtcacccactctcggccctgcatttgcttgtgcatgcaagtccacaggtgtagaggcacccgaaccgtgtgcatcctcccggccacagcaccctaggcacgcacacgcatgcacatgcacgtgtgcacacggcgcggcatgctcacgcgctctcacgggcggactggtatccaggcgtggccgtgcgcacacacacgcacatgcatacagctactagcgtctactcgcgctcccccgtaggcacacacaaacagaactcgcactcgcgctcccgcccacacgttcctcgcagggtgccgggtggaatccgggctccctcaactttcccacccgagaaccccgcgcggagccgagggcagctctggggcggcgtccgacggggcctggcgaggggaccccgcgtcacttccccgggaggctgtgcctgagggctcctctgggttcgcagtcgcattggagttgggggcggtggccaacggcggccgcacggtctaggtccggagcgggcaccagggaccgacattgccatctagcggtgcgcacagccccggcggcggcggctcgctccccagatgccaggcgtatctggattccagggaaggcgccagagggggtcggaatgtctgcgggtgaccccgaggtgtccaaaacgacgacagctggggcggggcggagtcggggagaccctgagcctcgccctgtcagcacctggcagctccctcacgcgggccaagagcaggacttaatcaccggccatccagtggtcccggctcagcccagccgccaggatctgggagaagacaagacatcgcttgtcttctgggaaagctaagtcgagaagccagcaggaatgtgaggggaccctacccaagcctcacctggacagtccctcagttgtgtggttttcgggtcgaggggagcagaggcaggaggtcaactctgagcagtagcaccttggactttaagaaggagcttcccgggttcttctgcccccacccgtacttcctaacctggtgactttgggccagttgattaacattatcctcatctataagaggatatttacatctgtaagatgaggacactaataatacctgccttttcaggctgttgtaaggattaaaccagataatctatattaaaagctcagaggggttcctgacacgcagttaacactcaataaacaagagctattatgttttcacattctgcacttctagccccgtttgttatcatcctgctgccctgtatcctgccttgggaggctgaagtgagtttccttggggctggctgactgattactcctgcctgccctgtcccctcctccacgtgagtgattgggggagggcagcctcctggtgctggaggggacagctcagagagtgacacctgagcttctatttcagaggctctcagagccaaatggggttgtcagggaccccaagagagggcagtatgtggtctttgcccttgactcgttgtgtgaccttgggggtgacaacacttgctctcagcctctcctcctacgaaccaaggatttagaacaggagaacttgaactatcaggctaggaggctgggtctgtatctgcgacggtggaatagaagggctggggtcagacttggggcagttaccctggcccttggccccagcctgcagtacatttttgtgtttatgtatagagatcaagtttaggtgccaatccctatagctgctggggaggatgtcccaggacaggatcctctctattctgcaaatgagaaagaggtgcaggaaggggcagtggatcgtctcaggccacagagccagagcccaggctgcgggttagtgctccttcctccacagccggctgccgcgccctctcttcctctcacacacagacgcacagaactgcgtatccgaccatgcctgctgggctggcgtggctgtgatgggcccgcgtgcgtctgtggagcggtgtgtgtgttggcgggtgtgaaggaggctgggctgagcggctgccctggcactcagagctggcgtgggcctccctcacatggagggaagaggaagagggggaggagagctaagaggagcctggtgggagggagggcaggctcagggaagggcctgtggtggggactccagctagggcgccgcccggtgtgcggagtggactgtggaggggagaggcggccctggcagcccttctcttccctctgggacaattctttcacctcacgggtccccagttgggcctcagggttctctgacaacctagtgacccctgcactgcctccctcccagctgcatgccctgtggctggagctgaggactccttgaaggggatgtgacagttgcaggtacctcctgaagccccttctgcagggactctcctcctctctggggtgcccagctccatgcaccgcctctggtcccctgcaaagccttctggctcctggagctctttggcctccttcagccagagctcttaagttacgggactgccttcctctcaccacctcaccccgcacttaatcccaccagcaacatagtgcaagaagccgtgaaaccttggtcaggcttttaacagctccgtgcctcagtttccccatctgtaagtagtagagaaaaaatggtatctacctcataggtttgttatgaggatgaaatgagttaacactataaaaaatgttgccaggcatgatggcgcctggagtcccagctactcaggaggtgagaggatggcttgagctcaagagttctagaccagcctggacaacataccaagaccctgtctctacaaataaatagataaataaatagacactttttttaagtgtcaaaagtgcttggcacttagtagaccatcagtgttaggtgctcatacataccccgattattgcctttgtcccagtgtcttctacaggggttggagagcaggtgttaagaaatgaccgaatgggtaaatggatgaacagaacacctccctccagagcccacatgctcgtgggcctctgggaccactctcctcctcctcttgcttccctgagctcccccagcactggcctctgtccaggccttgcgctgcctccaggcctttgctgtggctactgcccctggcagggccactctccacagctcctcctgtggctggctcctcatcacccagatgacctggtgggtgaggccacctagcaaggagtcatgcctgtcctgccttctgactcactctctcatcaccctgccttttttttcttttgtggctcacgtgtttgcatgtctccccccatgaggcagggggccatgtgtgtcttattcacttctgtagccacagcaccctgagcaatgcttgccacatagtaggtgctcaattaatgttgaatgaatgggcaaatgcgggatggcgggacagagttctctcaaggcattctgccagagaatgtccctctgtcaccttgaatccagtgtacctccagatgactcccccattccctcctgtagttcatgcttttctctccccttcctccccagacacggcctacccacccctggcaaccaacatggccaacttcacacctgtcaatggcagctcgggcaatcagtccgtgcgcctggtcacgtcatcatcccacaatcgctatgagacggtggaaatggtcttcattgccacagtgacaggctccctgagcctggtgactgtcgtgggcaacatcctggtgatgctgtccatcaaggtcaacaggcagctgcagacagtcaacaactacttcctcttcagcctggcgtgtgctgatctcatcataggcgccttctccatgaacctctacaccgtgtacatcatcaagggctactggcccctgggcgccgtggtctgcgacctgtggctggccctggactacgtggtgagcaacgcctccgtcatgaaccttctcatcatcagctttgaccgctacttctgcgtcaccaagcctctcacctaccctgcccggcgcaccaccaagatggcaggcctcatgattgctgctgcctgggtactgtccttcgtgctctgggcgcctgccatcttgttctggcagtttgtggtgggtaagcggacggtgcccgacaaccagtgcttcatccagttcctgtccaacccagcagtgacctttggcacagccattgctgccttctacctgcctgtggtcatcatgacggtgctgtacatccacatctccctggccagtcgcagccgagtccacaagcaccggcccgagggcccgaaggagaagaaagccaagacgctggccttcctcaagagcccactaatgaagcagagcgtcaagaagcccccgcccggggaggccgcccgggaggagctgcgcaatggcaagctggaggaggcccccccgccagcgctgccaccgccaccgcgccccgtggctgataaggacacttccaatgagtccagctcaggcagtgccacccagaacaccaaggaacgcccagccacagagctgtccaccacagaggccaccacgcccgccatgcccgcccctcccctgcagccgcgggccctca

SEQ ID NO: 5170 - DNA, 6000 bp, Homo sapiens
tcccagctactcaggcgactgaggcaggagactcacttgaacccaggaggtggaggttgcagtgagccaagatcgcgccactgcactccaacctggcaacagagtgaagctctgtctcaaaaaaagaaaaaaaagaaaagaaatggaggttttgagggtttgcaatttaaaaaagcacagaaatgcaaatgacactattctctcaggctttcacgctttcactgtttctggtcttcagtagtagccccctgaacctagataaaagcaaatctgttgctgaaagttagtaaaacttttccttacattctatgaggtctttcctggctcaaggcctttgcacacactgttccttctgcctggaaggcctcatccactcctagcctgatggcttttactcagcttaggtgtcagtgcctctggcaggccttcctcgaacccccaaacctaagtccagtctttcctttcatagaaccctgtacttttccctcaaagcctctaacatttgtaacttcaaattcatttgtgggagcattttttaaatgcttctgcaaacttgcagcccccttcaaccatcagactgtaagttccagggacccaatatatttatttgttcatcattgcctcagagtgcctggcgcataatataccctttataagtagttactgagtaagcgaatcctgaaattaagcctctctaaagcaaataggtataggattctattagtccccttagctgtgccttctcttctaaagttttaagaactggccgggcgcagtggttcacgcctgtcatcccagcactttgggaggccaaggtgagcggatcactggagaccagcatggacaacatagtgaaaccctgtctctactaaaaatacaaaaaaaaattagccaggtgtggtggtacatgcctgtaatcccacctactggagaggctgaggcacaagaattccttgaacccaggaggcggaggttgcagtgagctgagatcaggccaacctggggcccagaggcagagactgcagtgaactgagatcaggccaacctggggcccagagtgagactccgtctcaaaaaacaaaaaacaaaataaaacaacaacaacaacaacaacaaaaacttatctccattcacattgccttcaacaagaaagtgattctggaaataagatagagtaattctttgcagtctcatgttttaatcttttaaagcagtttctcaaccttggcactattaacattttgggatggataattctttgttgtgggggatgccctgctcactgtagaaagttaagcaccatctttgaaagttaagcaccatctttggcctctattcattagatgccagtaacatcaactccccaaaattgccgggtgcagtggtgcacacctgtagttctaactacttgggaggctgaggcaggaggatcacctgaggccaagagttcaaagcagcagtgtgctgtagttgtgcctgtgaatagtcactgcactccagccttggtaacagtgagaccctgtctctaaaagaaaaagcatggtggctcacacctgtaatctcagcactttggaaggccgaggtgggcagatcacctgacatcaggagtttgagaccagcctcgtcaacatggtgaaaccccatctctactaaaaatgcaaaaatttgtcgggcatggtggtgcatgcctgtaatgccagctactcaggaggccgaggcagaagaatcgcttgaacccgggaggcagaggttgcagtaagcctacattgcaccactgcactccagcctgggcaacagagtaagactacgtctcaataacataaaacaaaataaaataaaataaaagggaagaagaaaagaaagagagaaagggagaaagggagggaaggaggaggaaaggaaggaaggaaggaaggaagaaaggaagtctttagatgttgccccatgcctgccaattcacctgtggttgagaaccactgtgttgaagtgtgaaacttcaggccttattctcttgtagaagaattacatatagaaattcaggttgttgaatgattcccgggttataagagaattctaccaacccagttggatcaaaatagtgcccacccctatcttgtttccgtagcactccctgcgtttcctttgaaaagaccattagtgatggtctaattcagggaaatattctgatcttgggaagaaagaatgctgggctgttctagaaagatgaaggaaaggggtggtgtttctgaggaaaccaacgcctctgagacccctctggaattggcagtcccctacaacttttctaggggcatgtcccagaggacagtgaaagggagacaaacagcccattctggcctgcttttcaggatctctcactccaaacaagaaagtctgagaggcctggtaaaaataaatatggcttagtactcctggcacaagagcagtctctgacagccaagacttaactcaccctagggggtgacccagacagggactatgcacgaagctagtttcttacccattgatattcccagtgactcacagcagccagggatgactctgtgcaccagaactgtgctgaaccgtggagaaggacttgggatgcacataggaaacagtctctcaagctgagtcagacagggacagcccgcctctcgtttcttctccaattccagaaaaacaacacaaatcatgcctctggaaaggaacctgtcctttgcatacagagtggaaactgtttataacttcttaatcccctgacattgaaagtatggggactgcctatcctggatttctttgggacaactgtactggctctaccacaagtccctagttttcagctggaaaaaaatatggtctccagaatcccaaggtcattcccaacagatttaaaagcaagtcttcggccaggcagagtggctcacgcctataatcccagcactttgggaggccgaggcgggtggatcacctgaggtcaggagttcgagaccagcctgaccaacatggagaaactccgtctacgaaaaatacattagccggacgtgatggcgcatgcctgtaatcccagctaccctactcgggaggctgaggcaggagaatcgcttgaacccgggaggccgaggttgcagtgagctgagatggcgccattgcactccagcctgggcaacaagagtgaaactccgtctcaaaaaagaaaaaaaaagagcaagtcttcataagcaacatatatgaaaccctgagaccaaccaaacctgcattaggaaatgagaggtgggaaggaggatgctggggaatcagcctctacttttgacgttttttcctccttggattttaggctgtggtaactgatcgaggccagaaatgttgacagtcttgcctagccccaagatcatgtaagcctgacctgacgctactgccgccttcagtcagcaagaagaactacacacccagaaaatgcttcagtaatagttaccatggtgatgctagttcaaccacattgcatctggataaaaatttcaggcaaaacgatatagaaaactactgcctaacaaggagttaacaccttacatcttttatgttgttgttgttgctgtcgcaaagtatggttcatgttagctttggtaaaagatggtaatttgaagtgaaagtactgaaaaaaacaagcaaggatgaaatgtcaatgtatccatttagagaaatctaataaccactttgcactatgccaaattactttcccctcagctaacagggggcatttgggtcttcctgactctatttactggtgaggaaagtgagttaatgaaatccatagatgatccaagcccaagaaatgctggcatatcagctgggagggaaaaaagcgatatactgggccatcagaaagttgggcatttgggcaaaaggaacaaaacaagattcaacctggaaaaatggaaggtggtgaaattaatccgtattattaatatgcattagggagagtagaccacaaaaggaaggaagactagagacaagtttatgattttatgcagtaaatcaaaagttaaatctgagggaaggacctacagactggggctggaaggaggctgagggctttgtgggagtgcagctgcccatgaggactcctttcctgaccccctcccttccttgtcaggatcagaaagtcaaagaaggtgaagaggctaacaacagtgatttacaaagacagcaaggaggaactaagtctgtatgggccgaatctgggcctctgagctggagcaacaggacccagacaaccatctcaggaaatgagtgaatgaaaaggggcgggggggtcggtgaattatttagccctagaacaacgctgcctagaccgggggaggccagggagaagaaaatctccgaaaaggaattttgacagtgagaacgccagttaagatacagcactccaggccccctgatgtcccttgtttgatgtcaataaagacccaagaggattatgcatccacaagccttgcgtattcgcagacatcaaaaaagtctggacttggggccggtaggcgggggcagggtcacgtccaggcgacttgggtcagctcaggtgctcgtctgaagcatagagctggagtgagcgggggcgagacttgctgctaggataattttttttttttaagttagggaaatttaagcagtagtaatagcgacagggagggggctctctctcgggccaggaatgtgggggcggcctgaggaggagcggggccccgcgcaggaggcgccggcgggtggggtcgggggaccagggagccggggccgagggcgggaaggggccgggccggcgctgggggcgggcccaggcgcggtggcggtggccggggctgcggcgcggggggcggggcggtcgggcccgggacaccccctcccggtcccctggcggggcagcgtcggctctggcagcactggaggcggcggcggcccgagggcgacttgcggggcgcgcaggccgccgtgcacccgggacgcttccccctcggggaccctccgcgggcttctccgccgcgccgtccggcgggagccggcgggaccccgggcgagcggcgcgggcggcaccatgaggcggcagtggggcgcgctgctgcttggcgccctgctctgcgcacacggtaagcggcgcccgccgggaaagtttgtccctgggtccggccgctgcaggactcgcctcccgggacctggacggcgcgggccggggcctgagacccctcgccctcgctcctagccgtggccctggggctgcgtgcaggggagaggacccggagcggccccggctccagcagtccgagcgggggcatcagcggaggcgcttccgcgggttcgggtctgggccggggcgcgggtctgggccggggcgcgggtaaggtccggggcgttcgttcgctcgccctccctcgctgctctttcaagagcgggggctgcttccctttcaggttaggtcgggggctctgtgtccttggtgcgaatgaatgcgtgcgaagaaagggaggcgggtgaggagggtcgctaaacccataaattgtaaatagccctccttcctggggctgggggctcgggcgggttgcggagagaggccccggtagaatctggtacttgggcaccgggattcctctactcggagaacgattcccggactccaggtcttgctcccaccaaggggctctggggcactgtttgcgggcagcatctcccctcggcggtgtttcggggtccctctcttggctgcggccagtcagcttccagccctggatcgtcctaaagggaggtggttggaaagggggctgaggaggaatatagggaagaaactgctggaaggctcccgcagatctgccctggctggggtaggggggcagggggccggtaaccctgaaccccagaaggcagccgccgggccctcgcggcagggtcccagccctcgggggagctggacggctgcagcaggactccttggtgcccgtaccccctgttgtgtgg

SEQ ID NO: 5171 - DNA, 6000 bp, Homo sapiens
ctgtaatcccagcactttgggaagttgaggcgggcggatcatcgaggtcgggagatcgagaccatcttggctaatacagtgaaaccccgtctctactacaaaaaaaaaaattagccaggcatggtggcacattcctatagtcccagctacttaagaggaggaggcaggagaatcgcttgaatctgggaacagaggttgcagtgagccgagatcgtgccattccactccagcttgggtgacaacgtgagactccgtctcaaaaaaaaaaaaaaaaaaaaaagagccattttgtgatgagctttggtgtgccaaaaaagagagaactatttttaaaaagacaccttctcgaaggctggacgcggtgactcacacctgtaatcccagcactttggaaggccaaggcaggcagatcacctgaggttgggagttcgagaccagcctgaccaacatggcaaaaccccgtctctactaaaaataacaaaaattagctgggcgtggtgttgggcgcctgtaatcccagcgactcgggaggctgaggcaacctccttgaacccgggaggcggaggttgcagtgagccaagatcacaccattgcactgcagcgtggtcaacaagagtgaaactctgtctcaaaaaaacaaaaacagaaacaaaaacccttctctcttcttcctctgactatcagtgttgcatatgaggctcaaaactattttgataccggcctaaggaggaagagcacagggatggaaagaatctaggtatttggtaagactcttgtgtcacagcctcatccaactcagaaggctccttgaactcaggtcttcctataaggcaaaataaatataataaatatatgccggctgggtaagctggttcatgcctgtaatcccagcactttgggaggccgaggtgggagggtcacttgagcacagaagttcaagaccagcctggacagccttggaccaggttaggattaagacaggggcttgaattttgctaagatacaggcccagttaaacgatagctagtcattattctggcgatcacgagatataggagtaactttcccaattactcctatagataacatcactattgtacaacttaagattggccttttacgacgtttttcaattacttgaggttttttggtctttttatttttctcctttttgtggaaaatggggtcttgctgtgttgcccaggcaggtctcaaactatcctcccacctctgcctgaaatgctgggattacagacgtaaaccatcacacctggcagagataacatcactaacatagaatctaagattgcctttttgagatgttttggtggctactgactccactcagacccaccactcatgacatctggtcctgtggcctccatccagaggctgtcaaggaccgctttctatacccctatgatttcatccccaaccaatcaacattccccatttgagccccctgccaccaaagcatccttgaaaaaccctcacctctgagccgtcggggagagtgatttgagcgataacttaagttcttccacatggcccacactgtgttaattaaactctttctttactgtaatgccacagtctcagtgaactgattttgtctgtgcagcaggcaggaagaacccactggacaattacgtgatctctctcccaagtcagaccgcctcccagtccaggagacttttttttttttcttcaagacaggctcttactctgtcccccaggctggagtgcagtggtacaatctcggttcactgtaacctctgcttcccaggctcgagcaatcctcccacctcagcctcctaagaagctgagactacaggtgcaagccaccatgctcaattaatttttttttcttttttgcagagacggggtttcactatgttgcccaggctggtctcaaactcccgagctcaaagcaatccacccaagtgctgggattacaggcatgtgccctgctcccaagaggcttttaactggtaaatccattcagccttccctgggcttcatttttttctgagatggagtttcactcttgttgcccaggctggagtgcaatggcatgatctcggctcactgcaacctccgcctcccgggttcaagcgattctcctgcctcagcctcccgagtacctgggattataggcatgtgtcaccacgcccggctaattttgttttttagtagagatgggttatctccatgttggtcaggctggtcttgaactcctgacctcaggtgatccgcccacctcagcctcccaaagtgctgggattacaggcgtgagccaccgcgcccggcttctgggcttcattattgacctcttggaagcttttgacatattgactatcctttctttttccaaacttttctgttgacttcagtgacatgctgttctagttctgtttccttcccagttaattctgccccttttgacttccgttattcctctcaccactgcaatatgggtcagcaaatataacccatcttagggtcatcatactgaactgtatcagggaatgccattcagatcatagtctttgtgactggccccactctgagttatgcagtgcacagcctaggcagctgtacatagcacctcttcccttatctatactgctgacttcggttacctattctctgcagattcttcccaaaacctcatcagcagcttctgcctcacaccattggaaaatattgtggagcagactgaatcccccaaccacccacccctggcaagaggctctgtgcctccccatgctcactagcatcagtgggacaaggcaatattatttggcaccatcaatgcacaaatccaagaataaataatccaaccaggtgtggtgactcacacctgtaatcccagcactttgggaggcaggtggatcacttgagttcaagagtttgagaccagcctggggcaacatggcgagaccccatctctactaaaaatacaaaaaaaatagctgggcatggtggtgcacacctgtggtcccagctaattgggagactaaggtaggaggatcgcttgagcccaggaggtggaggttgcagtgagccgagattgcaccactgcactccagcctgggtgacaaagagagaccctgtctcaaaaaaaaaaagaaaagaatcccctgctaaatagtctctctggctcagctttatgtttctagattcagttagaagcaacttgtttcttacaactttattttttatttatttattcttttgagactgagtctcgccctgtcacccaggctggagtgcaatggcgcaatcttggctcactgcaacctccaactcccgagttcaagcgattctcctgcctcagcctcccgagtagctgggattacaggcacccgccatcacacccaactaatttttgtacttttagtacagatggggtttcaccatgtcggtcaggctggtcttgaactcccgacctcaggtgatccacccacctcagccttctaaagtgttgggattacaggtgtgagccaccgtgcccagccaatatctgtatttcaatataaagttttttaaaaaaaaccctttcctatgcataatttcacttaatgctcataataaccctgagagatacacagtagtgttagatttagatacaaaaactggaaattaaagtagctaaaatgacaaatggatgcagtggaaaagccaggatccaaatccaagtctttcccctacagtacttcactctgctccaagctcagattcaccaaatgttgtttgatagaacacgtgagctggggctgaaggagcagggacaatgcctttttcacttttgcctctgatagcctgtagactggtaggcactgaagtatttgttcacttgtgcaataaatatttattgagcacctcgtatgtgctgggcactgaaaacacaaccgtgaacagaggctgtcacggttcctgaactcatggagctttcattccagtggaggagacataatttcagtgataatgctacgacggggcacaatgtgggagaaaataagagggaggtggccaggcgcgatggctcctcactcctgtaatcccagcactttgggaggccaaggcgggtgaatcacgaggtcaggagtttgagaccagcccggccaacatcgtgaaaccccgtctctactaaatagacaaaaattagccgggcgtggtggcgtgtgcgtgtaatcccagctactagggaggctgaggcaggagcattgcttgaacctgggaggcgaaggttgcagtgagctgagatcgggccactgcactccagcctgggtgacagagcgagactccgtctcaaaaaaaaaaaaaaaaagaaagaaaaagaaaagggggaggtaattttagaatggtcagagaaggtttttttgaaaagataacattaatcaaacgaataaatgaatgaaaagccactcgctagcggattcattatttgctatacttatttagagtttgtcagtcacgagactgttacggctctgatgctgagtatcttttgaatcctatgttgatgatgcccaaaaggcaagtgcagagatgaagcataatgaagaatccttttcaatttcttttcagtcctctgaccttgcctctgccgtcacggtcacactcccccactgacactcccattcttctgtttccggacacttgcggcctggaagcgcatgtgcaagagaaaccgtcattcctggtgaagggcgagcccccggcagaacgcatgcgcctctgtcccttaagccccgccccgacctcagcgccccctcgcgagcgcctgccgtttctcggggcgggacgggggggcggggactgggcggagaggcgcgtgctgctgcgtgcgtgcgcgcgcgccgcgggcgggccagtgaaaccggcggccctggcacgtgacctaggaccggctcaccgggtcgcttggtggctccgtctgtctgtccgtccgcccgcgggtgccatcatggcggacgcggccagtcaggtgctcctgggctccggtctcaccatcctgtcccagccgctcatgtacgtgaaagtgctcatccaggtatgaggcgtcgccgctccctaccccgcccggcgccccgttcggtcgctgctgctcagggcgcctgaggatcggctcagccttgcgggcctttcattctcccgagatgctgctgctcctccgctgccctttacctccccgcagggacagcttcctcagtcccgcggccccgcttgggggcctcgccgagccctcgcctcgccgcccagcgttgaggccctctcctcccttagccaaccgccacccggccctgccctgcccggcggatcctctgaactttggttcttcgtcactgaggtggatcctggccggtcgccaccaaaggcttccgaaccctccctctcgcccctccgaaattcacattcaccactactccccccaaaatctcagacgcaaaacacgaaatactcagttgaagacaaatgtgaagttaggtgggaaccaacattttattttttattccttttttttttctttttatgctactgttactactgcttttctgttccgaggttttcgcaccagatactgagagaaacacaaggagctcattcagaagtgttaatgaaggggttgctctgtcagatttcggaaggatgcattgagcgctttccagcagcggcccatgtggctcctgacaatgaaaatcacatttgtcagagctggaaattagtgaagctgagttttagcgagtttaaacatgggagttagtttctaatctactgtcaaataattattacatggtattttatattcacatgcaggtaggccaagtaagtgatagacttagtgtttccagttcctttgctatatccctgtaatgggcaggtcattcttttttttatgcttttactgagagttgacataattacctcatgcactgtgcctaggaatggaacagtttttagaacccctgtctcgccgtctacttttctgtaaaa

SEQ ID NO: 5172 - DNA, 6000 bp, Homo sapiens
cagtaacttcttgttgtttccttgatatctgccatggttgggaatatttgcatcacagaaatcagtaaatgctgcaaaccaaggctttcccccttctttagagctgatttactagcacactactaatgtatttcacaagcatagttcctagggaaacaagccaaacacaaaaatacaagtactacgtgattccaattacagaaatttcaaaacagcaaaactagacattatttagaatttagaacaggagaatagtggatatccgtcagcatgaaagatagtgatgtaaaggggatgtgatgagggcttgtggagttttgttgataccctgtctcttgatcatgatgctgaatgaccagtgtgttcattttgtaaaaactcatcaagctgtacacttaagacttgtacattttatgtatgtatatgttaattaaaagttttcttaaaaataaaggcatagcatgatttcatttttcattcgaagtactgtgtgtatttgaagaaaaatgtctcaaataattactaccaaaatgttgacggtattcatctctggatggtgatatgttaagggaaaggacagagggttataaaatggtacttaagcttcctactttttatacttctgtataaaaataagcattttggccaggcgcggtggctcacgcctgttattccagcactttgggaggccgagacaggcagataaggaggtcaagagatcgagaccatcctggctaacatgaaattctgcctctactaaaaatacaaaaattagctgggcatggtggcacacacctgtagtccctgctactcaggaggctaggcagcagaatatcttgaaccggggaggtggaggttgcagtgagccgaaatcgtgccactgctctccaggctgggcaacagagcaagactccatctcacaaaaaaaaaaaaagcattttattttagtaataaaaattagcagaggaaaaatatatattttatttaaatattacaagcattttttcctaaaatatgttcatttactactccatttcatcattacattggagacagtattaccacattttctatttttcaaaattccgaagcaaagaaatctgtctacaaagttccctctgcaaatattcccctactttaggtaaagttagcataaggagaatgagaattaattactttgaaacaatggaattcagatgaaccattagggaacattcttatttatctatggccctatctttttgtttatatcaaatttaaaatttatactttaaatacaataaagtgcacatatttttaacatatgacaaaaagaattcaacaaatataaatgcctatgtaaccacccccaatttaaaaagactgaaattttaaaaaatcaaattacttggagaaataagttagaatttttatcttctagagctctgttattcagcatgcagtttaaagtccaagaatgctatgtctacagattaagaagtagccaaggaggctgggcatagtggctcatgtatttattcccagggctttgggagcctgagacaagaggattgcttgtggccagttcacgatcagcctgggcaacatggcaagaccctgtctctacaaaattttttttaaaatgagtaaggcatggtggctggtgtttgtagcttctgctacttggcaggctgaggtgggaggattgcttgagcccagcggtttgaggtgacaaagccagactttgacaataaataaatgaaagaaagaaagaaagaaagaaagaaagaaagaaagaaagaaagaaagaaagaaagaaagaaagaaagaaagaaagccagtgatttttcttgactaagtatttttcaaaggcaaatatgggtaaaaggctggaaataagaggaattaaaaatattttaatttttttctagaacacacctcatagatgagtataatactttgatttagttcatgtttgtttctacaaattctgacatgaagagtcaccttcaatctttttccaatagttaaagaaggaagtatagtatggcctaatgcttatcggtgggattcagaaaacaaacatctgcccattgttttcttgagaaagttgtcatggtcaacaactgtgaggctggcgtgcaggtagtaaaagaatttaccttaataccaagacagtaatgagtttagaaaggcatatttatttagagaaaaggggagacacattgcaagggagcaactggccagacagcagagggaaggctgtctgcaaagaggcagggactcgagtggagttttataagggtgctccttaggctgaatgcttgcagacaggatgcttggttacagatgggctgtgagctgggtgcttgtaagaggatgcttgggtgctaagtgagccatttgcagttgaccctattcttggaacattcattcccctctacccctgtttctgttcctgccagctaagcccatttttcatttttcttttaactccttagcgctccgcaaaacttaatcaatttctttaaacctcagttttcttatctgtaaaaggtaaataataatacagggtgcaacagaaaaatctagtgtggtttacataatcacctgttagagattttaaattatttcaggataagtcatgataattaaatgaaataatgcacataaagcacatagtgtggtgtcctccatatagaaaatgctcagtatattggttattaactacttgttgaaggtttatcttctccactaaactgtaagttccacaagccttacaatatgtgacagatattcattcattgtctgaattcttcaaatacatcctcttcaccatagcgtcttattaattgaattattaattgaataaattctattgttcaaaaatcacttttatatttaactgaaatttgcttacttataatcacatctaaccttcaaagaaaacacattaaccaactgtactgggtaatgttactgggtgatcccacgttttacaaatgagaagatatattctggtaagttgaatacttagcacccaggggtacacagcttggacaggaccaggtccaaagactgttaagagtcttctgactccaaactcagtgctccctccagtgccacaagcaaactccataaaggtatcctgtgctgaatagagactgtagagtggtacaaagtaagacagacattatattaagtcttagctttgtgacttcgaatgacttacctaatctagctaaatttcagttttaccatgtgtaaatcgggaagagtaatagaacaaaccttgaagggtcccaatggtgattaaatgaggtgatgtacataacatgcatcactcataataagtgctctttaaatattagtcactattattagccatctctgattagatttgacaataggaacattaggaaagatatagtacattcaggattttgttagaaagagatgaagaaattcccttccttcctgccctaggtcatctaggagttgtcatggttcattgttgacaaattaattttcccaaatttttcactttgctcagaaagtctacatcgaagcacccaagactgtacaatctagtccatctttttccacttaactcatactgtgctctccctttctcaaagcaaactgtttgctattccttgaatacactctgagttttctgcctttgcctactcagctggcccatggcccctaatgtttcttctcatctccactgggtcaaatcctacctgtaccttatggttctgttaaaagcagtgcttccataaagtactcctagcaaatgcacggcctctctcacggattataagaacacagtttattttataaagcatgtagctattctctcccttgaaatacgattattattattaagaatttatagcggggatataattttgtatgatgattcttctggttaatccaaccaagattgattttatatctattacgtaagacagtagccagacatagccgggatatgaaaataaagtctctgccttcaacaagttccagtattcttttctttcctcccctcccctcccctcccttcccctccccttccttccctttcccttcccttcctttctttcttgagggagtctcactctgtcaccaggctccagtgcagtggcgctatcttggctgactgcaacctccgcctccccggttcaagcgattctcctgcctcagcctcctgagtagctgggactacaggagcccgccaccacgcccagctaatttttgtatttttagtagagatggggtttcaccatgttggccaggatggtctcgatttctcgacttcgtgatccgcctgtctgggcctcccaaagtgctgggattacaggcgtgagccaccacgcccggctttaaaaaatggttttgtaatgtaagtggaggataataccctacatgtttattaataacaataatattctttaggaaaaagggcgcggtggtgatttacactgatgacaagcattcccgactatggaaaaaaagcgcagctttttctgctctgcttttattcagtagagtattgtagagattgtatagaatttcagagttgaataaaagttcctcataattataggagtggagagaggagagtctctttcttcctttcatttttatatttaagcaagagctggacattttccaagaaagtttttttttttaaggcgcctctcaaaaggggccggatttccttctcctggaggcagatgttgcctctctctctcgctcggattggttcagtgcactctagaaacactgctgtggtggagaaactggaccccaggtctggagcgaattccagcctgcagggctgataagcgaggcattagtgagattgagagagactttaccccgccgtggtggttggagggcgcgcagtagagcagcagcacaggcgcgggtcccgggaggccggctctgctcgcgccgagatgtggaatctccttcacgaaaccgactcggctgtggccaccgcgcgccgcccgcgctggctgtgcgctggggcgctggtgctggcgggtggcttctttctcctcggcttcctcttcggtaggggggcgcctcgcggagcaaacctcggagtcttccccgtggtgccgcggtgctgggactcgcgggtcagctgccgagtgggatcctgttgctggtcttccccaggggcggcgattagggtcggggtaatgtggggtgagcacccctcgagttaggaggagggtagctgggaacggtgcagggctgagttctcgacaagctgctggtaggacagtcactcaggttgagggtagaactgagagaacctgaaactgggcgtaggaaggttccaagtgctggagccctgcaagacagaggaagttttttttttgcttttgttttgttttgttttgttttgtttgtttgtttgtttttttacctctctgtgcattctttcttccttggaagtaacagaggcaagcttgggaactgtgtgaaccaggtcagcaatctggacaggtctttaccagcgggtcttttgctgtttttcctgggtactgatttgcagacttgatccaactttctaagaaaagcagaaccacacaggcaagctcagactcttttattaaattccagttttgactttgccacttcttagtggccttgaacaagttaccgagtccctctcagcgttagttaccctattttatgatgaggataatattatctgcaaattattggtaatagtaaataatatagcatgtaaatctcctagcacagtactgggattttcgccactttatttcttcttttaccaagatactcctcattggactttaatacacaggactagtctaaggtatcaccaggtagtccactcctgctcggaattcttgaccctctttcgggatttagaagaacagggcatggaccagatgggtttaaacaaattcaatatcttccactagcttcaccttggggttgttaaaagatttttgaaccacacactgtgct

SEQ ID NO: 5173 - DNA, 6000 bp, Homo sapiens
ttggttttttctttatttcttcttaaaacaaaacaggatccatgtgcagaatgtgcaggtttgtcacatatgtatacgtgtgtcatggtggtttgctgcacctattgtcccgtcctctaagttccctccccttaccccccaacccccactccccaacgggccctagtgtgtgatgttcccctctgtgtccatgtgttttcaatgttcagctcctacttatgagtgagaacatgcggtgtttggttttctgttcctgtgttagtttgctgaggatgatggcttccagcttcatccatgtacctgcaatgcaatggcacgatctcggctcaccgcaacctctgcctcccagattcaagctattctcctgcctcagcctcctgagtagctgggattacaggcatgtaccaccacgcctggataattttgtatttttagtagagatggggtttctccatgttggtgaggctggtctcaaactcctgacctcaggtgatccgcctgcctcaacctcccgaagtgataagattacaggagtgagccaccatgcctggcctcattcctttttatggctgcaaaatgtgaactattatggtggtctcctaactgctttaaggtctctgtcctttccaatatatgctccattaattaaacacaaaaacctgacgataacgctacccttcattaaaaacaaacaaaaccaaaagaaaacaaaatccaggagtttcctgttacctaccctgcaagactgaaagtccttggcctcccagaggtaattccaaactgattttagcctaccttttcagcttcctttcccaccattcccttttcatttattcaacaaatgttggccgcaagcttattaggcgccaggccctgtgataggcagcaggcacacaaatcacctaccacgtggtggttcctgcccccacaagatgtacatctcatggggcgggatgggggcagaaaactaagctgattattctagatcagtgtggggacttccatagaggtaagcagagtatttggtgggtatgtggacaaggccctgaatccagcctagagtagagcttccagagagaagtgaaacttgagctgagttgtgaaggatgagtacattagaaatgaagaaggaggctgagcgcagtggttcatgcctgtaatcccaacactttgggtggccaaggtgggtggatcacgtgaggccaagagttcaagaccagcctggccaacatggtgaaaccccatctctactaaaaaaatacaaaaaatggccgagtgcagtggctcacacctgtaatcccagcaccttgggaggccaacgtgggcggatcacgaggtcaggagttcgagaccagcctgtccaatatggtgaaaccccgcctctactaaaaaatacaaaaattagccaggcatggtggtgcgcgcctgtagtctcagctacttgggaggctgaggcaggagaatcacttgaacccgggaggtggagcttgcagtgagccgagatcacgccactgcactccagcctgggcaacagagtgagactctgtctcaggaaaaaagaaaagaaaagaaaaaaatatcagctcacaggtggtggtgtgcacctgtaatcccagctacttgggaggctgaggcatgagaattgcttgaacctgggaggcagaggttgcagtgagctgagatcgtgccactgtactccaactcgggcaacagagctggaatctgtcaaaaaaaaaaaaaaaagaaatgaaggaaatctgtcattcccacaagaaggaatagcaggtgcaaagactgggaggtgtgaaaccagctgactgactcttcactgcacatgtgctgagtgccccttaggtgaggtgctgttctgggtgctgggatacacagcagtgaatgaacacaccaaatgaggcctgtgtcctcatgcagcagacagtccaactccatggaaatgtgggttgagatgaggaagagcaagtgttccagccatgggggtccatggaccactagagcctcatggaaagggtccatgaaaaccttgaaatgtgaatgttgatgagtgtgtgtgtccatgttcacacaagcatttttgtcaagagtagatcaataacatatttcttctttttttttttttttttgagacagggtctctgtcacccaggctggagtgcagtggcgagatgtcggctcactccagcttcctggacctcccaggctcagggatcatcctacttcagcctccccagtaactgagactacaggcacatgccaccatgctcagctgaattttttgtagaaataggggtctcactatgttgaccaagcaggtcttgaactcctgggctcaagtgatcctcctgcctcagcctcccaaaatgttgggattacaggcatgagccactgccaccgcgcccactgtcttttgtattctcaaagggatccatgactctcctagcttagaaagttgactctaggtccccctgtgtagagctgaggagtttgaccttgatctggaagttctgggaggcagtattgcattttaagaagttaaaccatcagagcctgacatgtgctttggccaccgagaactccttgtgccattcccacagctaagcctttgctcttgccattctccttctgggaggaatggaaggagccgtacttaaatgccaggccgacctgactctgcatcctacctctaaccttgctccagcttcaagcctgcagtttctccctctgtgaaaagctatgaggtttaaatgggaccatgatgtcttgaggaattaataacagtatttttattttggaaagtgccctgtctatggtagccattagttcctctcttggcttggtggctcatctgttcaggggttcccttttatctgaggccttcttggagctttctgtagtcattcttgttttgtttttgagacagagtcttactctgtcacccaggctggagtgtagtggcatgatcttggctcactgcagcctccatctctccagctcagtgatcctcccacttcagcctgctgggtagctgagactgcaggtgcacaccaccatgcctggctatttttttttcttttttgtagagacggggtttcaccatgttgtccaggttggtctcgaactcctgagctcaagcgatcctcctgccttggcctcccaaagttctgggattacaggcatgaaccaccacacctggccaccagtatcactctttttttaaaaaaattttatttttattttaagttctggggtacatgtgcagaatgtgcaggtttgttacgtaggtaaatgtatgccgtggtggtttattgcacctatcaacccatcacctaggtattaagctcagcatgcattagcagcactcttaacacacaattaaactcacatgtaatgagattacttctcattactccacaccatagtagtctattttacagatgaggatactgaggctcagggaggctgagagatttacctggagtcaatcaattgttgatctggaagcatccgatcaccaggtcttctgaaataatgacagcagcaacaattaacattatgcttactatgccaaatgctatgcttagcattttacctgcatcacaatcgcgattcctttgggcagttaggtaggttccattttaaccgaatttaaagaggaggaagctgaggctcagagaggtaacttgccctaggtaacccagggtagtcagttaaaaagtcaagactcagacctcgatctgactaactccaaagaaacccgtgccactctgcctctcggaaaacactgcttccagctgcacagttcaaaaccccacccaaggcggccctgaatcgcggtcagtcggcttcagccgaatcgcactttgttttgaacaaggatacagagggcgctgcctgatgttagtctgggggcttgggggagaagatgggggtccagggtggaaatgtaggtgctggggctgtgccagagggagagtgtccgggaccagcgggcgagtcacgtgcgcgtgaaactcgacctaaggggaggggaaaagaagggagcccccgcccccacctcggggcgcagctccggacgcgtgtaaatacaactatcaactccgcagatccacttcatccaagcccagcttcgcagacctctggcgcccggcgggttcccagttcccccgcttcttccgaggagacagcggaggcgaggccaccgggctgtcaggctgaagctccgtggccgccgggtcctgcacgcagagaagaccccagcgccggcgcggctcagggctgggcccacgggactccggacgcgccgcgaaagcgttgcgctcccggaggcgtccgcagctgctggctgctcatttgccggtgaccggaggtgagcagcgtgggcggggagggggcgcgcgtagggtctccggctatgcgtcggctgagagacaccgaggccggctcccgccgacactgccaggcttcccaaggaaagaccgttacttgcgcccgcggtcccgcggcacagtgtcccatctcgccaagcgcgtccttcccttttcttttctctgacccctccgactcttctcttcctcccgggtccccgctcgctgcacttcctctgcttagagctgcgcgtttgccagagttccagcggacctcctggagcgcttgaacccaaagccccgtttcacagatgagaataccgagtccccctggaagaagtgactggtacttcctcccctctctctgggtctttcttgcccttctcctctccgctttcctcggtctcatcccagttgtcgctccccgcccccgcgccgcccgcgttccctctcctcccgccgaggctgcagcggccgcggcggggggagctggggctctttccctccctttggtaaacacacccgcccgccagcccatccgccaccgctgcccttataaagtcagcagccgccagacttcctgccgaagtccgagccccctcccggggctggaggggggcaagcgggttccgaggtgcaaagcctggtgccccgagccctgcggagtgagtgaggggcgcgcgggggaggagggaaccgaggagagcccgtcctgggtctccctccacgtggcagctgttggcttggcccgagagactgtagggtcgtgggtcacctgatacggaaagggggagggcttgctgtcgcccggccccagagggaaggagaggtcttggaggggcaactggaagatggggtcgtagggtagccttgaacttgcccttcttcctgccagcttctaggggtctttcctggcgcgagagtccggacatgggcccgcggtgcttcagagcgcgctctgccccttgctgtcctctggggacctgggcagatgcggactttctccccagcagcccggccctgagcgccctggcctgggtgagagaacccggcagcctgctaggaagctgcagcgcgcagacaggaccttccttgtttccgatagtggctcagcgggagccccgtgccgcgtgcacctctggcactgctagtgcgcgcggagccagctccttggcaccggctgggaagcccagggctctatggggcctccatgaggggctcctcgcgggctggcccgagaggtctcgggtgccaccatgatgcaggacccttccctggggccactggggggcccttcacccagcgctctgtttctgtgcaggctcggggccagcatggcccccacgctgcaacaggcgtaccggaggcgctggtggatggcctgcacggctgtgctggagaacctcttcttctctgctgtactcctgggctggggctccctgttgatcattctgaagaacgagggcttctattccagcacgtgcccaggtatgcctgaaaatgggctgggtgggctggggggagggatggcaaaggggcaggtggaagccagaaaaggttaggtggccaggtggacagaaagcagggtcagcagttggacagcctcacttctcgacctctt

SEQ ID NO: 5174 - DNA, 6000 bp, Homo sapiens
tggtgcaggatggtggtggcttggaccacagtatcagccatggaggtaagaagaagtgatgggaaacagtaatagtgcagacagtgattaagccagggccagctttttcttcaagtgaatagaatgacgtaagccatttcatcacaagggaggttacaggaaacctctgtttttgtattctctgcacctctcatgagtggtcagggcccacttgaagtgattctagatgaaaactctgcatctcttcttctggggctggggtcccacccaagaggacaatactgacccacgatgaatgacaaatatacaactcacctttgcaaggttgggaaggggtagaatgcagggtagaatgaggagccagagtttcagcatggtgttgacagagatcagtagctttggatgacatatctggagtctaaggatatcttcaaagtctgaggctatctaaactgtcttctacaagaagcaattcaactgggaccattggagattcctacctgtaggtctccacatagaggaaagacacagtctcatagtaaataatcataataacaatagcatcatcatcaataagagcaatggttttccagaggctgagcagctggggagatggagagttgctgttcaatgggtatacaatttcagttatgcaagatgaataagttctagaaatctgtgtacaatatggtacatatagttaacaatactattttgtgcacttaaaaatttgttggccgggcgcggtgtataaagcactttgggaggccaaggcaggtggatcatgaggtcaggagactgagaccatcctggccaacatggtgaaaccccatctctactaaaaacacaaaaattagctgggtgtggtggcatgcgcctgtagtcccagctacttgggaggctgagtcaggagaatcccttgaacctgggaggcagaggctgtagtgagcggagatcgtgccactatcctccagtctggtgacagagcgagactccgtttaaaaaaattttttttgttaagcagggcccagtgcagtgactcatgcctgtaatgccagtgctttgggaggctgaggcaggaggatcgcttgaggccaggagtttgaaaccagcctggacaacatagcaagaccctatctctacaaaaaattttaaaaaccactcaggcatggtggcttgcgcctgtagtcctagctattcaggaggctgagatgggaggattgcttgagcccaggagtttaagctaacagtgagctatgattgggtctctgcactccaggctgagcgacagagaccctgtctcaaggaaaaaataaataaataaaagggctttatctgttagagataaaaatagatgaagaaaatatggacaaatgttaacaattcctaagtcctggtgatgaatatatggaagctcaatgtcctgttctctctgcttttctgtatgttttaaatattccatctgggcatggggtggctcatgcctgtaatcccagcactttgagaggccaagacaggaggattgtttgagcccaggagtttgaaaccagcctgggaaacatgatgagaccctatctcttaaaaaaaaaaattagccaggcatggtggctcatgcctctagttccagctacttaggaggctgaggtaagaggattgcttaagccaaggagttcacgattgcagtgagcactgatcataccattgcactcaagcctgggtgacaaggcaagatcctgcctcaaaaatcctaagtaaaaataaaaataaatttgccccagtgaaagtttaaaaatgaaaaagaatgaaaacaatgatttatttttattgagcatctaccatggactaggtactttacttacacaatcttttatataaatatttttctttctttctttatggccagctcttactcatacttgtataatcttatttgttttcttttttgtagagatttttaaaactttttatttagaaataattatagtttcacaggaagttgcattaatagtacagagaggtcctgtacgccctttaccaacttccactaaaggttaaatctaacataactatattcaatatcaaagccagataatttatattggtacaatgtgtgtgtgtagtagttctatgactttttttttctttcttttttttttttagaccgagtcttgctctgtcgcccaagctggagtgcagtggcacaatctcggctcactgcaacttctgcctcccgcctcccgggttcaagcgattctcctgtctcgccctcctgagtagctgggactataggcgcatgccaccacacccggctgattttttttattttagtagagacggggtttcaccatgttaaccaggatggtctcgatctcctgacctcgtgatccacccgcctcggcctcccaaagtgttgggattacaggtgtgagccaccgcgcctggctttttttttttttttgagacggagtctcactctgtcgcctgggctggagtgcagtggcacgatctcggctcactgcaacctccacctcccgggttcaaacgattctcctgcctcaggctcctgagtagctggggttacaggtgcccgccactacccccagctaattttttgtatttttagtagagacggagtttcaccaacaaggctggtctcgaactcctaccttgtgattcgctcgcctgggcctcccacagtgctgggattacaggcgtgagccaccgcaccctgccagttctatgacatcttatcacctgtgtagattcttgtaaccaccaccacaatcaggatacagaattatccatcaacacaaagatctctcttgtgctaccctttacaggtacacttctatctccccatcaaccctaacactagacaatcagaaatctcttctccatctctataattttgtgattttgagaatgttacttaaatgaaatcatacagtatgcaacctttcataaggcccagtagatattgcaagattcctcttgtaagaaaccatctccttttcccacgcagtttcttaactttccataatgtttcttttttgcggggagtggggggtcggagtttcactcttgttgcccaggctggagtgcaatggtgcgatcttggctcactgcaacctctgcctcccgggttcaagtgtttctcctgccttagcctcctgcttagcctcttgagtagctgggattacaagcacccgtcaccacaccgggctacttttttgtatttttagtagagatggggtttcaccaagttggccaggctggtctcgaactcctgacctcaggtgatccacccacctcagcctcccaaagtgctgggattacaggcgtgagccactgcacccggccaatgttgactatattttcaaaggcaaaaaccaaggcaagatatgtccatctgtacaagagtatcatagcagcattattgcataataggcaaaaactggaaacaatccaaacatccaccaacgggagaatggatagatgaattgtggcatactcatacaatcaaacactagacagcaataaaacagaaggaataacagatgcacacaacaatatggaggaaatcttacaggtacattgagctaaagaagtcaggcacaaaatagaaaataatgtataattccatttacacgaagttcaagaacaaggaaaactaattgatggtgatagaggtcagaatagtggttaacttcgagagggggtattgatggggaaggaacacaagataactttttggggtgcaggaagtattttatatcttgatctggatggcggttatacaaatgtacatatatagatacatatatatttaattaagcttaacattcgtgtattttatgcactttatgaatgttataccccaatctttaaaaatcagggcacaagtttggcaaagatgagtcttcaaagcagtagaaaggtcaattgtttaaaattaggatggtcttggacaattagggaagcttatgatgaccacacagaaaatgtctagcccaccttttccaatgggcaatgtgcccttgcgtcattaatttacatcttgtaaatttattttaccaggaaattgtgtgacaaatcaagggactgagtattgtttccttgtttccttctttttagtggggaatgagtgaatggtgcagtttgaagaacacattaagtcttgaaagttggaaagttcaccagtacccttctttccctcacccaagattagccctggtggcagccgaaattgcttttattatctctttgtggctgaggacctctaactgttgaagaaaacatattttacacgtcttgtctttctgcgaacaggaagcctatctcgcttatctttgcaaccccagacggggcttagtgtgacctacacacagcagtaatcgcacaacgtcccgtggagcactgcttctcaaatttggctgtacatacgaatcacctggggaattttaaattgtattgctgcctgaggaattttaaactgtactcccagagattctgatttaattgaaatgaggtgagtcctgggcactgggatgtttaaaaacgttccaggtgattttaacgcgaaacaaaaacagaaccgctgtttgggggcgttcttccttctccacgcctgatttgcgcacaggagtcggctgtctggaacgggggtgaggttcacaggtgtctgtcgccacgcctcttcctacagaaccaataaactgaagccgctcggtgacatcccaaaggacttgaattctgatcgggctgcagacgctctgcaccccgcccaagcttctatggtactttggtgtcctctctagcactggcaagtcgccttcctcttcgcccggcgccagccgctccctctctatgatcgccgagttcccggcgccgtctcgttggtatttaattccggaagcgagtttgaatcaaagaagaggcgggactttcctcccggaagtaacccacgtgcttccgctggagcctctcgggaggcgggtaacgttatagtatttgtcagaagttggggtctccgtgggcattgtgatccgtcccaggcagtggtaagtgacacatgacctctgaattcaatgtggccctgatgatggcgtcgccatttcagaggtgtagcctttgggctgggtcccggtcgcctctgttcagcgtatgatcccattcccagggccctggaggttcaggttcgtgggttagagagttctcctccggtcctcgatctcctgaatagaggtgacctccaggaactggggcatcagagatccggggctcgatttccaggctcgccatagacgtcctgtgcgaccttgggctaggcctcagtttccacatccgtgaaatggggtggttaagctcactgaggttagtggcccgtggtggtctggcgccctgtgagtcctctgtatcctctagccccaggggtaggagagtgaacggcggcggtgggtgctgatggtgatgtctgctcccaggattaggaggccagaaggagatcccttccacggtgctaggctgagatggatcctctcagggcccaacagctggctgcggagctggaggtggagatgatggccgatatgtacaacaggtaaagagaactatgtgctaccctgtcttggaaaataagtcttggtcacccttatcgaaggtgaatgacttatgacaaattccttcctgaatgtaggggagcctgaggcccatgcttaccctccccacacccaccttcaaggttgatcctaatgtagatgcagtaaagggtcactagaatgagttgggcatttagatggggatggaactggcaatgcaggagccaagcaggaagagaaactccaatccaggctctggttaggttccaagaaaagctgagtatttgcctcttgacaaatagcacatagccagcccatttagtagttaacattttaaaaccctttattctgtgtcaggcacttgttaatcttcaaaataatccagtgggttaattttattagt

SEQ ID NO: 5175 - DNA, 6000 bp, Homo sapiens
ccttcaaaacaatttttaaaaatcttttaatgtaggtaaaaatccacattcttatgcctccttataatgcttttaccagaggtgtattttacttttcttatacaccttgcacataaactgttttctcagtagttttacattcaggaggcctagttacttttaaattatacaacatttcttgcatcaattctttttttataactctttttctttcatgacttttgtagacaattcttcaacatgcctcaactttctgacttattacaaacatttctttctttaaacaaccagttaatttatttcaggacaagaatttactatataagattctttttacataaattctgcccccgcttttttccccctttttttggggggataaccattcttttccaaagcaaacttcctttatgtctgtggattagactgtctaaggctacaagattagaagttactattatacatgttatactgttaacttttagcaaattttacttttgttgaaaaccttgtacgtttgggatttcaattatcctttgctattagtaagactttgtttagtccaaattaacttagaattggtatagacggctttttcttttccttccattacctgggaggaaccgtctatcatccagtcctgaagggagttcctcctaggtctggtcagacctttgtatggcaattaagatttagatcccctgttaggaaacctgctgggttaagggaatttttagtggttaatgttaaatcatctttttttttttcccttaggatacttctgaactggtgaggtgtgctcacaatgaggtttcctctaaaagttatttttctactttcttctgttagcaaagtagttgccgctacagagtgaatgcatttgtgccatccgcagattactaggttaaagatttttgataggaagtctacaggttgtcagtggcctcagtgctttcgggctacgcacttgtttacacttacagcaaggtggtattggagtgttgtagggtcacagagaagaccttcaattatcaattataggttttaaatttaccctgtcttttaaaggaatagggtacactgtttttttcttaactacttgtatatctctttctttctgtctttgactttctgtgtctttctctttgactttccttttgcctctgtatctttctctctctctctctctgcctctttctttctctctctctctccttgactccctctttgtctctctgtctcttcctctctctctctctgctggtctttccttgcctctgccagctgcttatgctgctgttctctcaaccactgtgagtgggtggggtctaaaaccagctgtacccaagtgtctatatacgggaactggtctgggtgccctggcttacaagttaccttgtgccacacctttgaaacaagggacctgtccaggcttccttctgatggccaacccacctccaatactggccagtctatttcacacaaagttctagtttttcctggtgtcatagtaacactgtaatctcccttaaatcctttcttgaaatttttcaacatagctcctagtggtcttactttgtgcctggcccatgcttcctgaagacaaaacaccatgctcacactgcaaaacaaaaatgggtaaaaagggcacacacacacttttgcagtttacaccaaaccagaatcaaaaccaaaatcagagtgtcaggaaatccaagccgggtcaaaaccaaaaccaaagtatcaagcaatccaagtcaagtcaaaatcaaaaaccaaagtgctggtacaggcacaccatgggtgatcaggccatgcttccacttaaatggagtgggcaagttccaaagaccagtcttaccaagttttagatgtccggactccaagtgccagttccttcatggtgttcagccactgcattgatcctccacaggggcctgctgtgcactgctctgatgaggcattccactggggcaattgcctacctgggagtgctctcaggatctgcttcactcaagctggctggagtccccctcaggtatgctccacagggcaggcctaagccacctaaggagctgtctcgaccatccattaatcaccttgtttcctggtcagggaaccaagaaatgtagcaggacaagccacagacaaaacccctcagacaccgagttaaagaaggaagggctttattcggccaggagctttggcaagactcacatctctaaaaaccaagctccccaagtgagcaattcctgtcccttttaagggcctacaactctaagggggtccccatgagagggtcttgatcaattgagcaagcagggggtatgtgactgggggctgcatgcaccagtaatcagaacagaacagaacaggaaagggattttcacagtgcttttccatacaatgtctggaatctatagataacataaccggttaggtcaggggtcaatctttaacgaggcccaaggtgcagcacagggctgtctgcctgtagatttcatttctgccttttagtttttacttcttctttctttgggggcagaaactgtgcataagacaatatgaggggtggtctcctcccttagagacagagcaaacatggaacagaaagtaggatggtggttactaggggctaggaataggaaggaaaggggtggttgttcaatgggtatagagtttcagttctgcaagatgaaaaagttctagaggtctgttacacaacaatgtgaacaaaattaatactagtggtctgtacactaaaaagtggttaaaataatgaattatatgtgttttgtaccacaatttaaaattttaaaaataaaagttgagaaattgatttaaagaaaatattgttctgtttctagcacacctgcctttacacagaacacacaaaaacccttttgctcctaggtcagtagctctcaacatgaatgtgaggggattttgttctccctccatcaggagacatttgacaatatcagatactgtttctggttgttacacatagggtgggattgtgctggcataggccagggagtctgctaagcatcctacagtgcacaggatagccacctactgtaaagaattacccagtccaaagtggcattagtagcttttttgagaaacctgtcccagatcattaatcagaacgtgttattgatataccagtcttctcccttgtagttaggttggtagaattcagactctggaaaaaactgggaatgtaaaaggctgaatgagtgtaagctgaaagacaagagaaaggagaattgttttaagcttactaaagccaaaatggaaaaaaaaagaggggggaggattggggggtgaggaagacagtcaacagaccgcttttaggccatcattccgaagggttctgtgctaggaaccttacacgtgttgtctcacataatccttaaaactcagaaatgattttaaattaaatagcacagagaggaaaactgactggagagggagcctttgcttaggtaggcaactttaactggtttattagcacattcccctgaagggaaagggggtgtgattgctcctgaagagaccaaagagactgggctcctttttaatcaaagctcaggaggagagctgcattccactgtttcacagatgctgtgagggtgacaaagatgcagggcacccactggaaacacagacggcactctgcgaaagaggaaggggcgccaggagcttgggtgagcaaggttggaggtgattctgcccctctccccaggctttctgtgtgagtccattcctcctctcagatttattgttagaacttaagacaagccaattacatttcataatgtctgtgtcattcagacgctgagaactaatccagccttctaaatggtgcttcttaactcctttcttcaacaggagagttaatgtgtggaattaagtgcagaatccatggccctctgtggtgacggtgatggttcaggttgtgtttctgggttcattctggaagctcccccaaggaaaggaggaaggaagcttgcagggtggggctttgccattgccctgactggctctggtttccttgcctgatacattgaagtcagcttccaaagaatgccacccaaggttttgaaggggcacagtgcctctgtcctcacaaaaccagcctgcatatgagtttactgaattcatttaggtcctgctgaatctttcccatttgttccttctctgtttcaatatttcaatgcttccctggaggggcccaacctttctggagggcaaagatctgttgttagagaaaaagagcagccagaggaggaagatgacttgagggtaggcagcagttgggcaatcagtattgaaaggttgctttcagcctgccaagacttggggaattagaaaagcaagataaaacaaaacaaacaaacaaactatatatataaaaaacaattttttaaaagtttttttatgttctatattactattagctatatattaatgaatgttcctttaaagcagtgtagtcattattgctattattattattatggttagttatagacagtggaatattgttctttctctatattatgattactagcactattactgttattagttacatgttattgaaagcttcaaagcagcataggctttttataaatatttttgctcatctttatgacaattctccagtgttggtattgctcctctatttaacagattagaaaactgaagcttcaagaacagacttgcctaacaacaggaaacttgtatgtctcgaagtggcaattcacacataaggctccatgactcctgaactctcacaaatattagttggctcttttcatggttttactgaagttgctagaagtttacagaaaaggaagtgcaggaacatttcacaaatctacaatctgtgagtatcacatcctgtatagctgtaaacactggaataaggaagggctgatgactttcagaagatgaaggtaagtagaaaccgttgatgggactgagaaaccagagttaaaacctctttggagcttctgaggactcagctggaaccaacgggcacaggtaggtaatgctggaagacttttctcatctcactattcccttgccgtgacctcattagaggagtaatttaacttgaaactccttgacagcagttaagagacactagggccttttggaaatagagtgggcaaatggaaggagtatctgtttttaactctgtgtccgctgtattctaattgcataaactcagtgagtcacttacctaaggttgtgtaattaatgggagcagagctcttgtctcttcaaatgtgtttagaccatttgtaaactgggcggtctgtgctttgagaatggtgccgtgaaaagggatccaagctgagcttagcaacaaataccacaacctacttggtctttatgctaaaaagtggggaggaccaacgacgcgagcctatgtgttatgagtccaagacttgttctcataccactgcatgcagctgtttctccagcctgagtaaactcagacacaggctggcaatgccaggtgggaaattaggaagaggtagaatgatctagagatttatgcaaaggcttcagactccaggaaagctgagatccaagactggttttacagcttcccggctgtgtgaaccagggtgaacaataagggtaactgcaaatatttcttcagcattaactctgggccacacatatatgcaataggtatattatttgcattcataacttaaactttattttgcattttcttatttattacatgtttttactaacttactaacatgcagagctgttgtaaggattaaaagcactgcagggtaaaaattaagaatgtgtctggtaaaatatgataaacatatctgagtgctaataaatagtattattaaacaagaaataagtaagcagagttcatttattagtctgaaaattcatcaaatatatggcaatacagttgttgtcagtaggactagaggaaagggaggttgttgc

SEQ ID NO: 5176 - DNA, 6000 bp, Homo sapiens
gcccagagatgtcaagtaaccagccaaagccaaacagagaaacaggcagaggtaggacccgagttcgagtctcagattcttcccttgatgctggggtccaaaccctgtcttttagcaccagggccccaaagcagaacctggcagaagtgtgacaagcatagactctgggtgggcctctgagatctggtagttactgggtctggcgagaggaggcaatagatcagcaagtattgatggtgatgaggtgggtatagagatggctgcagctgcctcctagtagtttgctctcatgtcctttctggggtggagatatctgttaactttatacttttatcttctccagactcttgtcctctgcagaggaggaaggggaagtctagggggtaggagaaggtacaggatgacagaacaagtcctcactcctggccggtcaccaccagtgggctttgctgttgccctgcacagccaacttccagctggtctaagcctgtccctcctgaatcaggcgaatgctcagcctgagtctcttgccacatggatgatggcaaggagagaggtgtgtttgttctgtcacgtgagctgcacaaacagcttcctcagcatttttattaataattcagcccatagccaagggggtgggggtagggggaaaggactgtggggagacagcaacaatgaagaccatgccaggtagaggccagaggggaactcaggagccctgcctcctagccatggcctagcaacagagccaggcagcatcaggggccctgtttgggagagtgcaggcccagcatctgctcctgagggacagaatgtccctccctgaagccgacccaggactcctggccctgaggatggtgccagatcggaaacaggcctgaagggtctgcagcacacagcagggcagtccttggggaatcaggtgctgcccgcatttcctgccacgtcatggaacccaggacaggggaccagcaacgaaacagaatgagagggcctctttgggccccccttctgtaggggctggaaggggagaagctgaatgcccagaggctcaggccctccccaatgagatacaagacccaagggcagggcaggggtgattcacagcctctgatctttttcctcagaggacctgctcactcctgcaggctccatttactgcctctacccagttctccgtgagtactcagaaaagaattgggattggattctggcgctcaggctggcagggtcaaggagcccagcagctcctagaagctcacagttggctcggctctcatcgatattccagcaggagagattagccttctaatgcagcagaatggttcatggttagacatctggaagaactttcctgacaggcaacacatgggaatggggagtatgtgtcgtctctgttaagggtaaacaaatagcaacaacaataataataaaggcattcaaaaagtataaggaataaattatatgttccaagtatctttttttttcctttttttttttttgagacggagtctcattctgtcacccaggctggagtgcagtggcacaatctcagctcactgcaacctccacctcccgggttcaagcgattctcctgcctcagcctcctgagtagctaggattacaggcgcatgccaccacgcccggctaatttttgtattttttttttttagtagagatggagtttcaccatgttggtcaggctagtctcgaactcctggccttgtgaactgcccgcctcggcctcccaaagtgctgggattacaggcgtgagccaccgcgcccagtcccccaagtatcattttaagtgatttgattttttcaccatgcttaaacttaacaatagtcaaaggaaataggtgttattattcccattgtagagacaaggaaactgaggcccagaggtgtctgcccagggtaaacacagcaatgatggcagcgccacataaatctgtattctttcctctttcccatgactctgcgtcccctaaacaaagtgactgaggcccagagaaggggtgtcttcaaagctttttctgtgtcaatgctgcaggcaggaatttaaaaactacccaagattcccaatgccccagagccgcagtttgcacaactatatctcatggcgtttctcttgtgtgtctgaggagctgtccagctctgacatcctggaacaaggaccgtctaatgcccgtgaggagaggatgagactgggcttcgtattcttgtaagaaacaggctataagccctcagatgggagcaagcactgggtctcctcatgaatcccacagtggttagcaaagggctgggagtctcaaccagagtgattcttactccaggttctctcaccagctccccagggtgctggctccggggcctttagctccctgggtcagttccttctcttctagaggccttgccttcatcacctgacacttgcaaggggcagcctggggcatctctcagatgtcctctctgtcaactctgaaaaactttagatgcttagtaaagacctgttgagtggtggtgatgaggaattctgctctccctctctggactttcagattgatgggtggagggatctggagtggggagattcctcagcagggaacctgtctgtgtgcccatctgttgtgggagggtgaggggtgccctatttgctctttttttttttgagaccgggctcactctgttgcccgggttggagggcagtggtgcaatcatggctcactgcagcctcaaactactgggtttaagccatcctcccgtcgcagcctcccgagtagctgagaccccaggggcgcaccactacactgggctaattttttttttctttgtagatatggggtctcaccatgttgctcaggctggtctcaactcctgggctcaagtgatcttcccgccccgtcatcccaaagtgctgggcttacaggtgtgagctaccatacccagcccctgtttactctttactagggtaatgagagaggcagctggggtgggtgggggaatgagccaaggttgcagaccttgcagtcccagcctgttggcttagctttctggggtttgccaggtcccaaagcagagtgtagataactcctgggttcttggctgtacttgggtgagtggggggaagacagctgtgaggtgtatggaataggatggcccttccccagagggtgagggctgagatttctggccactgaggaattgtggccttaacctacgatgccttttttccttccatttttatgtagaacattcattcccaggaaatctgctctccactggaacagtcttcatggaggtttgctgggggaacttccttatctttttctcaaccggaaaagctgtaggtggaggtgaatgtgtatgtgtgtatgtgtgtgtgtggtggttgttggggatagcctccatgtgatttcaaggggatggggtctgtttgtgtgtgtgtcggggagacttgagatagagggttgttcctggctgccttccacactgtgggcaggtggaggtgtggctgggcatgagtagtgcagtataaagccagcaaaagtggatttctcagggtggaaataataatccttgactctaggaagcctggctcacctgcaaactgcattctcagcacaggggagggcaggatgctgccacagacccagggattttgccctcttacctgacccatcagtgaagggtaggggcagcacctgtattgtggggagcgtcagtgtatgtgtctctttgtgtgggcagcatgtctgtgtgggtgtgtgtgtggggggcatcatgtctgtgtgtgtgtgtgtgtgtgtgtatgtaggtgattacgtgtgtaggtgtgtgcagggaggtctctgtgcctaccataccactaatggttcatttctgggtttttcttatccttaggagacaggtctcttctcctccctgccccagaatcaaatcatccaaattctgtagagaaatgagtgttcacctgatttagactgtgctgagccggcagagaggcagaggggaccaagagaggtccagggttggaaggagaaggagggatttccttcctaccctccgaagtgctagggtcaaggaatagaggggaggatcagaggaggagctgctgctatagagggatagccagaggctgaaaagtctattttcttctttcgtggggctgggttaggtgaggagggtcactaggccaaacctcctaccgagggcagggatcttagccctttcggctccacctgtgtgcgagcttgcagaaagaccggactggcggacccaggctcagcgctgccaaaaattccactcctggtttttgcacacaccagtccgtctgccccggaccgccgcggtgttgagtccggagctgacgccctcgagccgccagcaagcggaaaacccggagtggatctccacgccttttggatcggagccaaagggcacctcggaggaggtggccggctctgcggccctgcccggtgccaggccgcggccatcgggggagcacgggctgggggtgggtcgcgcagcggagccggatcccctggccggacgagcccggccgtggggctcggcggccctccccgcggggactgcgaggcgggcggggcgcggggcggcggccgtgccctcggggcggcttcgggcggcggcgggcgcgggtgcagtgcggcgcgcggccggcagcgggcgcaggcggtggctgtggccgcggcgttcggcggctggcgggcggcgccggcggtgccccgggcgcgctcacacacgcgctcacacacacacatacacacggcctcgtacacacacacacgctccggcgcgcacacgcggcgcgcaggccggagggaggcggctcggcgctgttcggcggcggcggcagcgtgctccgcgggcgggcgggagggctggcgggcggcccccgctccccggctccgcggctaggtgcagcccgctcggcccccgccctcggacccgcccccgggggtcgcccggccccatgcccagcggcggcggcggagcagcgcgcggccgcgggcggctctgaggagcccggagggaaccggcgacgaggggaccatgtaccgggacccggaggcggccagcccaggtaagcgcggccccggcgggctggggcgccccgcaccggcgggcaggacagcggcagcgccggacgccgtctcggagccccagcctggggctgttgtccgcccggagccgcacgggctcccccaggggtcatcccagccccgggggcgcgggatcgagcggcagcggctcggaccccggtcccccgcagtctggacactgccaggctggatgtctgggaccggcttcgcagtgtccccacaaggacctctcccccacccctcaacagcccaaggacaacgtgtgtggcggagcgaggagccgctgcccctgtgggagccgggcagtgccctcagaggcacccgaggctccccagcaccggtgccccgggggtgccagcgctggcggaccccagggcgaggatcccggcagctcttggccaaggttgcgggcacaggggagcggagtggcatcgcagtgccaactgtgaattgagagggtgccagggggcaagtgggaatctggtgcggcagctgggcagggaggttctggggggtggggaactgcaggggcgttgatgggtgagacgggggtgcctgaagggaaagagagcaggggctcatgagaatgggggtgccaagagaatgttctcctaggtttggggagggggaagcaaacaaccccaaactctctcccgtcctggggtgggggagggccgaactcctttgccttctgcttcgcccgccaggggagtggcctgggagcccactgtctgcttggtatcctctaagccaaagccgaagaatcttcccgtcttcctcggaaattgctctgccatttcctccttggctcctgatgcctcctcacccagtgcccacctgtaggcaggtcccctgcagctcctgcccaggctcc

SEQ ID NO: 5177 - DNA, 6000 bp, Homo sapiens
gcaatcaaaaacataccaggaacacgcacagggcatcagatggaagagaggaaagcaggcaggcaaaggaggatgtcagaaaagggcgcaagaggctgtgttcactgctgtgatccccacagcctctcttgcgtggcagtcgctttctctcctctctgtcagtcctgggtcagctggggggccaaaggaagttggaggtctgggccctggagctgtccaccctacccccagcttctgtgctcctggcccagcaacactgaagacctaggagacaccagaccacactccaggggccaggcagagggtcccataccccagacccgcgctgcctgcccctgcaatggcatagcctgctgtcagaccccaagtggggtcataaacagagaactgaaatgcctggaggatggacatacactctcagtatctcccaacgagagataatagctgagcactgactgtgccaggcatgattctaaaccctttaaatgatctaattcatttcatcctcacagcaaccttatagagtactattctcccattttgcagatgagtagaatgaggcacacagaagtgccacagaggaaatgatggccccgggataggaatcatgaggccagccctggagcccacagtatgaaccagcatcctggattccctttcctagacacctgcaatgtgcttaaaggtggctggggagggttagccgacatcagccacgagggagttgttcctcttaaatggattttctagataacccacttgggcctctctgagtacccctggcacatgtgaacattttaaccctctttggccccctcttcaaacctagcaacgactctggcctctgagggtggaggcgctgagccgagaccagctgcgcactggcgtgcttcactcctgcaggatgctttccagtctgccaagactgtcctgatggaactcctgccggggctgtgcacctgggcaaagtcgctcctctctgggcttcagtttcctcatctgtgagttggaaatataggactaaatggctttcgcagcctccttgcctttttcattttattacggtaaaaaacccataacttgtactaccttaactctttttttttaattgttgtttttgttttgttttgttttgagacggagtctcactctgtcacccaggctggagtgcggtggcgcaatctaggcttactgcaatctccgcctcccgggttgaagcaattctcctgccccagcctctcaagtagctgggtctacaggcatgagcccctatgcccagctaattttttgtgtgtgaatttttttttttttttcagtagagacggggttttaccatgttggccaggctggtcttgaactcctgacctcaagtgatccgcccgcctcagcctcccacagtgctgggattacaggtgtgagccactgtgcctggccctcccttaaccatttttaagtgtatagttcagtagtgctaagtccatttacagtgttccgaaacatctccagaacattttcatttcacaaaactgagactctgtacccattaatcaaccctctatttccacctcctcccagccccaggcaacccccattctactttctatgaatttcactgcacgagggccctcatttaagtggatgatgcagtatttgtcctctcattactggcttctttcacttcatgtcctcagtgtccatctgttgtagcatgtgacaggatttccttcctttttaagactgaataatattccattgtatgcatagaccacgttttattttttatttttaattttattatattataattaattattactccaggctggagtgcaatggtgcgatctcggctcaccgcaacctccacctcctgggttcaagcctttctcctgcctcagcctcctgagtagctgggattacaggcatgcgccaccatgcctggctaatttttgtatttttagtagagacagggtttctccatgttggccatgatggtctcaaactcctgatctcaggtgatccgcccgcctcagcctcccaaagtgctgggattacaggtgtgagccaccgcgcctggcctgaccacgttttgtttatccagtgtctgtggatggacagttgtgctgcctcacaatgacctcttggccattgtgaataatgctgctaagaaaatagatgtacaaatatctcctcaagactctgctttcggttcttttgggtatatgcccagaaatggaattgctgaatcataggcattttaaagccattttcatactcttttctatagttggctatagcacttcacattcttacccacaatgcacaagggttctgcatcattgccaacacgtgtgatttgattttttgagaccaggtctccctctgtagcccaggctggagtacaatggcatgatcttggggcactacaacctctgcttcccaggctcaagcgatcctcctacctcagcctcctaagtagctgggactacaggcgcacgcaccaccatgccctgctagtttttttttttttttttttgtagaaatagggttttgtcatgttgcccaggctggtctcgaacccctaggctcaagagatcctcccaaagtgctgggattacaggcgtgaaccaccatgcctggcatgattttttcatttatgtatttatttattaaagacggggttcctgctatgttgccgaggctggtcttgaactccagggctcaagcaatcctcctgcctcggcctcccaaagtggtgggattccaggcctttttcttttttataggagccctcctaacaagtgtgagacagtatttcattgtggtttcatttgcagctctctgatgattagcaatgctgagcaccttttcgtgtgtgtgttgcccatttgtgtgcagcccctctttcctgaggagcattctgaggagctccgcctggcctccacagtgatcccttcgaggaggacttggccaatagggctgtgatccctgccctcactcacggctcttgcatgattctgtggcccccccttcatcttccccatctcttctgggggcagctggggaaagtggaggttctaacctatcacaacccccaaccacctcacacacaggggctgagaccaggccagggctggctccaaggaagaagcccctaggatggccacatctgaccactcagggctgctgaaggtggggccagggccaggtccatgccttcagtggattttggtgcaggggatgcattccttcaagaatctgccttctccattcctgtgctgtgtgaacatggtacggggtaggggtgcctgcagcccccttgggccagggccaccagccatgctcttgcacccccacacacatgtgccaggttggggttccaggatatggtcagtgggtgcctcagtggagagggcccaggcagccccggtgcctgatgacatcatgggccttgctggatgtcctgacaagcaaaggcaggagctcctggtaccagggagaactcgccccctctgcccttctggggatactggtcctctttagaccaagacaaaatattagcatatcagagaaatatacttagggttttctaagtgcatttccccaaccagccggtcagcatcacctgtgaactggccatgtaagtctctgcctccacaccagacccaccgaataaccctcctgggtggttctgatggaagcctttcaggtggttctgatggaagattgacgaccagcgctctggaagtaactttagcctgatttgaattccttgctgctgtgaacgcttaacttttaggaacaggtatatttatcacaaagaaatccgaagcaattaggggagctacctacactttcaaaaggacttgaatgtatttaaattaaaaaaagcggatggggcccgggtgcagtggctcatgcctgtaatcccagcattttgggaggcgggagggtcacttgagtccaggagttcaagaccagcctgggcaacatggcaagacccatttctacaaaaataaaataacaccaaaaattagccgggtatgatggggcgcgcctgtagtcccagctggggactcccgagactgaggtgggggtatctcctgagcttaggatgttgaggctgcagtgagccgacatcatgccactacactgcagcctgggcgacagagtgagactcctgtctcaaaacaaaaaagaggggcggggaagcagtaacaagcacaggtgtcctcagcccatggatggcagcgcccgcctccacgcgccagtgccctcctgctcccctacctcccccttggccacccctgggcatccccagccctgcagcgccgagggcggaggggaggccacccgcccccagcagagggctccgagagagctgcagcggcggtgggggccccgcagagattggggcccatggtttgaaggctgttcacaggcaccccgagacagcgtcccccctctgggcgcactggatttgacgttgcaggacgcgcggctggaagccccccaggccccgctgctcacagaccgggactccgcctccggttcccgagggcgtggcgaggcgctgcgggacgcccaacaggtgcgtgttgtgtccccaggccccgcgctccgggtggagtcaagaacctggaagccggcagcccgggaaaagggggcgggacggtgccccggggcagggctgggtggcggccgctgtcctcccgggaggggcgggccgcctcgacgccgccctccctggcggccaatggagaccgaggccccgcgcctggattggagcggacgcggggggtcagccagccttgggggccggggcctggccgggggcgggggggcaggcgaggcgaggcgggcgccgtccgcgcggttataaggcggggagttccctgcgccgcgagccgggaggcgcacgctcgctcgtacggcggccgcggcggcagggcggggccggagcagcgggcggcggcggaggcggcgcccgggagcgctcttcgcttccctcggggtcttgctcggacctcggccaccgcctgggatccccaggactcgtgcgtgcagcatgggcggcgtcggggagccgggaccgcgggagggacccgcgcagccgggggcgccgctgcccaccttctgctgggagcagatccgcgcgcacgaccagcccggcgacaagtggctggtcatcgagcgccgcgtctacgacatcagccgctgggcacagcggcacccagggggcagccgcctcatcggccaccacggcgctgaggacgccacggtaaggaagccataaggaagccacccaccggcgggtggagcctggagctcggtcgtgggcgtgatgtcccgctccacctgtggggccttagcatcctccctcccctcgctgacctttgacctccacgccgggacccagagttggggtggactagccagggccagatgtggggtagggagggcagttccctgcgtggaggacccgcagctgtccacggagcaggtctgcgggggaggagggggcctcagaggtgggtgtgtcatgctgcagagcctgccctgggtgaggggctgccctgttgctcccaggtccctgtttcagttctgggtccccatgctgggtgcttgctgagtgctaggggtagggcagggcagggtccccaggggccggtaaggacatgccattagaggctgggggctgggccggcctgaggtctgtggctttcccaagagcttctgtaaagggctcagggacagtgactcacctctccgggctagcagctgcacgtgggagggctttgccagccaggctgggtgggcctctcctggaagcacagtcaccccaggaacaggctggcccctggggaccccaacttcccaatcccagcccctgtctagacaggcagggatgtagcctggccccagggtactgtctggctggagtccagtggtggagcagcccgaccagccccttttccttagttacccacctgcataataggg

SEQ ID NO: 5178 - DNA, 6000 bp, Homo sapiens
taatggccatgcggggttccatcatgtgccctgtcctagttttcagcttgtgtttcagccagtgactctacggctttgggcaagcctaaccttttttgggtctcaccttatctgtaaaacatgatgatttggaagctctaacgtcctttccaaagccttaaaatttgtggggggtctatgatttcctagctgtggatcctaaattgtgactacacaataacaatccctagaagagaaagggacccaacatctattgagaattccccatgcggcgggaaggcactgagcgagggataggtaggaaaagtgacacctaggcttgccagcaaaaacaccatcagaggcccccctgagtgatctcagacccctttgttcccagtccggcctctggactttgtcccattaggaaatggggggagggggacactctccctccctccctccctccctccctccctccctccacagtgaagccacagccctccaggtcttatgactgctcttctcctccatgacaaagcactttttgagcccaagcccagcctagcagagtgctgagtcacggtgggacagcaactctccaccgcaacccccaccaccgccccctcctgctccaggatgtgctgaacctccagaaaccaccggcttggctcttctctcatctgaggtccctcccgccactcctggccctgggaggcggctgtcctgggagaccagccaaactctctgctgcctccaagtcacgaggagctgagctggagggtgggggaggtagaaccctggtcaacaaaggtcccaagaccaggccacagcttcggaagaatctaaaggcttagacattgcagttctgacacctcaagttaccagaaagtagggaacggacacaagcaatcatataaacaatcataaacacacacacacactcacactcccccaccaatagatttcccttccattgttcccagccagcctcctcccaatgaccttctacagcacaagctgtccctcagtcttgctgcgatgttcactgcagctacatgcatgtttagccaagcatggagccaacactgattcaggaaacctactccctgcagcagaccgacttccctccagtgggtccgagagcttcatgctggctttgtccccctggacatcccggaagcctggaaactcagcacatctagtccaaaaccaagcaggccttccccaagggctttccccgaaaccttcatttcctcctgtgctccttggctcagggaatggcagcagcagccaggcctaccaaatcataaagctgagagatctcttacacactgcccacccctggcccccgactttcgccaatcagtctgttcatttgatcttctccagatctgtcaaatctgtgttctatcttctctgctcactaataactaaggctgctgcctcctgactggtgcccagccctctagcctcactctcatccatcctccacattcaatcatgaatccatctgttcatgcaacagatactgggcaccaagtaacaagcaatttgcaaaaagctgggagtgcagagacaagacagaaacaatgcctgccttccaggagcttaccatctacagcaccagcgcaggcaatcaaaagggtctcataaggccaggtgcggtgggtcatgcctgtaatcccagcactttgggaggccgaggcaggtggatcacttgaggtcaggagttcgagaccagcctggccaacatggtgaaaccccgtctctattaaaaacacaaaaatcagccaggtgtggtggtaggcacctgtagtcccagctacttgggaggctgtggcaggaggatctcttgaacccgggaggtggaggttgcagtgagccgagatcaagccactgcactccagcctgggcaacaagggcaaaactccatctcaaaaaaaaaggtgtgacacatacatagtacttcattaaacatacaaatatatattatagttcctaatcttcatcacttacatgagctacaaatatcatcccaatttgtcatctctgttttaaccttgtttacaacatcttttgtcttacagcttttcatttttaaataggcaaacctgccaactgtacttttacggcttctgacagcctcagaagaacattccctaccccaaaattataaaaataatcttgtatatattcttctcaaaactttatactttttttaaggcttggatttttaatctatctggaatgtatttttaaatactgagtgagtcacttttctccacatgactgtcaattgtttcaacataatttgttaaacccattctttcttccctaatgtgacacaacagtttagcatataccaagttctcataataggggggcaggactattttgttgcattaatctagtcatctcttcctgtgccagtaccatactgcttatagcactttactgtacctttattatagcaccaaatgcaaatctatcaacacactgactcctccaaatgaactttagaatcattttgtgaagtttcaaaaaaaaaaaaaatactgtcccagagacagtaatggctgaggaaaaacaaaaacaaaaaactgcctcttatggaaattgcagtgaatttatgcttatttggggaaactgacatctttacagaatgaagattgaccgaccatttgggaatatggtacctcttcatttatgctaggctttttgaattttttgtccagcagtaagcatttatagttttttctatatatttcttgttaactttattccaaggtactttaagcttttgttgtcaatgtaagtgaaaaacatttttttttccattcttttttccccatattttctaactggtggttactgttataaaggaaagctttggatcctatatatggtgactttgctatactcttatcctaagagattcccagtgtaaggtttctaaaaacaaagctaatgaggtgtctctatgctgtctctaggatcaagtttaacctctttttatggaacacaaccctgcccgatcttgcccctattctccaccctaaccagcatcccccaacataaactgtactttccaggccaacattctttctttctttcttttttttttttttttttgagacggagttttgttttgtcttccaggctggagtgcaaaggcgcgatctcggctcactgcaacctccgcctcccaggttcaagcgattctcctgcctcagcctccagaatagctaggattacaggcgcatgccaccacgcccggctaatttttgtattttcagtagagaagggtttagccatgttagttagccaggctgatctccaactccgacctcaagtgatccgcccgcctcggcctcccaaaatgctgggattacaggcatgagccaccgcgcccagccccaggcaacatattttcttaaggcagctttaacaggccatgcatttccacatttccacacctttgcatatgctgttcactctgctccaaattcccttccctgtttctctcccgcacttcaccttccttttaactttttcttcaaactcagctcacgtgtcttgcttagggagggcttccccgacctcctcctatcccagactgggtaaggtactcctggtctagcagcatccttctgtttaccttattcttgtagctctagcaccactaaaacgtttttcctgtaaataacataggtgcatttttaaatgaaaccgtgaacaagaaatcaccctaattccgtcggcaatttattttagtatttcagtagagttgcttttttaaactaaggtttggaagtctagcttccagctgcaggtttgtgagcatcctgaaattcagttcttccaccgatgcgtcaaaagacgcgacagaacagtggacctcgaagccaggacctaggtaagggcagggcctagctctagctctgccacccataaattcacatccaccctgtgcctgggactcagcttagccacacacaccggccccacccctccggggtctctttcacctgtcacccgccattaaccccgtcagcttctctccaatgacaccccagggttgtcctacagggccaccgaagcctgaagctcctgtgagtggggccgataagaggccattttgaaaagtcctcagcatgggcttcgcctttagatccacgtcgtttctcctttctaacccgagatgtgtcccttgggtgcgaagcgacaccagcgattctctcggaggccccggtggctcacccccacgactccccggggaggcggtccccatccctagggaaacccggcccgcccagcctttgttgcagaaaccgcacacggagccatatttgctttcagccaaaggcagacgtggtcggaggagtcggaagggcaggggcggacccgaaacccgccgtgcgccccacttctccatcgcgctccttcctggactctgaggaagagaaaatgcgctcgaccacctaaggaccgcgtctccaccttccaccttcccaatcatctgcagcttcccaatctgcagcaaggtgtcacaagggcttctccgcagctatgatttctaacaccatgccccgggccaggagcctcagggtgcccgttcgggaaaatgggagccgaatcaggatcaccccatgcgcccccgcacccttcccccgccggttccaacgcccgggcgcccctagaccggggggggggttctgaggtggacttcctgcgcctcctcgcagcttccctccaactccactaaacgggcacagagacgccaccgctgtcccagaggcagtcggctaccggtccccgctcccgagctccgccagagcgcgcgagggcctccagcggccgcccctcccccacagcaggggcggggtcccgcgcccaccggaaggagcgggctcggggcgggcggcgctgattggccggggcgggcctgacgccgacgcggctataagagaccacaagcgacccgcagggccagacgttcttcgccgagagtcgtcggggtttcctgcttcaacagtgcttggacggaacccggcgctcgttccccaccccggccggccgcccatagccagccctccgtcacctcttcaccgcaccctcggactgccccaaggcccccgccgccgctccagcgccgcgcagccaccgccgccgccgccgcctctccttagtcgccgccatgacgaccgcgtccacctcgcaggtgcgccagaactaccaccaggactcagaggccgccatcaaccgccagatcaacctggagctctacgcctcctacgtttacctgtccatggtgagcgcgggcgggcctaagcggtggcgggggccgggcgcggttcccggggcgcgcgctggggcgggccgggggtgtggccacccgcgggctctcccgcctccctgcgcccttctggaaaatggaggctgctcgaggtttccgaggacttctctggcgcagaaagtcggggcagctggttcttctcggctgtaccctgagaatgctccctcctaggccagggccgcctctgcacacccttcttttttaaggagaccttggtgtcctgaaatcctggggttgcaagactgccagcctgtgtgatcaatcctgcggttaggaaggtggagttttgctttcccatcttttcctctgcctccggcatttggccctaaatgccagcgttttttgcttaggtatccagctcccgtccgcctgtgtgtggcggagctgctgggtaacggtgtcgaatagcaaaccttgggggctggcgggaggtggcttatcttgtgggtagatccctctcgagcagccgtatccacctctcggctctgcttatctctaagtcccacttgctttgaagcatatctctaggaatcgccccttctgcagtcaccgaagtgtcacctgaccttgcgcctaggggacctaatttatcttttatgtatcttactgtaagaggtgtggagtttggcctactaattgaacccccagttcttggataaagt

SEQ ID NO: 5179 - DNA, 6000 bp, Homo sapiens
taccagaagcatcatggtccccagaccctgtacctgcctgtaactctaagcagtgtgagtaagcctggtctggctgccggttccatctccctgtaaatttccagaaggggagggaatgtgtgccttagggtccagtacctatgtgggcatacatgagtaagcaaaacatgctgtggggcccaaggttggacaagggggcaacttcatcctggcattgctcttgccctagatccctgtgttccagcgtggagggacaatcgtgcctcgatggatgcgagtgcggcggtcttcagaatgtatgaaggatgaccccatcactctctttgttgcacttagccctcaggtaagtgcataggcagcgagtctcctcagccatttgcctgccttcctaggactcagttctctggggttgtgcccctcactccctcttgggctcaggcgctcacctatcccacttcttgctcagggtacagctcaaggagagctctttctggatgatgggcacacgttcaactatcagactcgccaagagttcctgctgcgtcgattctcattctctggcaacacccttgtctccaggtaatgggtcacccactcttccttggctgcctttgctggggcctgatccttgtgggggctcccagttcactgtgctcttttctcacattctgaccttgctttgggtctcctccttccttctgttctgttatttttccccctgatggacatctgcttttaccatctccagctcagcagaccctgaaggacactttgagacaccaatctggattgagcgggtggtgataataggggctggaaagccagcagctgtggtactccagacaaaaggtgagtgaccaatctggcccctaggatgggggaaggaggggaagccggggcaggtttagggatgcccttgcctgtaggaacgttgttgttatgctatagcccattggtatgactatggcactcttttattcctcctccaggatctccagaaagccgcctgtccttccagcatgaccctgagacctctgtgttggtcctgcgcaagcctggcatcaatgtggcatctgattggagtattcacctgcgataacccaagggatgttctgggttagggggagggaaggggagcattagtgctgagagatattctttcttctgccttggagttcggccctccccagacttcacttatgctagtctaagacccagattctgccaacatttgggcaggatgagagggctgaccctgggctccaaattcctcttgtgatctcctcacctctcccactccattgataccaactctttcccttcattcccccaacatcctgttgctctaactggagcacattcacttacgaacaccaggaaaccacagggcccttgtcgccccttctctttcccttatttaggagccctgaactcccccagagtctatccattcatgcctcttgtatgttgatgccacttcttggaagaagatgagggcaatgagttagggctccttttccccttccctcccaccagattgctctcccacctttcatttcttcctccaggctttactcccctttttatgccccaccgatacactgggaccaccccttaccccggacaggatgaatggatcaaaggagtgaggttgctaaagaacatccttttccctctcattctacccttttcctctccccgattccttgtagagctgctgcaattcttagaggggcagttctacctcctctgtccctcggcagaaagacgtttccacacctcttaggggatgcgcattaaacttcttttgcccccttcttgtcccctttgaggggcacttaagatggagaaatcagttgtggtttcagtgaatcatggtcacctgtatttattgctaggagaagcctgagggtggggggagatgatcatgtgtgctcggggttggctggaagccctgggtggggggttgggggaggactaatggggagtcggggaatatttgtgggtattttttttacttcctcttggttcccagctgtgacacgttttgatcaaaggagaaacaataaagggataaaccataaataactggtggtagtctggattctagttctagcctgagccacagaccctagaagcctagagaccttacatttgctttcctttttttttcttttttgagactgagtctcactctgttgcccaggctggaatgcaatggcatgatctgggctcattgcaacctctgcctcccaggttcaagcagttctcgtgcctcaacctcccgagtcgctgggactacaggcatgcgccaccatgcccagctaatttttgtatttttattagagatggggtttcaccatgttggccaggctggtctggaactcctgacctcaggtgatccgcctgcctcggcctcccaaagtgctggaattaaaggagtgagccactgcgccctgggtctttttttttttttttttttttttgagacagagtgtcgccaggctggagtacagtgtgtgatcctggctcgttgcaacctctgcctcctgggttcaggcagttctcccacctcagcctccttaatagctgggattacgggcacctgcgaccatggccagcttcatttttgtatttttagtagagatggggtttcgccatgttagccatgctgatcttgaactcctgacctcaggtgatctgcccgccttggcctcccaaagtgctgggattacaggcgtgaggcaccatgcctggccatgggccttacattttcatttggcttcagcataagcatcctttttgggttttttttttttttttttgagatggagtctcactgttgcccaggctggagtgcaatggtgtgatctcggctcactacaacctctgcctcccaggttcaagcgattctcttgcctcagcccccaagtagctaggactacaggcacctgctaccacgtctggctgatttttgtatctttagtagagatggggtttcaccatgttgtctcgaactcctggcctcaagtgatccacctgcctcggccttccaaagtgctgggattacagggatgagccactgttcccggccagcatgagcatccttgatttcagcaaaatgagcaagtgcaagccttccttgggttgctagatattttcgtagaagagcccagcaagatcatcacattttagtaggcctagttagtaagtggtgatcagagccaatggagtccctcttggatagaaatagccataaggtcagatagctgtttctcaaactaaacttttggaggatgtcgggggttgaggagacatagtttcgctctattgctcaggctggagtgcggggagtgctgtggtatgatcctggctcattgcagccttgacctcccaggcttctaaagttctgggattacaggcatcgatcactgtgcccaacctagaggcttctgcttgtagctaacagcacttttgtttttgtttttgtttttgagacggagtctccctcagtcgcccaggctggagtgcagtggtgcgatctcggctcttggcaagctctgcttcccgggttcacgccattctcctgcctcagcctcctgagtagctgggactgcaggcgcccgccactacaccctgctaatttttttgtgttttttagtagagacggggtttcaccgtgttagccaggatggtctcgatctcctgacctcgtgatccgcctgtctcggcctcccaaagtgctgggattacaggcgtgagccaccgcgcccagctgctaacagcactttttaaagtttcccattgttttagtgacaggaagtatactgttcccccttcccctcattttgtagactgaccacaagtcagagattattttaccagaaactttttttggggggttattttttttttgagacggtctcacccagtcacccaagctggagtgcagtggcatgatcacggctcaccacagcctcagcctcccatgtcagcctcccaagtagctgggactgtaggcccgcgccatcacacccagctaatttttgtgttttttttgtagagacggggttttgccttgttgcccaggctgatctgaaactcctgggcttctaaagtgccaggattacaggcatgagccactgggccgggcccttttttttttttttaaaggaaaaatgagaaggatggcttgtgcttgtgaggaggaaggggatgcattcatggaattccccagctcaggaactatttccaatcaatttcctggtagttaaaacacttccttggcacccctgttgtcatctgttgaagaaatgtgggccagaggacacactagagatgctggaatcgggtgtccagaaaggacacaaaactgccctgtggcaatgacataatttttgtcaactttggtttcttatctatctcaaagtattatagtgaggattccaggagagacacccagaggatcatgtggtgggccttagatttcattcgtgtaataagtattgagcaacagctattgggtggcgtgactgactggatggatgaataaggtgaagatctgggcgccaggactggctttctcaggcaattccgtgatgagggggcgggtctcgaggtaggtaccacgtgcacctactcgagattctgcacctacccggggttttgactgccggccacgcgagtttggcacgccggatgtgacgtcaccacccggtggttcccggaacctggcggtgggaccggaaatcaagtctacaaggcgggggggtgcacagatgaccggaagcgtgccctggcggcgctgccagccccagctgggagctggtaggggagtgcgaggaaggcgggacgcagggcggagccgctgcaggggcggggcctgcggacaggagccggggtttggggcgggaacccctcgtcccctgcagaccccgcctgctcgggcgcgggcggcggcgcggccatgaagctgaagctgaagaacgtgtttctcgcctacttcctggtgtcgatcgccggcctcctctacgcgctggtacagctcggtgagcggggcggggcgggggtgcggcgggctggcccgagggcgcccgccgccgtgcatcccgccctggggatgaacccccggcaaacaccattcatccgctcggccctccggacagctctgcggcctcaggcgcactgccctctatagaacgcaccgcggctacccgccgcacctcggatgaaatccagactccttcccagagcctgcaaggccccgcatgatcctgctgccgtccgcctctcccaaccccatttccacccctctccctcgctctgctgcagccagactggcttgctgacagtttctcgaaaaccccacgctcattactctctcaagcacttaacttgttccctctgcttggggtgctttgcttccagcgtttcccgggctgcctctttctcatccttcaggtcttagctcaaatgtcacctcctcagagaggccttccctgaccaccatagctaaagttaccattcttaattccattcccttttattctctatcctgattattttcttcatggccccatcacagtttgtaataatgttattaatttgtttctttgcttagtgtctgcttcctccactaaacagaaagctcgatgagggcagggactgtgtctgttttgttccctgctgtatccccagcacctaaggcagtgcctcctaggaagagtattcaataaatatttatcctacgatggaatcaatgaatttaacaatgagtctttggtcacctagccaagggaatggatcgaaccctgccccttatgcaaagatttagggacagtgccactgcgttatcctcaggtatttgaaagactgtccaaaaggggttccatagtgtaatggttagttggcaccttggactctgaaaagactgtcctgtttaaggacatgagcttgttagaagcccagaaggcaaaattaggaccagcaggtagaaaagat

SEQ ID NO: 5180 - DNA, 6000 bp, Homo sapiens
cagtggcatgatctcggctcactgcaacctccacctccctggttcaggcgattctcctgcctcaacttcccaagtagctaggactacaggcatgtaccaccacacccagctaatttttgtattttttagtagagacaagatttcactatatgttggccaggctggtctggaactcctgacctcaggtgatctgcctgccttggcctcccaaagtgctgggattataggcgtgagccactgtgcctggccaagttatcagtttttgaataggaagtaccatagtcagcactgggagcctgtaggagtatggaggatggattggagacagcaactgggagacttttgccacaggtcaggcaagtcgatacagagcccgaacccagctagggagggttggcaggtgtgagaaagaacataggcgcaggctgtgcagatcctggggagagacttgcttggacttctcgggagggatattttaagcaagagactgacatttagtgcctgaaactcagagcaaggaacccaagaagttggtgtttgactttgaccaagccctaaattcagaccagccctagtaagcaactcaagattcagacagaccagtacagccagatgctagacatagctgtgaacagcaaaagcactctggaatatcacagagttgatttctagctgtggttgtaacatagctgagtggcaaattagtttctcagcgcttctatttcctcacttggtaaaccctcaccctgttgagaaagttgaattaacagattaggaagctggaagctgtcaagccctgcctagagcccagtgacctagaggcttccttctaaactggactgttagtagggaatctggttgatatgagtttggggcctagagaatacttttatacttttttttttctttaaacattagtcaactgtagtagtaaggaggagagaaagattagaacaaggagtttaagcacttaaaaaatcccaactctatcctttctctgcagcaccctcatcacatgtgtggattctgggattctcagagtctggcatgacaaggacaaggacacatcctctgacccagtgaggctcccctgccctgatggttgggggaggtgggctggggtaggtgcctaatgatcacgctggggaagggaggattaaggactctggaacggactcttatctcctattctttacagctcctggaactgagagtgggccctggggtgtgtaggatgcgccaagacccagcacacccccatgtggttgccacaggtgggaaagagaatgctttgaagatatgggacctgcagggctctgaggaacctgtgttcagggccaagaacgtgagtgacaagagtgtgaaggagctgttcctgaagtcgagggaggctgaggccactgacgatgcattagagactagatggacttagggggcgaaggagggctgaaaacaggggcacatcgagccccccatagccctgtcctccatctgcccaccccaccaggtgcggaatgactggctggacttgcgggttcccatctgggaccaggacatacagtttctcccaggatcacagaagcttgtcacctgcacagggtaccaccaggtaaggtgtcacctcacacctgccttctcctgggataaagcagcctcctggagaaatggcccccacggtttgacacaactgctcttctcaccattctgagttcagaggagcaagcgcttccccgtctgttccaaccctgtccctgagcccatgaccttcctctactgtattctagggtggagtttcctgaactatgcctgttttcctcccacctggaagagaggaaaggagagtggatccccttcactgtgggaattatagggtgcaggtgtcagaggacattgggctgggtgttaagagaactgggttctggtcctgatgcagcctctctgatttgctttgggacccaggcctgagcctcccatctctggcctcagctcctcagctttacaggaagggcccgaatggggaatctttatggtttgtctcatttgaggtcttgagacacgggcggggctgggtcactgtatttgtcctattttctttgcttctgcacattgaagtctgatcttggtcatatgcctctgctcaaaacacatatgagggcatcctctttcctccttcattcaggctaacccctgcttgaaatttagcacctactgactactagaccaacttgcttttctgtccctccatttcccctagatgggagtatggggggatggaatgctcacacacttccaacctaggggacctctcccctcagctctgtccatttatgctgctaagcagctctcctgacaccctgatgctcagagaagaggcatacatctaagatgagaaagtttctgggagtggatcataaataagaaagcagtgtgcagggagggggtgaggatgcagagacgccagagggtaggtgcagggtgaggatacttttgtgatgcttcagccttcctctaggtccgtgtttatgatccagcatccccccagcgccggccagtcctagagaccacctatggagagtacccactaacagccatgaccctcactccgggaggcaagtgagtgtttagaggggaaggggtgggagggtggggcttgagaagggctccaggaggttactgctgatcccacttgcctctggtctcatcctcagctcagtgattgtgggaaacactcatgggcagctggcagaaattgaccttcggcaaggtgagtggactagggtacattgggggaaaggaaggagcagggagaagggtcaggattccctctaaggtggtgcagtggggccagtgaggcctcattcaggtgccagattgcctgggtttaaatcctggtttccctaaaagctgtatgaccttaaactaattatttcaactccctgtgccttagtttcctcacctgcgaaatggaaatattagtagaagctccagtctcagggttttgttgcagattaaatgttgaaatggaaagtgattggaacaggaaacaatgaatggttggttattggccagccagttatcacggatgcttccccccttctctagggcgtctactgggctgtctgaaggggctggcaggcagtgtgcgtgggttgcagtgccacccttcaaagcctctactagcctcctgtggcttggacagagtcttgaggatacacaggatccagaatccacggggtctggagcataaggtaagttgtctctcccacctccaactcatggtcttgtggaggccccgcctcctgtgccctccgttcatgtttctgtctcagcatgcctggctccttaaggtccctcatcttttgcaggtttatctcaagtctcaattgaactgcctcctcttgtcaggcagggacaactgggaggtgagcagttgggcccgggaatgtgggagccaagggcatagatgtgaggacctccctatggagaggaaaaggaggcagctggaatgcagacttgggactatctgtttacctgcctggtcacttaatttctctgagaggcattaacagttaaaatcctgagagggttattgccaacagcatggatggggttgctttctaggagcagggaataaaggtggtggtacccagagggattctttctcagccagggtctccttccctgtgggtttgtccctgtgcccctgactacttttctttttttttttttttttttttttttttaaacttctttttgtggagatggggtctccttatgttgcccagtctggtcgctaagtcctgggctcaagcaatcctcctgccttggtctcccaaagtgctgagattacaggtgggagccaccgtgcccggcccccctgactcctaagctttcttcccactcaccaggatgagccccaagagcctcaagaacccaacaaggtgcccctagaagacacagagacagatgaactttgggcatccttggaggcagctgccaagcggaagctctcgggtttggagcagccccaaggagctctccaaacgagacggagaaagaagaagcggcctgggtccaccagcccctgacgcccctgtgcccactttgtaaataaactgctgaacacccaccatgaccctgagccttttgtgatgggagaaaggaatgaggggtagcttggggtgggggctgcctgagctggggcgacgggatatctgatgtcacaaaagccgggcctggaggcaggcaggctggcgtgggtggcacggagtccagggccacgcggggccatgggctgctgccaagacaaggactttgagatgtctgatgagcagtccaaggaggaagagtctgaggacggcagggaagatgagaccacagacacacaaagagggcccagggagtgtgagagggggcttcccgagggtaggggtgagctcagaggcctcgtcgtcccctcaggcgccgaagatatcgacttgaactccccggaccatccgaatcacaagtcgaacgaaagccttctgattaccgtgctgtggcggcgactatccacgttcggtcgtcggggctcctcgcggccaagcaagaggcaaccagaccagattcggaagcaggagagtccgatccgagaaggcaaccaggaggagccggagaagggatgaccccagacctgctctcagtccgccccaacctccagagaataaaatttctaacgtatacctgcacgaccactctgggggactgggcgcggacaccaccgggcagctggttctttaaggctccttcccggaggcgggcccagccccctgagcgcctgctgtagtactctggggcggggtcacggtggcgccttagccaatgggagggcgggatcgctcttgcgtttgggtgtggggcgtgtctttcgggtcgctgggcttgaaacgcgtgggaccgccccctcgtcactgggggtggggttacgtgtaggtgacgtggccgcttccagtctttggtcgggtttcggcggcttcagtgctcggggaggaggcagtgacggccggtgagattggaagtggcggcggcggcaggcggcagaggggaggtaagattcgctttaagaggggatctggccgccgtgtcagctctggggcagtggttttacgggggcgacgactggcggggggaagggaatcaggggcgagcgggcaagtcctgccggcccggctccgggtgagcgaattccttgccgtccaatcaggaaagcctctgttgagagagacgtcggccttagctaatgagtggttgaagtcttccagaaggcggaccttgggcggggggtgggacttcctgtttcaaataaacacccagaggttttccccctccgcccaccgaagtgtgtcagtctttggaggtccgtcactggccctcccggaggggccgaaggaaaccgcggaaacgaaagggctgggttagggcccggggcagttacacgggccgggccggagtctcaggaccacggggttggctctggccctgtctctgcttcagggtccccggcccgcgctctggccgccagagccaagttggaagaagagtctgaagcgggttcgacttgggacaggggaaaagcggggccctttccgctgctggtccgccccaggatttgcgagcgtcctgggcgcgaaagtccacgagaagtgcagaaggggctcggggatttgttgattggggtggggcgggggagtttgggtaaagaagttgcctggggaatgacactctcccctccacaacagtccgaggttatgcgtctcaatgatcccgcggaaacgctacgggtctaagaacacggatcagggtgtctacctgggtctctcaaagacacaggtcctgtcccctgcaactgctggcagtagcagcagcgacatcgcccctctgccccccccagtgaccctcgtccctccccctcccgacaccatgtcctgccgggatcggacccaggagtttctgtctgcctgc

SEQ ID NO: 5181 - DNA, 6000 bp, Homo sapiens
tgcgttatctcagttcccagcattcactacccctggcaggaccccgggcgccgagtcaactcagcggagtctccggccgggctataaggacccgggaacggcaggaaaacacgcgaggcgccgctttcgcgaccgccccaaacccatcttttcttcgggaactgcccgcaagacttggggctggggagtggagctgcttctccgcactcccactgccctccggagcccagcacgtagccgggcaggaaaggtgaagcgtctacaaggcctcaatttcgaaaccggactcggaaaatcccgatttcctgtcccaataagatgcctttattgtggccgcgtccgctctcgcctcggacggcggggactctgggggccccttactgggcctgctctatacgcagccccgccctggatttgagtttcttgttttacatctgggaattagtctctccaggagtcctggcgggagggagtggggggagagaggaagttgaggacctaaggccattgaaggtgaagatgcgaggaggggcgcccttaggccgacccgctgcctcccacccggactcagaatgtgtgccccaggacagaggaagcggcactgtaaaagtggcacatttagctgggtttgagtttctgacacggattaaaaccaagggcggagacttacactccgggtctgcagcgcactcccggagcctgctcattcattcctccacccacctgcggccttgccggaccctgggaatcttaaaaatgctgtcccacagtccctgccgtctctggaactgcagcaggtgctcagccccaggatggctccaggcgcactgacctcatcctccatgaaaccacagggacccacgcctcttgtaaatctactcatctgtaaaatgggaataatggaacctccctcatagagttgtgaaagtaaattaaagaatataggccgggcgctgtggctcacgcgtgtaatcccagcactttgggaggccgaggcgggtggatcaggaggtcagcatatcaagactatcctggctaacaaggtgaaaccccgtctctactaaaaatacaaaaaattagcagggcgtggtggcatgcgcccgtggtcccagctactcgggaggctgaggcgggagagtcgcttgaacccgggaggcagaggttgcagtgagccgagatcgcaccactgcactccagcctggaggaaagagcgagactccgtctcaaaaaaaacaataaaataaaataaaataataagaatatagaggccgggcggatgcggtgactcacgcctgtaatcccagcactttgggaggccaaggtgggtggattatttgaggtcaggagttcgagaccagcctggccaacatagcgaaaccccgtctctactaaaaatacaaaaattagctgggcggtagtggcgcgcgcctgtaatcccatctactcgggaggctgaggcaggagaatcccttgagcctgggaggcggaggttgccggtaagccgagatcacgccactgtactacagcttgggcgacagagtgagaccctgtctcacaaatatatatatatatatatatatatatatatatatagagagagagagagagagagagagagagagagagagagagcacttagcagttcctgacacatagtaagtgctcaataagtgttataaaaaagaactgccggacgcggtggctcagtaatcccagcactttagaaagctgaggggggcggaggcgggcggatcacttcagctcaggagttcaagaccagcctggccaacatggtgaaaccctgtcaataaaaaatttaaaaaaaaaaaaaaaaaaaaaaaaagccagtggggtggcgcgcgcctgtagtcccagctactcagagtgggtgagggggtagggctgcggtgggaggatcgcttgagcccggcaggcaattgcagtgagctctgatcgcgccactgcactccagcttggccaagagaccgaaaccctgtattaaaaaaaaaaaaaaaaaccgcagtgatggctttcactttttgcagacgcacgtgccacgttttacctgcagaagctcaactaacccgtcaaacagcctggtcggggaggtatttctacccttcttgtcactgatgaagaaactgagacctagagagggggcctagcttgctcaggccgcttcaactagaaaaaggccaagctgaattcgcattcagggcactctcctcttgcacagtaagggggccgagactggggccgagccgcgcaagggcgactccacgttcccttggtggcctggaggactgaattctcgaccaggcgaccaaaaataacaaccagcaggagccgagacccgagagtcagaccccacccaacccagccagaaatgagggagaactggagggggtcgcgcgggggcggggccaaagccccacgtgcgccgcctgcagccgcttcaagaagccctttgtcgcgagcagccgcgttcgtgccgcactcggaggcttaaaataaagacaatgttcccagcctccctgcggctaaatcgggcgcgagtgcgggggtggtgagcgagccgggcgggagcgcttctccaggccgtacctctcttctcccctcctgcctcagtttccccatctgataagggtgagctagccaagtctgggcggggacgtcagaagagtgatacagtggtgggggtggcggggggcgtcatccccctgcgtccgcgactgcacagacttcagaagaaagccgcgtgggacagaggggggcactcaggaggaggcaggggaaagctggacaccctccccacccgcccacaaaataagtgtttttatttctaaagggacgtgtgcagaggcggtgggagaagagaaaagggagaccaaggagactggggggaggtggcaaagagggagcctgattcagattcggaaatggatgttgagcgtggaggcctaacacccccacactcagccacgtgtacgcgcacaagtacacgcagccccaccgcgccgcccaagccgcagccgcaaacccagggcagcccagcagggggcatcccgagtccgcgcccaagggtagggactggtcaagttctgacccaaccctgaccggctgggtgaccctgggatggaaaggggatgctcacttagatttctctccaagctgcagcgtctgcttgacttcagcagggaggaggactgggtgcctgctggaaccccagctggctttgagaagcacagatgcccccacatgtacctgccacgtgtgcccaccagtagctgctgaccaaaccccaggaactccagtttcagctccacttggctccattggccaactgggctcctgggtgagaaagccccaggttaccctcaggcaccagcattggcggggttgtgggggcggggggcggcgcttggtggggaaatgagtaggggaaacccctgccccagactccagagccctgggcttagagccaagtgacctgagcccaaacacctgcccaccacatgctaatcatacctctgctcttcagatttctcacctacaaaatggggataattgatgctcccattccttcccacctctcaccccaagacttcgacacagcccagtgggcaaagaacacagcagccccagaaggcagtccctgcagcctccaactctcctccccagtcagctcccggggaggtctctagggccaaacagaggcggtgcaggacccacatctctagggcaaacggccccccaggggttctatctctgaggaagctcaacacagaagtccagaccagcctggcagggagggatgctggcctcacccagtagggctgagggagattgggaggagggctcatctcctcccaggtacacacctgtgagccctgagtgggagtcaggggagacagagcttgacaagctgggaggagagctgtctgtctgcctgtctgtcttccaagtggaagcttggggtggagcaggcaggtagaggctgcctcacttgtcagaattagcaagttccacagttgggcaacactcagccacacatcagatacagacacacgtgtgcacacgcgtcctgcctccagactgatagggtcacacctgcacttacacaggctgcatggtgacatgagtacacagggacacacatatgcaaggcactcagccgcacatggggcaggcacctggccctctactcatccccgaaaagcagacacccatataccctcacaacaggctatgcatagcccaatgctagcgcacacagcccagcatgcgggcacgttcactcagcccccgggcgggtgcgccagccctctgggtctgttccaagttggagcctctcacgtgaggcccaatgtgtcatttccaaacagaaggaatctagctctctcacagcagggaggaagagcagggtgtgtagttgggtgggtgggtgcgtgggcatgtgcaggggggagggcgtgtgtgcgagggaagcaggcatgtgaataccagggcatgtgtgttggggcatggtgcacaggggctgggggctctaaggttgggtggggggaggagcccaaggaaacagtgtgcctttgtgagggtgtgtgtgccgccgggtctgtgcagtgggtgtgggtgtttgtctccctgtatccgccttctctcccgtccgggacttttagccttcctgggctcgccttcctcatgtcctttctcctccctcttggggctcaaattgggtgccctggtgaaggaggggggcacactccagaacctagtccaaccccagacgctgcctgaggcttccctccagctcccctcccttccttttctccctttcctccctccctctctttccctttctccctccccgctaaggctggcgtgccagggggtgggacatgccaatcactggctgtgcctctcccgctgccagcacagggcgcagctccccctgggagccaggtgtttgggtccctggagacgccgcaggcccccagggaggcagtggggctgaggaccctacagacccctcttcagccccgtggtgagtacatttgggagggcttgggaggggctgcactaaggtagagggtaggagggtcctggggagcgggggagggcagggatcaggatgagatggaaatagggatggactcacagagataggaggaggccagggaggggtctagagggcaagggggctctgtagcattgaacactgactgctccaaacactcggcctcctggctttgagtggatatagctgatgtttttctgggcttctgctggcagaggagatggagatccccctcaggaaactggacctgaggcccagaagggattaggctgcctggtagcaagcagaacccccaacaccctaggggcagagtgggaagggcaaagggccaggaagcagcccttgccaccagcatcctgtgggaggttgacccccatcttgatgggggtgccagtcccagaacctcctgtcctccctcagggcaccctgaaacccaccacccccgtccacctcagctcccccaagatggactgaatcaggctgctggccagatagagaagctagaagccaaggtgggtgtcaggccagaagccagcaggagaccaggcaaagagccccagggctctttggggacaaatgggcatgtgggtggccacactagccagggaaggtggccctgacgtgcgcaggggcccagaggaccctccttatgtttctagtatcttgggctcccgcagggtgggtctcagtcctatatccaggcaatgcatggataccaatgggcacccacgccaggtactcaccccagtgcccgcagactgcacaacatggggatgggctaggggccaggaactctgatgcttgtagagttgtcagctcctgggcaggccagctggggagggggtcgtcagctctcattaggtcatccagacatgtgcagcttagaggttatcagagccaatggagaggggttcacatctttg

SEQ ID NO: 5182 - DNA, 6000 bp, Homo sapiens
acatgaagggaagggaagacacccaagaaaatactttccaggtacatggtcaggacttatggtgaactgagatgttgttcaggacaaactggccactcacaagacccgttcttcttgcaatccccaaatccccattctggattcctccttctctccattgctgcttattcctctacaaccccagctccgcttgctttttctactccctcccttctgtctctaagcagggactccacctggctcggtacatggagatccaatatggagcaccacttttgggcagagtcctcatgctgcgtcaactcataggtcactggcctcatgtccagcctttatatggaagtctttggatgaatttctaatttctgcaccatccgtcagccaggatagtcaggccacaaggcacaaagctcacagtgtatctcagaattccttactcagaatgttgcgaggggcctggcagacacttggaatctgctggaccctccccaagtcaatcgtttcaaacccatgcttaggacatgtgatctaagtaagagtgttttatatgatctgtaaattatgtatttgaaaaatctcacaaaagaataaaaacaaaaatcacaggtagtcccacactttaaatcccaattataaaatggaataaagttatacaaaatcaggacttaatcccagaaaatctgggatatgtgatggctgctggcatggtaggaagaacaatggagtccaaagagttgagttccagacttgtttgctgtgtgatcatggacaaatcctttgcctgctctgggccttggtctccttatgtgtacaatgagacgtttttacctgagtgatggcattcaacttagatggcatgtggttctatggctctgggccaatcagagattcccatatttgaccctttctcagtgagcatgaccagaatttaactctatattccagtcagcacaaggaagtcccattgtgaggttttagtggcccagaaggttcccctaagggacagttcctggctctgaaaatcacttgctatgagagtatgcccatccagaaactctccatgagccaggaggctgctggggaatcccttgccactcagatgatcccaagacccaaacacaattccgggcccagagtctgcaatggagtcttttctagactcagccaggctcggagctcgtcaggcattcaggagggagctcttctccaatgtggggttggcacaggcttagagagggagggtgcttgtaggggcccactatcccctgctgccctcagcactccacccactcccccatgagggcaccaggtcctggcaggagactggccccgcagtccccaagctgtttgtccagctgtcctcgcatccccagaccacaggactcttatgtatcttggcctggagaatgttgtcaggcatctggacacccactgggtcccagcccagaaccaacaacgggtgggagggggaaggctgggctgagttacatacctttctgggcctccccttttctcttttgtacatatgagcccagataatttccaaaaccctttgggctgggcagtctacacctcaacagcagcagttaagaactcatctttgaagttagacagaatgggtttgaaccaatcaaagatttcatggatctcagagtcctgatgaatgataaataccctcccagcttcatgcacaaggctgcagtttgcacgaactgtacaacattcacaaggcatctcgacctctaacaagagaagttggacatcagactacatcccttcaacagcaagacggagatttctgcccagaagaagtgagaaacatcctttcttctcatgacccttggcattggctcatttgtatagggcctggagtgctttctgtaaaatgatggaaccctaatcatccgtcgtgtttagacacatgccaagagaatgatgaagctaggtggggggcagtcagcaggagccagattacctagagggatagttagggacccaaaatggaaacacaccataaagggcaaggaagagtccagcatggtaagccaagctcaacagtcaagtgaggatatagtggagaagggtgttagagcagacacaggaagatcagtttcctgattcagccaccccagtggtggaagtggctgggtgggcccaggcggggaaagagctgcaggtctttggaggccaggctatccagctgtcctccagcagaacaaggaggaggagaatgtctcttcctgggggttcgtggaaatattttgataggagtcatctttccttggccaagcaggtataggattgattactacacacacaaactctgcaacatctttttttttttttcttttttaatggagtctcgctctgtcacccaggctggagtgcagtggcgtgatcttggctcactgctacctccacctcccaggttcaagcaattctcccacctcagcttcttggagcagcagggattacagatgcgcaccacctaatttttgtatttttagtacagacgggatttcaccatgttagtcaggacggtctcaaactcctgaccttgtgatctgcctgcctcagcctcccaaagtgctgggattacaggcatgagccaccgcgcccagcctgcaacatcttttaaggtagcgtttcccaatctcagcaccactgacatttgggggtctagataattcttcattgtgggggcctgtcctgtgcattgcaggatattcagcagcatatctctaccctctaaaagccagtagcaccaccaccatcctgagtcatgacaaccaaaaatatctccagacattgccaagtgtcccctggggggcaaaatcaccgccagtcaaaaatcaccgttcttaggataagatatacttaggcatattttctttctaaaatcaatgtgatagtcccaccttttcaccagaaacaaataagaagagccagtaaccactgaattacagggcatatgagctactttaagcttcttacctatattagttcatttaatgctccaaaaactcaaggcagccaacatagctattatccccatcttgcaaatgaggacactgaggtacagaggagtttagtcacttgcccctagttccacagccagtaagtgtggagtgaggatgtgggtccaagtagactgactccagagtccatgttttatataatatgaagtgcataagttaataacaagaagctgccatctactctctctcactgtcctcaatctgggatccaaccaactggatcccatggaaacccatcaaatcagagctccacacttccctgatcacatgtaactcaggagccaaaactctgttggaggaattcacgtgattgtcttagagttgtggctaaaaacacagtgagttcatgctcattgttttaaaaaataacactatggctgggtgcggtaggtcactcctgtaatctcagccatttggaaggctgaggcaggtggattgcttgagcccaggagttcaagaccagcctgggcaacatagcaaaaccacatctcttaaaaataaataaatacatgtgtgctggtgcacacatgtagttctagctactcaggaggctgaactgggaagataatctgagcctggagaggtcaaggctgcagtgtgccaagattgtgccactacactccaggctggatgacagagtgagaccctatctcaaaaataaattaaagaggccaggcatggtgtctcacgcctataatcccagcactttgggaggctgagatgggcagatcacctgaagtcaggagttcgagaccagcctggccaacatggtgacaccccatctctactaaaaataacaaaaattagccaggcgtggtagcacatgcccataatcccagctactcgggaggttgaggcatgataatcacttgaacctgggaggcagaggttgcagtgagctgagattgcaccattgcactccagcctgggcaacagagtgagactgtgtctcaaaaagaaagagaagagaggagaagagaagagaagaggggaggagaggggaggggagcgaaggggaggtgacaaaggaggggaggggaggggagaagagaagaaaacaagaagaaaagaaaagaaaaaagacactatggacagaagacaatatgactaagggaaaaatctgacccttggaagggtcagaagaatcactggaagaatcacccgacattgtgtatgacgttggtcttaggtcccactccaagagcggcctctgacttctgttgtttcttccaaatgaataaaaccatggttctataagatgtgagctgtccccagaagaacaaagactggggttgtcacatttagcaaataaagatacagggtgcccagtcaaatttgcatttcaaatcaatgaagaattgcttagtataagtatgtctcatgcaatattagagacatactcatacttttaaaaactcttcattgacctaaaatgcaaatttgactgggcaccctgtaatttccctggcaacccttcccaaaagcagactatttggatctcatccactaaaaagggcagaaactcctcaagaggccaccacacttcccagagcccagtctccttcctaaaaggaagacaaataggtccaatagatcccactctggccccccctgcccccagatgcccccctaatacacccctctccctgctcctattcagtccaccctctcctgccctttataaccacttggagaaattccactgacacaaggaatccttggagggttaatccttctgataccaagtcacactttaactcattccctccaggccaaggattaaaaactgcccatgcaagggtcaggtctccagcagaccctgaaagctgagctgccctgacccccaaagtgaggagaagctgcaagggaaaagggagggacagatcagggagaccggggaagaaggaggagcagccaaggaggctgctgtccccccacagagcagctcggactcagctcccggagcaacccagctgcggaggcaacggcagtgctgctcctccagcgaaggacagcaggcaggcagacagacagaggtcctgggactggaaggcctcagcccccagccactgggctgggcctggcccaatggcctttaatgacctcctgcagcaggtggggggtgtcggccgcttccagcagatccaggtcaccctggtggtcctccccctgctcctgatggcttctcacaacaccctgcagaacttcactgctgccatccctacccaccactgccgcccgcctgccgatgccaacctcagcaagaacggggggctggaggtctggctgccccgggacaggcaggggcagcctgagtcctgcctccgcttcacctccccgcagtggggactgccctttctcaatggcacagaagccaatggcacaggggccacagagccctgcaccgatggctggatctatgacaacagcaccttcccatctaccatcgtgactgaggtgagcacctggggctccccatccaggggccaagatgggaagatgggggcctttgttaaaaaaaaaaaaaaagtacatggagaaattaactgctgagttttttaactgctgagttaaaaagaaaaatgctctcagctgtcaggaccagagaggcaaagggcaaagtgccggaggaagagggtgacatggaccccagaggaccagctgaagtgggggaaggggattctctgaagccaggctcatctctgcctgacccttgctcctctccccacagtgggaccttgtgtgctctcacagggccctacgccagctggcccagtccttgtacatggtgggggtgctgctcggagccatggtgttcggctaccttgcagacaggtcagtcctgggtagggtcaaggggctgggctgggctgggattaggggctcagctgggctcagggtgtctaggtgggagcttggcattgccagccggcgctggtttgaggatctacagcaccagcct

SEQ ID NO: 5183 - DNA, 6000 bp, Homo sapiens
aagggggcgactctcccgaccgtgccttcagagctgcccatgaggacatttcctagccttgccctggcagctggagcacagccctcagagcgtcctgtgtccctgcactgtgccacttagggtggcagctgagacccaggctgcctggcaacatgatgggcttgaccagaattagttgggccagggctgcctccaagggcccagggagggcctcaagaagcccacccacatggaagggctttcggcccgtgccccaggagctggagaacactcctcctgttctggcctctcttcctcctcctcttctgggagtgtcgggccttgctgaggcctgtgccctcagggctgaccctgtaattaaatactgtgtgcccaacactgggctcaggctttatacacttttatttaaaaccccaacaatcccataggtaggttttattccccgttttgcagttacaagtgatgaaactgaggcttaggcgggcatcactacgcagctaacaagacgtagagtcgagattcaaattcaggcttgtgcagctgggcacggtggctcatgcctgtaatcccagcactctgggaggccaaggcaggtggatcacctgaggtcaggagttcgagaccagcctgaccaacatggagaaacccccgtctctactaaaaatacaaaattagctgggcatggtggcgcatgcctgtaatcctagctactcgggaggctgaggcaggagaatcactggaacctgggagacggaggttgtggtgagcggagattgagccattgcactccagcctgggcaacaagagcaagactccccctcaaaaaaagaaaaaaattcaggcctgcagaatcctcattccctgaactgcctcactcccataaaggaaactttagaatcagcctgtgaagggagagagagattggggtttgagggcagaggacatcccatggcaggtcaagcctgaaaccaccatacagaggccaccaaatctgttagaaccacccaagcacaggggctgaatctggagtccctaataagtcactgacgaagccacgggctgagaggcccccagtcagccaccagagaggaatagctcctggcccttgggaatttacggaatgtctcgccatccctgccagggactgcagtctggggagcaggacaggggcccacacgtgctgcagaactgcctggaaccaccctggagagggtggtgagtgggcagccagcaggcagcagccacagcaggagcaggggcacaaatggccccatggaagtttcatgatgggtgagagacccagaatctgcccaaagtaaggctaggcaccactgagtgtgactcggtgagcccctggagcctcacgggtcacaagcctcaggagcttccccactcccacccccaggaggacagagaagcccaggggattatcggcccctctgagactatcgcagagatgtcccagcccctgagaccaaggccaccaccctggatggaagagaaattctgcccaagctgcttcatccattttacctcccatttccccccaacacaccttacactcacatccctgggttggcaggtccctctccggttttatcttttgatccccaccctccacatccaagttcagtgtaaaggccaccttctccaggcagcccaccctgatcccattccccaaacctggtcattattaccctctcctttgacccctggaatgtatggacttctcccatgacattgaggtcatctccttcatgctgtgattgtttctgggtggctgcctcctctgaggctggagggtagggcaggcaccatagctcctagaacggggcctcagatatacaagcccatggcgcacattggatggagggagggatggatggatgaatgaacggatggacagatgaatgggcagatggacagacaaatgagtgagcagctaggagggttgatggcccacagaaagttccatgaggccacctggaattgtccagaatgcccagactcacctactgcttctgaagataagacttgtcatagctcctcccctgcctgagtgaatttaagacttcaaagagtgtccactgtgtggaggtgccagggaagcggggaatcaggccagtgctgctcccctccctgcacctcagtttcccatagataagatgagaatgtcggactagatgatttcataggcccttccagctcaaaacacaggtccatgccaggacccagcagagaacaggggagactgaacccaggtcagcttaaaggagcccctggaagagttcagagaaaagatgaaaagagagaaggtgggaggaggaagggtgggagtggggagagagggaaggagaaaaagagaaagaaaatctatttccatatcccaaattaaaaatgcatctagcatgtaagatttcccaaatttatagtgtctttaaaaaaaaaaagttaatttgaacatattgaatttaggatcacagcatgtaaaaagtgatagatcccccaataaggtggatttgacttggggagggactgcctggggcagagaatcccaaagggaaggatgaagcgtgtgggatgggagaggaagggtgacggagggagaggtagggtgacggagggagaggtagcgtgacggaggcagggctcttctggtcactttctctcccactttagctgaagcatccccccacacccacagtccccactttagccagagcacctctattgtctgctttatacattgatcttatgaacccaatatattgtttgaataaaaggtttctggtgcttttttttaaaaagccacttaactaatgaagagaaacaagaggcacagagagagtgatttgtccaaggtcatataacaagtgcatcacacaattcctgatatcactaatccaatcacatccattaggggttggggggcgctgcccggatgcagctgcccctggctgggcagttcagatatgtatactctggcttaactccagcagcctcagcggggagtcaccaggctcctttaaacaacattccactaggacaggaacagatggataacccaagccaattaggaaccagaaaatctccaagaggccaaatgcccagaacagggggagctcagggcggcagcccagctcactgcaagcctcacagtcgaaaatcttcctaaaacaaccccttggctgccttggagcataatttaatcttcctttgatgactccagatctcgccctgcctcaggccactctgagaacatcaataactgctgggcccaggtgggaagccgaggggcagggctggacccaggttgaccagctgaccctgccctgcggtaggagggaagctcagtctggaccctgggggctggatactgccttggtggagaggggggcccaggaggagaatggaaagccctccccaaccaagaaggggagccctaaaggggcccctccctagcccctagagcaggtgggaaggggcagctcccaggggtttctggaggtaggaacagagaggtaaaggcaggcaggagtgatgttgaagaccagcctaggtgacttttttttttttttttttgagacgtagtcttgctctgtcaccgaggctggagtgcagtggcacgatcttggctcactgcaacctctgcctcctgggttccagtgattctcctgcctcagcttcccaagtagctgggactataggcgcgtgccacatgcctggctaatttttgtatttttagtagagatggggtttcaccatattggccaggctggtctggaactcctgacctcgtgacccacccaccttggcctcccagactgctgggattacaggcttgagccaccccgcccagacctctaggtggctctttaagggagaggcaatatattaatagtacagtgcccccataggcttcgtagagaatgttggttctaagggagggaataggcttagggccaccctgcccctgccctgtgcttcctggctgggggatggtgaggaggtcacttaatctccctttgcctcagttccctaattattaatgctagactagtcacagggctgccgtgagggttaaaagagcctaatgttggtggctagaagttgaggtcttagactgaagtctctgctgaggaaaagaccagaagaacagataggctctcaggtgagactggacattttgctttgttttgatttgttttgtttggcttgtctgtatttcccatgttttatgcaggaaacacacattattatataattaaaataatattcagagtgaaaataaaacagcagggactacatttggtccccagggggaagcggctgatcaggagagaagcctgtccattgagggtgggatggaagggggcagttcacctgtgtcagagacacagacacggaggtcctggctgccccaggggcccaggagatggcagccctgcgtcctcagggatagatgaaagtgacattttctgtctgggtgtgccctaacacttcctgagaggcaaatccccttcccctactcgggaggtgccaggcaggggaggtagcacacaggagaatgctgcctgcttacgggcaccagtgcctttcccattggttgtcctcagcatcaagtcctctgaacatcagttgagagggaccttgaaccctcagaggtcaggccagattccttcccagaatctcccctcggtgagcctgccagggctgctcgcgttgggcggatgtacaaaacggaggcacgtctcagacttcccatttgggcccgtggtgtccagccagcagccctgctaggctcagccacgctgccccacccccagcggccctcgctgaggcagccctttgaggagagctgggcttggtgggtccacagcactctccctgccagtgacgttaatccgcaaaagaaagtcaaacattagcccgggaaacagcttatgccttatataagcccccctgggggaggcacaaacacagcttgttagagctgagctgccctactacagcagctgccggcccctaggacagagcagggacctcaactacactgatcaccagccccatcggatccagacccggccaccaggtgaggagggatggagggcctccccagcccaggcacctaggaatcccagggatctcccaaggccaggctccacttgcgactagccaagcccctagtgccctctgagacctgcttcgggctcttacagatactccagcatggtgggcccagccccagggaactgccagaagccaggaggctctgagcttggggaggcctttcccagcagacaacctgaactctgctaaccctgtgtatctgcctggagcaactggggacattcaccacccaccctctaatctgtcctttgtagccaacatccaaggctgggccccttggtccctgctacgtgtcctgcactgctccatgcatgcagcatgtgcaaccagcctagctgagcacacacatgctcgtgtccgcaggtgcacacgctcacaacacatacccgagctcacgcagctgtgtccttatgctgcagcctaaatgagcacatacccatagatacctttgtgtccacacacctggacacacacttccacctttgatcccacagccctccgtgcagctgggctcttcctcagacatccacacaagaatctgcggctccacatgcctgagcttccacatctttacacacttacacatgctctgctccacacacctgtgctcgcatatccacctggttcaccctcccacatatcgttccatagacccacgcactaccaggcacaaatatacctctccctggcctatgccctgcccacagctctggctcgtcttgccccagtgccatgaccttctcggagatcctggaccgtgtgggaagcatgggccatttccagttcctgcatgtagccatactgggcctcccgatcctcaacatggccaaccacaacctgctgcagatcttcacagccgccacccctgtc

SEQ ID NO: 5184 - DNA, 6000 bp, Homo sapiens
acacataggctcaaaataaagggatggacgaagatctaccaagcaaatggaaaacaaaaaaaggcaggggttgcaatcctagtctctgataaaacagactttaaaccaacaaagatcaaaagggacaaagaaggccattacataatggtaaagggatcaattcaacaagaagagctaactatcctaaatatatatgtgcccaatacaggagcacccagattcataaagctagtccttagagacatacaaagagacttagactcccacacaataataatgggagactttaacaccccactgtcaacattagacagatcaatgagacagaaagttaacaaggatatccaggaactaaactcagctctgcaccaagcggacctaatagacatctacagaactctccaccccaaatcaacagaatatacattcttttcagcaccacaccactcctattccaaaagttgaccacatagttggaagtaaagctctcctcagcaaatgtaaaagaacagaaattataacaaactgtctctcaggccacagtgcaatcaaactagaactcaggattaagaaactcactcaaaactgctcaactacatggaaactgaaaaacctgctcctgaatgactactgggtacataacgaaatgaaggcagaaataaagatgttctttgaaaccaatgagaacaaagacacaacataccagaatctctgggacacattcaaagcagtgtgtagagggaaatttatagcactaaatgcctacaagagaaagcaggaaagatctaaaattgacaccctaacatcacaattaaaagaactagagaagcaagagcaaacacattcaaaacctagcagaaggcaagaaataactaagatcagagcagaactgaaggagatagagacacaaaaaacccttcaaaaaatcaatgaatccaggagctggttttttgaaaagatcaacaaaattgatagactgctagcaggactaataaagaacaaaagagagaaaaatcaagtagatgcaataaaaaatgacaaaggggatatcaccaccaattccacagaaatagaaactaccatcagacaatactataaacacctctacgcaaataaactagaaaatctagaagacatggataaattccttgacacatacacccgcccaagactaaaccaggaagaagttgaatctctgaatagcctgaataacaggctctgaaattgaggcaataatttatagcttaccaaccaaaataagtccaggaccagatgggttcacagccgaattctaccagaggtaaaaggaggagctggtaccattccttcttaaagtactacaatcaatagaaaaagagggaatcctccctaactcattttatgaggccagcatcatcctgataccaaagccaggcagagacacaacagaaaaagagaattttagaccaatatccttgatgaacattgatgcaaaaatcctcaataaaatactggcaaaccgaatccagcagcacatcaaaaagcttatccaccatgatcaagtgggcttcatccctgggatgcaaggctggctcaacatatgcaaatcaataaaagtaatccagcataaaaacagaaccaaagacaaaaaccacatgattatctcaatagatgcagaaaaggcctttgacaaaatgcaacaacacttcatgctaaaaactctcaataaattaggtattgataggacgaatctcaaaataataagagctatttatgacaaacccacagtgaataacacactgaatgggcaaaaactggaagcataccctttgaaaactggcacactacaggggtgccctctctcaccactcctattcaacatagtgttggaagttctggccagggcaatcaggcaggagaagggaataaagggaattcaattaggaaaagaggaagtcaaattgtccctctttgcagatgacatgattgtatatctagaaaaccccatcgtctcagcccaaaatctccttaagctgataaccaatttcagcaaagtatcaggatacaaaatcaatgtgcaaaaatcacaagcattcttatacaccaatagcagacaaacagagagccgaatcatgtgtgaattcccattcacaattgcttcaaagagaataaaatacctaggaatccaacttaaaagggatgtgaaggacctcttcaaggagaacaacaaaccactgctcaatcaaataaaagaggatacaaacaaatggaagaacattccatgctcacgggtaggaagaatcaatatcgtgaaaatggccatactgcccaaggtcttttatagattcaatgccatccccatcaagctaccaatgactttcttcacacaattggaaaaaactactttaaagttcatatggaaccaaaaaagagcccgcattgccaagtcaatcctaagccaaaagaacaaagctggaagcatcacgctacctgacttcaaactatactacaaggctacagtaaccaaaacagcatggtactggtaccaaaacagagatatagaccaacggaacagaacagagccctcagaaataatgccacatatctacaactatccgatctttgacaaacctgacaaaaacaagaaatggggaaaggattccctatttaataaatggtgctgggaaaactggctagccatatgtagaaagctgaaactggatcccttccttataccttacacaaaaattaattcaagatggattaaagacttaaatctttgacctaaaaccataaaaaccctagaagaaaaactaggcaataccattcaggacataggcatgggcaaggacttcatgtctaaaacaacaaatgccaaaattgacaaatggggtccaattaaatgagagagcttgtgcacagcaaaagaaactaccatcagagtgaacaggcaacctacagaatgggagcaaaattttgcaatctactcatctgacaaagggctaatatccagaatctacaatgaactccaacaaatttacaagaaaaaaagaaccccatcaaaaagtgggcaaagtatatgaacagatgcttctcaaaagaagacatttatgcagtcaaaagacacatgaaaaaatgctcatcaccactggccatcagagaaatgcaaatcaaacccacaatgagataccatctcacaccagttagaatggccatcattaaaaagtcaggaaacaacaggtgctggagaggatgtggaaaaataggaacacttttacactgttggtgggactgtaaactagttcaaccattgtggaacacagtgtggtgactcctcaaggatccagaactagaaataccatttgacccagccatcccattactgagtatatacccaaaggattataaatcatgctgctataaagacacatgcacatgtatgtttattgtggcactattcacgatagcaaagacttggaaccaacccaaatgtccaccaatgatagactagattaagaaaatgtgccacatatacaccatggaatactatacagccataaaaaatgatgagttcatgtcctttgtagagacatggatgaagctggaaaccatccttctcaaccaactatctcaaggacaaaaaaccaaacaccgcatgttctcactcataggtgggaattgaacaatgagaacatttggacacaggaaggggaacatcatgcaccggggcctgtcttggggttaggggatgggggagggatagcattaggagatatacctaatgtaaatgacttgttaatgggtgcagcgcaccaacatggcacacgtatacatatgtaacaaatctgcacgttgtgcacatgtaccctagatcttaaagtataataaaaataaataaataaattttttttaaaagggtgaactgtatggtaaatgaattatacctcaatgaggtatacattttaaagaattttagtcctaatcaaggtgcaattttctcctatattttgtctgcaattcttccatagcacattgtgcgtctcacataatatttacaatatcagattacaattgtttatgtactctatcttactcactgaactgcaagatttttgaacctggttgtacacattattcaagatactgacacagaaaatgtccccacaaataatatctgaaagaatcaataagccagtaaaagtaaacctccatatgagcttagcactggcttactactctggttcttatcactacccactctccccacatttgaagtaatttacttccagtgtgagtttgtggtatgctttggcatgaagcagaacatcagtcaacaaaatggaaggtttgcaccatattactcattttaattcaactcagattgtgtttattaatccttaatcaaaaattggtacttaacaagaaagacatttgctttctgttcttttcacagagaaaagaaaaagcactttgcctttgagtcccacagattacacgttctggaaagactgcataccaagtagcagatttattttagtttgtttacaaaaaaatgtgcagaccaaagttcaatgctgctattggggagctactaaagacatcaataagtagatgtctaatgtttaaacacatttcattgaaaatggttggaagtatctgagccaattatttcttatgtgaccctaaagaaaacagatacctacctgaccccaaaactacttgaggaaattgcttccgtgaccctgctgcagatgggagagagggcccattaagaagagagtggggtcaggatcaacacacacacttagtgtgatttaaggaaaggaaatattttctctttgaacttatctggatacagtcattttgtctcctcttggggatcacttgtccagcctcaatggcctttcaggacctcctagatcaagttggaggcctggggagattccagatccttcagatggttttccttataatgttcaacgtcatagtataccatcaaactcagctggagaacttcgcagcattcatacttgatcatcgctgctgggttcatatactggacaatgacactatccctgacaatgaccctgggaccctcagccaggatgccctcctgagaatctccatcccattcgactcaaatctgaggccagagaagtgtcgtcgctttgtccatccccagtggaagctcattcatctgaatgggaccttccccaacacgagtgagccagatacagagccctgtgtggatggctgggtatatgaccaaagctccttcccttccaccattgtgactaaggtaagaggcctcattttcctctcttgtgtacatgacctggctgtttagaataacacaagaaatgattgtgcttccagcctttagtcacatgtaggtgcttattcttcattctttcaggaaacattaattgcttctctactgaatgccagatacctgcacatttaatgagtctaatgaattcaaaagtagatgtgaccctgctatcatagtgcttttatccttagtaaaaccaaaatttaagcaagcatttatgaataatgtgttaaaaaatgttctgctaagtaaagaatgctcagcctgtggttgaaaattataaacctctgggaaatcactgaaaacctccaagtccagactatatcttacaacaatcatatgagaaagtctaggggtgaaatttaggcaaccaaaaatatttaaaggttctcaaatgatttcactgtgtggccaaggttgagaaccatttagtatggaataaaactgggcactaataatatctaaaagtttaggaatagcttccaagagaaagttgtgcttaagttgagacctgaacagtgaatatcaggtaatgcagaaaagggaagctagggaggaagatagaatgaaacttgcaggctattttaagacattttgataaggttacactgaggggctataagcattgatatgagggtttccttttcttccagtgggatctggtatgcgaatctcaaccactgaattca

SEQ ID NO: 5185 - DNA, 6000 bp, Homo sapiens; identical to SEQ ID NO: 1663

SEQ ID NO: 5186 - DNA, 6000 bp, Homo sapiens
gtttggggagaccagggtccattcccagccataggggctgccagggaggaaacagggcctctgagcattcaggagctgtgctgcttcttccttctcatcccttgtctgcagagtcccaggggagctgtggcctgctgtcccctcatagggtctttctcctggggctgtgcaggattgctgctgcctgaagctctggggggacccactgatagatggcctctcctccttgttctcagctggtgggaccctgctcccttcacccaaaaccaaaggtgttggccttagtggggtgaacttgctgctgtcctgtgtagttttggtgatggccttacatgtacttgtacctcacacagacacactattgcacagggaggggggctgttaacaatctgcaccccctttggtgccctcagggcatgaagtgggaatctgttatttcctgctgagagcaggaccacaccccagaggacaggctctggaggcttccaggaggccaggctgctggacagctggtttccctggaatgggctcctctttcttccccaataatcccggctgcagtttgtccccttgagccacaaggtcactccctactgtcttcgcttggttcttttcctcctaggctggacatctgattgccaacttgcattctgtttgaggcccctccccagagagggcagggtcagcagcagctcccagtccctagtggttggtggcctgcagctggttagagccctgcagagggagggcagctgaggcaggaatggcggggaggcaaccttctactctgtggggtagctttggcatttcccttggatgatggggctggagtgggtgggcagagtgcagcctcctcagcattgcttgaatcatcttccctggggtcctgctgagagaccaagcagaaaagtcaactgcctgggaagaaacacacacaggcacgcacacacacatgcacacacacacacacacacacacacacacaacgaagcgtctccattttacagacatggaatacggctggagagggacagtcgatttctggaggtagttcatagcagatttggggtgagactccagtcagtgcctttgcctccataccacactgcgggaccttcatcacctgggcatgagtcctgagtttcttacaggagaaacctactgggtccaggagctcttgggtggtgttagtttttctttcccctttgaaaaaaatgtctaccccatctccctcagtgctttcctcgtgttcttaggcatgtccagcccttgggtaccaccacatctccactctgtctcccaagattttccttacttgacctgctgctgtctgtgccttccaaagcctccagacaatggccagctgagggtgttccagcctgactgccaaggcatggagacctggctgtggctggacctcttcccctccagctaactcagttttgcacagatctggagatgatggtaacttcgttgcttaatagtaacactccccactaatagtttcatgttttgctgctacaaggcccttttaatttgatcctcagagaaggcagtggcctttgtgtttaactgatacggaaacccaggcctcagtaagaggcagttactcaccccaagtcatagagtgtcgatggtagagcttggctggaacttaggtgcacctgactgtttgtcactccctgctgctcatttagtcctcgggggaggggtggtggtggtacccatggtgggcacttcttgcctggggtggaagaaatcaggatcacgaagcgctgctgcccgtcgccactgcttcactcccacacagtggagccttctggaaagggggcatgagatggatgggaagtgagggttgtgctacctttcagcagggataggaagagcaacttctttgggtaccaggctggtgggagggagggagagttggggctggggagcagggtgcatcttgggaggcgtcaccatccccaagcactggtctctgcaaagctgtggagctaagacaaggtgggtgcaacctgggggccacacagggctcagtgtgctgctgctctgagctctggctctggggtaatgctgagatctccgcccctggagggcagggcaggaatcttgggagtgggacccaatcctctcttctcccagggctactcctccttcctagcttgtctctggtttttcatgctctgtttctatggcacgtcttcttggggccctgtgatgtacaaggtcaggcaggaacccagcagagagacccgttcagttagctctgccttcacccgtgggaggccctgggggcgcaggcaggccctggtttcaagagaggaaagagggtagaaatggcaaaggtggaaggagcagggcctgtcctctgaagggtggggctgggggttggagctgtctggtgggggagagactagggtgaggagaggtcacaccttcagaacaacttttccccacttaccacctcaatttctccatctgtgacatggggactactcctgggggtggaggggactttgtgttcctttaaggcttatgagtgtctgctctgggaagacaggagagaaaagatgagatggaggaaagtggacagcaaatgaaaaagagaatatgaaatgagaaagggtagctaaaagagacacttcccagggctgagatttgggaccgaggtgttcccatcaggcctgcttactcctctgtctttcagagcctgtctcctgcctctcccaggcggtcaattccttaccatctctgcctccctgtctccgttcatctctgcagtctctattgatctcttacatacctctgtctttcccttcttttttaccctctatatctccccctcccttctcagccttggcccccccatctctctccagttcccactcactggtattgattggcctctaggcggtttcccttcctttcctctcgccaccggctcctccctccctccctgtggaaccataaattttctgcctgctcagagctgtgtcagtctatattccagatccaggggcccaagaacgtgatagagagggcaggaggacgtggcctctgggggccccagccctgctcctggcatgcagtctctcctccagcactgcatggctcggggccctgcaccaccggaagcctcctctgggtgcctctgaggaccgctttcttcacttctaaagacctgggggccaaatccagctctggcatgtagtagggatggaggactggcagcagcattggggagatgtcctgggtcctgactgcatcctggagctgggggtggcacatggggctcgtggtgacagtttttgctcccaaatggagtttagaatcaataaataggagccagctctctccagcccctcccagcctcctctctcccagccctcccctttctcacttcacccgcccctgcctcctgtcctttccttacccagccctcctcctcactccgctgcactgtttcttcagctcccccaggtgccctctccacctctctcctcctttccctcctcctctaccctctgccttcccaccctctcccctgtccgagcaggttggtgcatacgacccggtgacgggaaaggagtctctctgtgcttacctctggggccacaggtgctttccagagcgtccaaaagtttgggggacagaacccaattggagggcatcctgaaggagaagtggtttcctcagcttgacatacgtggcccaggaagggttttgtcctaaatgggacactcagtgggcaggtgtcctctagaccccccatggagggagaggttggggctgggggaggggcagtggtagtggagaggaaggattggaggagtccaggagaggcttgtgcagggggctgggggagcagctttttggggaggtggtggggagttgtacgtgtgtggcatgtcttattcctgagtacctcgaaggctctgggtgcactgtatgctgtggaccctattttggagggtgagcttggggagcaggggtgtctgtgtgtatgttggccattcatgtcctgtgatcaaacgtgtgtgtgcacggatgtatgccctgtgagcatgtgtatatgctcccctgagagtaagttggtgtgccagtgtctgtgagcacatgcatgcatgtatgtgtctgagcctgtgtgcctacccgcacactgtgcccatatgggcacgtggatgtttccatacccaagccgatacacatctcagtgtgcacgtgcgttgcgaggggtggtgcagaggtggccgccgcggcatctcagcaggctgtgccagagagcattattggggttcatccgggtggggtgggcggggaggaagaaagtggcctctcttgctagcctcaatcccgttccattattcagcagggtcccttctccaggaggggggtgcaggaggagcgcgcgcgtccaggcgcgggggaggggcgggcgcgcgcagaggagaggagagcgccgagcgggctagccaggtgccgcgcggctgagctgcccagcgccgcccgcagatcgggagccgctctggtccctccgccctgccccctcctcctcccgcgcttcccctcccctctccgctctcctccttccctccctccctccctctctccctctctccctctctccctccctccctctcccttccagccctctcagcctctgcagcaacacttcgctgcctccatctctccgccggaatctcgcaggctcgcgcctttcctcggctcagccccgctcccctcctctcctatcccctcctctcctatcccttcattcccccctcacccggatttgcttcccttcccccttctcccgcccccccctcccccggccgctccctcctttcccccggcctccgtcgggcggcagcggcagcagcggcgcggccggccccagtcgccgtcggtctcccgccttcgggggaaccaggtctccgtccctcttctctcctccagcccgcaccgccccgctccccagctcggtttttccgcaggatttccctcgctctcccctccctgcttggcccccgcgctcccctccctctccactcggcaccatgccccctcccccgggcgctcccccgggtttctgacggccctctgcgccgctccgaccccgccgggatgcagagagacccctagctcctcgcgatggacccaggcatcctggaccttggcgttgccgctccgcggacccccgatttcccggcgggatccagttgattttgttggctccggaccgaggcttgggccctggtttacctccgcttcatccctaccccgctcccggagctcggagccggaggggggcttcgcggggctgcgcagccccgcgtccccgcccccggccatggggctgtgaggcggtcgcccccgggccgaaatgccccccggggggagcgggccgggggggtgcccgcgccgccccccggccctggctgggcccctgccgccgcctccaccgccgccgccgccacctctgctgccgctgttgccgctgttgctgctgttgctgctgggggcggccgagggggcccgggtctcctccagcctcagcaccacccaccacgtccaccacttccacagcaagcacggcaccgtgcccatcgccatcaaccgcatgcccttcctcacccgcggcggccacggtaagtggcactgtagatgccggccacccggttggcccgggggcggggggcgcttcccgtgtgcgcagctgggcccccgcgggccccaccccagctgtgcacgccgagcctggcccctctgctttgcgtcccggagccccttcacctccaatctccagctcccatcatctcagccccacccttgcctccatctctcctctcccccatcaccctcatctctgtcttcagcactttgcttcctggcctcacctaaacctgcttacccctaggtctggttcattatctccttctacttccttaccctccccgccctgtctgtcctttcatcctctccgtgcagctctgc

SEQ ID NO: 5187 - DNA, 6000 bp, Homo sapiens
gtggcctttgctgtggttggggcctgccaggccctgggtctccgggatgtccacctcgccctgtctgaggatcatgcctgggtagtgtttgggcccaatggggagcagacagctgaggtcacctggcacggcaagggcaacgaggaccgcaggggccagacagtcaatgccggtgtggctgagcgggtattgttccctccccccagccttgtccccttcatactgtagtagcccaagccacccaagggactccattttcttgggccacacccctttcttcccatcaccacccacataggaagggaagacagaagagccccttttcctggctgtcattccctgaagcaggcacagggtgggccatcatgagacataatgatctcatccccccctaagagctggctgtacctgaaaggatcatacatgcgctgtgaccgcaagatggaggtggcgttcatggtgtgtgccatcaacccttccattgacctgcacaccgactcgctggagcttctgcagctgcagcaggtgagggctgagccaatggggcaggactgggctaggccagacttgacttgctgtgggaccctgggcaggggcactttcccttcctgagcttcagcttcccctcctggaaaaatgggttagtaattcctggcctggcctttcccagggctcttgggagagtagaattgagatgtgaaattgctttgactccattaaagggctggtcccagaattttggcccttccacatggtgggtggtccctgttggttctgacccccacctctgcccgataggctaaggacccgttctcctccctgttccgtggctcataactctctccttcggctcctagaagctgctctggctgctctatgacctgggacatctggaaaggtcagtagagggaagtggccaggctgcgcctggtgaggccggggggctgggtggcagcctgaattatgatcctttcctaggtaccccatggccttagggaacctggcagatctagaggagctggagcccacccctggccggccagacccactcaccctctaccacaaggtgggggcatctaaggagggtgcagaagggagaccctaacagtggctgaggcaggggccctcatctgggcagatgagaagagaactttgtgtgttggggggtatcgcccatccagtctcactttgtgtcaactgtgtgcagaatcagttcagtcagggctgtctgaggggtgtccagggttccccagcctgggagtggcaggggctgcatttgtcccctcagccctgccttttctgccactgcttactgtccttcctggagtataacagaggtcaaatgtggcaggagcactgatgaagagggggtgttcacttggtgggtgtaggtggggaggagggccattgggctgggcttgaaagtctttggtgatgtgtagaagagtgtctgagaaagagaagggccctgagctcggagggcaggccccacccctgcagtctgccccaggcctcagccagcagtcctgtagacccagggaggagaccaggtagaagggctggcagcgagtggaggtgggagtggagatggagaggactccctgggatcttcctgtggccccttctgggtgtgccctggtggggcatttgtgccagcagggcagctggggctgcctccctgaggatcctctgcctcacctccatccagggcattgcctcagccaagacctactatcgggatgaacacatctacccctacatgtacctggctggctaccactgtcgcaaccgcaatgtgcgggaagccctgcaggcctgggcggacacggccactgtcatccaggagtgaggatccccctactagggcctgcagcctgtcctttcttcccctccatcagtttccaaccaccctcgtccaggactgaggcctggctcccacgccccatcccctttccatccagtccctaggcagcaaggccaccattacccaggaggtagggaccctgattaaggtgtcacatctttccctccctcccctctcctcctaattttttttttctcagaacagtctcaaatctccaatgtttaaccaccatcatccagcagtgggacttccaccctcggccccatgcccccctcctcattcttgctttcttcctctgggctgacccagacagcatcattttgcagtgaggaccccacctactcccccagcccctgggggctccatcccccgccaggtccctggggctacccccgatggtgagaccccttcagaccctacagagaccccactgctctcacagctacaactactgccgggaagacgaggagatctacaaggagttctttgaagtagccaatgatgtcatccccaacctgctgaaggaggcagccagcttgctggaggcgggcgaggagcggccgggggagcaaagccaggtgaaaggctggagctccagcctgtgtccagcctcccacctggacagggctcccttccacaggccatgggggctgcatgtacgggattagggatggcaggaggaaggtggccctgagcagacagctatgttcccttttgctataactgaggtcctgggcccacgttggacgggactgaaggtattttagaggtttctaccctgtgccttcagtttcatggccagactccctccctcagctgaggggtggaggtagggatggtacgtcctggctatggattggctttataaaaggaaagaggttctaagaatgttcccaacctatgcttaccttttctggagccaggggtctttgcctaggtggggggcctggcctgtgccctctgctaaggggtgagtaagagactgatctgtgccctcccttccccctcgtccagggcacccagagccaaggttccgccctccaggaccctgagtgcttcgcccacctgctgcgattctacgacggcatctgcaaatgggaggagggcagtcccacgcctgtgctgcatgtgggctgggccacctttcttgtgcagtccctaggccgttttgagggacaggtgagggacagctgcacagaggtctgggcactacaggtggtgacagcagccacgggcttgtcagacttttctggcccaggggcagcatctgcccatccccttgggtgccgatgggactgagaccccctgggtgggatgggatggccagagcagggtcctggagttccagccactggccggcaaccttgctctcaccttgctctccccactggcccaggtgcggcagaaggtgcgcatagtgagccgagaggccgaggcggccgaggccgaggagccgtggggcgaggaagcccgggaaggccggcggcggggcccacggcgggagtccaagccagaggagcccccgccgcccaagaagccagcactggacaagggcctgggcaccggccagggtgcagtgtcaggacccccccggaagcctcctgggactgtcgctggcacagcccgaggccctgaaggtggcagcacggctcaggtgccagcacccacagcatcaccaccgccggagggtccagtgctcactttccagagtgagaagatgaagggcatgaaggagctgctggtggccaccaagatcaactcgagcgccatcaagctgcaactcacggcacagtcgcaagtgcagatgaagaagcagaaagtgtccacccctagtgactacactctgtctttcctcaagcggcagcgcaaaggcctctgaactactggggacttcggaccgcttgtggggacccaggctccgcccttagtcccccaactctgagcccatgttctgcccccagcccaaaggggacaggcctcacctctacccaaaccctaggttcccggtcccgagtacagtctgtatcaaacccacgattttctccagctcagaacccagggctctgccccagtcgttagaatataggtctcttctcccagaatcccagccggccaatggaaacctcacgctgggtcctaattaccagtctttaaaggcccagcccctagaaacccaagctcctcctcggaaccgctcacctagagccagaccaacgttactcagggctcctcccagcttgtaggagctgaggtttcacccttaacccaaggagcacaggtcccacctccagcccgggagcctaggaccactcagcccctaggagtatatttccgcacttcagaattccatatcttgcgaatccaagctccctgccccaaataacttcagtcctgctccagaatttggaaatcctagtttcctctccttcgtatcccgagtctgggacacaaaactccgcccccagcctatgagcatcctgagccccgccctcttcctgacgaaactggccccggatcagagcaggacctcccttccgaccctctgggaacctcccagaggtccagcccatctcggagcatcccggaggaaatctgcagagggttaggagtgggtgacaagagcctgatctcttcctgttttgtacatagatttatttttcagttccaagaaagatgaatacattttgttaaaaaaaatataaagcgcaagtccatgtttatctgggaaattggggatggggcggggagtggagcgccccctcttccctctgtcttctggctcccgggactttgcgctccctacctgtggagcgcgagcgacagtggcggcggaaggacgtaggctccgccccggccttggggcttccccgcgccgccgagggcccgtcccgcgggcgcctcctcccggactggcggtggggcatccccggcgcggccccgcccccgggcctcagccccgcccccgcggcctcagagccacgggcgcccgccccgccccgcgccgccccgcgccggctccgcagctcgcgcccgcccgcctgccggcccgcccggcgccgggccatggcgctgctgcgggatgtgtcgctgcaggacccgcgggaccgcttcgagctgctgcagcgcgtgggggccgggacctatggcgacgtctacaaggtgcgacgggacgggcgggagagccgggaggagggtgccagccccgcaccccgcggcaggatctagcccccggccccgccccccatcccgcttcaccctccgcccctgcaggcccgcgacacggtcacgtccgaactggccgccgtgaagatagtcaagctagacccaggtgagggcccgggtcgggcctctgcgccagaggaagggcagagcgcccgcgggcgcggggtgcgggcggagggttgacgtttccgagacccctgagaggcgtgccccgggaggtgctgtcacctgcacctgcctggcccggagggaggcactctgtgcccattttgcagatgggggcactgagtcagggcaaccccagcgcgccttccccatgatgctttgtgcttcccaggggacgacatcagctccctccagcaggaaatcaccatcctgcgtgagtgccgccaccccaatgtggtggcctacattggcagctacctcaggtgaggctgccttatcctcctggccccaggcagcccccatgtgacctgctttgtgcccaccccagctctttgtccctaggaatgaccgcttgtggatctgcatggagttctgcggagggggctccctgcaggagatttaccatggtgaggccagggctccaggccccagcaggccccagccttcccccacccctaccccactggggtaccagaggggactctgggccctggacttgggctcctctccactcctgcctggctgtgtgaccttgagagaaatactgtccatctctgggttcagtatcctagactaaactgggaggggacgtggccaacaccgctttcatttaacagtgcctgctgcttttcccacacacggtagcctgggagggtgggcatgacccccgggcccccaagccagcctctcccttttcctttcagccactgggcccctggaggagcggcagattgcctacgtctgccgag

SEQ ID NO: 5188 - DNA, 6000 bp, Homo sapiens
acatcttcatctgtaacatggggttccactgtgtccacctcggaggatgaatgattttgtgtggacttggtgcattccatgtgttggcgactgttatctgatctccagtggatctaccctggcccccaaactggctttgcaggcccagtgggagcagctctgagtaccagtgttcccagcaggctcccttccccactaaagggcctggtattcctgcccaagagggtggccagaccctgcagcctggcagggccttcctccatcctgcaacgtcatcctttgggaacacccagcactgaaagtctgttagatcccatccccatcttgtgagggcacctgcgcctgttacgcaggtgtcctatgcatggctgccttggcagtctggtggggcttacccagaggggatctgcttcccaggggtctcgtgcccaccttttacatctcttattgctctgaacaccccttggacagaagacagctggagcaggagtgttgagttgctgtgctggcgtaggtcagctttgcctccaatctacaaatacttgttgagtgcctcataggtgccgggcactgctctggactctggggcttcggcagtgaataaaacaaagatgtctgccctggtagaacttacgctctgggaggggcagcaagaaataatgaacaagtaacatgaggatagatgcaatggagaaaaatgaagccacagaggaagaggaagcctgagggagggggaggaatgcaattttattttatttatgtatttttaaacatggattctcactatgttgcccaggctggtcttgaacttctggactcaagcgatcttcctgcctcagcctcccaaagtgttgggattataggtatgagccactgcacccagccaggaatgcaatttcagatagagtagtcagggaagagctcattgagaagtgacatttgagcaaagacacaaaggacctgagggaaggagccctgtggacagctggggagcagggttctagggagcgggagctgccaacacaaaggcactgagtcaggagtgtgcctggtaggctcaggggacagtagcaggccagagctacaggagccgtgagtgaggaggacagggaggggaccgggtctgagacatgaagggctctatggccactgtcatgactgttactctgagtgtaaagggagacttggagggctgtgagcacggtcgtgacatggcggacctgggtttcacaaagatgagtctgactgctatgtagagaaaaaaactagaggggacaagaatacaatcagagaggccagttaagaggccactgcaggctgggcacggtggctctcgcctgtaatcccagcactttgggaggccaaggcgggcggatcacctgaggttgggagtttgagaccagcctgaccaacatggagaaaccctatctttactaaaaacacaaaattagctgggcatggtggcgcatgcctgtgatcccggctactcaggaggctgaggcaggagaatcacttgaacctgggaggcagaggttgcggtgagccgagatcgcgccattgcactccagcctgggcaacaaaagcgaaactctgtctcaaaaaaaaaaaaaaaaaaaaaaattaggcagctggaaatacaagagttcggggatgggttagattggagacatatacttgcgggtttctggtctatatttagtcatttgtattggttctccattttgctgtggttttttttgttttttttttttttttttcttgagacggagtctcactctgtcacccaggctggagtgcagtggcgctatctcggctcactgcaagctctgcctcccaggttcacgccattctcctgcctcagcctccagagtagctgggactacaggtgcccgccaccacgcccggctaatttttttgtattttgagtagagacgggctttcaccatgttagccaggatggtcttgatctcctcacctcatgatccgcacgtctccgcctcccaaagtgctgggattataggcgtgagccaccgcgcctggcctattttgctcggttataatcactccaaaacctagtagcccaaaaccataaacatgtattatctcacacagtgtccacaggttaagaatctgaaagtggcttggttgggtggtactggctgagggactctcgtgaggctgcagtcaagattccagcaggggccgctgtattctgacggcttggctggtgctggaggacccatttccaagttggtttattcacagggctggcaagttagtgctgaatgttggcaggaggctttagcgcctcaccatgaggcctgtccacagggctgcttgagtgtcttcacaacatggtgtccgggaggccacgtgactctgcaggcacatccaggggcaagggtgcaggcgcagaagaagcagaaagtgagtcagaagtaaccagaatggtgttttcccagtggatgtgaccaaagcagagaggattgggggttaagagggcttccagggcctcaaactgggcaaggtgagtacacgtgggaggtgaaggagggtgggacggaggcaagtgtgtggggcaggtggagagtggggagggagccagcagcagtgcattgctggtcctggaggattgaagaccccttggacccagagccattgggagaataaggcaggaaaatgaaaggtgttcatgtgctctaactaccgtaagttatttctaggaactcccacaatccagaatgttctgggaggggccataccacccacacagcaaagatgaaggaaagaaaattgactaagttaacgtctggtgcctacagccatgtagacaccagtggattccaacagcctgagtggatctcttgggtgtcacacacacagctgtttacacactctccaacacaaaccacagtcccaggtgttatcactcagatgtcacacacttttgtccaggcgtcctgtttgtgacttcacatgattgaggggttaaatccttccaggagtgggtggggtaggaccatggggttgctgcctcagtccctcaacttatcagctgaccttggcatcccactccccacctggtggtgactgtcctgtgtcctcataaggaaggtgtatgctccctgcaccgatgggcttctgataagatccaaggtcatattctgggcgtcgataatcacgttgccaagaactgtggcttcctggtgcacctccctgaagtcactgatcacatgacatcccttcccagccacccctagtcctcccatgctgaacctcctcaccagcagcacaagagatggtggtgccagcaaaatggggttgtgagcaggaaggaggctgctctgagaggggtctgtgaaatcacacacacacacatgcacgtgcacacacacacacacacacacacacgctctgccctgatccagcccccaagctctgcaggcatctttgagcccatccatgggctgcaacctgcgaggcagagtcaaggcaggataggccatgggagggtgggagaagtcccagctcaagtccctagggacccccccagcccctcctggctctccgtgaggtctggaagaggctcagtatgtgtatggcatacttggggtctcacttccctctcagcccttgcaaatgctggaacaccttttcagccttggaggaccccctcagatgttccctcctagtcagaactcctcactctttcactgggagcatggtgatcctccctctacagggcacttaccacatggctgaacctaaagcctgtctgcctcgcctgctggattttgcttccccacagccttgcatggctctagtatagcacagaatgaacagtgcttgcatgtataaaggaaggaatgaataagtgaatggagggatgggtggatggataaataggagggtggatgacggagtccaggcagagccaggggatagaagaggaagtcacctcgccagggaggcatgggcttcccctgctgcctcctctgggacagcctcccttcccaggactcccattcctcgtatcgctgggctcccttcaggatagacacagagagttcttctgggtcctccttcttcctttagctctaggccttacattttccagagtcagatgagggatgagtagttaaaattgatgagctcccactacatgtcagacactgcactagctatttctacagatgccatattgtttaatgaaaatgacaccatagccggcacggtggctcactcctgtcatcccagcactttgggaggctgaggcgggtgatcacctgagatcaggagtttgagaccagcctggccaacatggtgaaaccccatctctactaaaaatacaaaaattagctggacatggtggtgcacacccgtaatcccagctactcgggaggccgatgcaggagaatcacttgagcccgggaggtggaggttgcagtgagccgagatcacaccactggactccagcctgggtgtcagtggaagacacagtctagaaaaaaaaaaaagaaaacaggtgtagagaagctgagtggattgcccaaggtcacacagcttacgtccagcaagaagggggatctcaactcaaaatctgctcaggcaggtagggctgggtatgctgtagatcggctgccttggagggaggcagaggcagtgagggtgggcagtgggcacggccctgctgtgaacacaggagctctgagttccagccctggcttggcctctgttttcctgggacaccctggatgagccccttccctctcggcttcagtgtccctgggtgaccttgctgcccttggagagccattccaggcaaatggtgcaggatgtggtggatgtggatggctcctggctctcactgcgggatgttccctcactctccctgccagctgggggtcaaagggcagtgccacccatggggtaatgtttaaccaggcacaacaccccctctatagggaataacctatagaccagtcctaccccagctggccaagagtccgcaggatgcagtggacgaaggtgttggggctggggctgggggctgctgccctcttggggctggggatcatcctcggccactttgccatccccaaaaaagccaactcactggccccccaggacctggacctggagatcctggagaccgtcatggggcagctggatgcccacaggatccgggagaacctcaggtgagaagtggggccatctgctcctccgtttgccagaggccccctccctgatgctggccctgcccctccctctgcccaccctgcagagaactctccagggagccacacctggcctccagccctcgggatgaggacctggtgcagctgctgctgcagcgctggaaggacccagagtcaggcctggactcggccgaggcctccacgtacgaagtgctgctgtccttccctagccaggagcagcccaacgtcgtggacatcggtgaggtcctgcccagtcttgggaatgcccgggggtggggagctgctgggcccagccatgatactgccacccctccaacagtgggccccactgggggcatcatccactcctgccaccggactgaggagaacgtgaccggggagcaaggggggccagatgtggtacaaccctatgctgcctatgctccttctggaaccccacaggtgggcccagaaccccccctactgctctggcccagctcccttggttccacccagggttctccccaccctgacccagggaacgtgcctcaactggggcacagcgcgccctccggaatttactcaccgggacactccatcgctgctcctttcctccatcagtcattcaacaaacactagtggctctgctcaaggccaggtctgttacagggcacccagacatggaggaaatgaggggtgactgttcttggggagcttacaagctctgggtgaggtgggggaacagaatctaaattctccctcctgccatgcaaacttccaccccccttccccacccacactt

SEQ ID NO: 5189 - DNA, 6000 bp, Homo sapiens
aagaacagcccaaatagctgagagttcccttgtgacaacttgtgggttccagagccaaatggagacacctggaagagcaaccagattcaaatccccatccctgagactgcaggcatggtgaaggaacactggagtttggggccgacatactcgggttcccatccttgcctggtcgctggccaacttcagggagtcaatttaagttgtcagttgcctcatctgtaaaagtagagctaatactcctccctccaagagtgtgtggaagggaagggcacggtttctcatctacacaagagaaggtgctcctcggacccccagtctgttatgctccagcagctactctcagagatcacaaaatcacttcgaggaggctcaggttcagatctacttctcaggcaagaactgaggcaccagaagctgcagtatgtaatcacctggagagcttccacagcctgcctgggacttaacctccctagggcccagtttcctccctatcaaatgaagatcatgatatgatccctgtttttttttttttttgagacggagtttcaccctcgttgcccaggctggagtgcaatggtgcgagctcagctcaccgcaacctccgcctctcaggttcaagtcattctcctgcctcagcctcctgagtagctgggattacaggcatgtgccaccacgcccagctaatttgcatttttagtagagacaggggtttctccatgttggtcaggctgctcttggaattctcaacttcaagtgatccacccgcctcggcctcccaaagtgctgggattacaggtgtgagctactacgcccagcctgatccctgctttcaaaaggctgtttgggagaaagaaaggacacagccgggtgtggtggctcacgcctgtaatcccagcactttgagaggctgaggcaggcagatcacgaggtcaggagatcgagaccatcctggctaacacgatgaaaccccgtctctactaaaaatgcaaaaaattagccaggcgtggtggcgggcgcctgtagtcctagctactcgggaggctgaggcaggagaatggcgtgaaccccgaaggcggggcttgcagtgagctgagatcgcaccactgcactccagcctgggcgacagagggagactctgtcaaagaaagaaagaaaggaaagaaagaaaaaaagaaatgacacaaagaaagtgaacgtgtcactttcttttttgtctatgttgcccaggctggtctcgaactcctgggcacatgtggtctgcccaccttggcctcccaaagttctgggattacaagcatgaaccacatcagccttcacttttcattcatataatctcatttgaatttcacagctatgttaaacaagctcattttacaaatgagagcgaggacccaacctggccagtaaactagtgacagagcctctgacttctgtgagttttccacatctgaatgtaccttattatttcttagtcgatacataaattatctttaatgaaaaagaagacaagccagagctacttctccagggctggggtcccaggagggtgtggaagaggagatgcgggtgggacccacctcgggctcccacggaggacacgctgcttcggtgggatcgctcagcggggccgggctgcccggcactgccttctgtcccgtccatctgcaaaggcaaagagaaacagcagttaccgggagccagggatggggggctggaggtctcctcaagctctcggtgagtacggtaagggatcccaggctgggtccgcaaggttgagcggcgctgcctggaggggccaagagtgcagaccgggcgctggtgggaggggtgcgggttgctacggtcaagaaccgggggtcgacctggatgcccaggcagggcaaggcgcacgcccagccggggacggaggcccgggccagacgtcgctgtgctctcacctcgcagggtcgcagagcccgccacctgagaggcaaggctcctgcctggaatcctgccccgccgccaagcccgccaccgcccgcactcgggctcccgctaaggacgcagctgaccgggaagcgacgcggaagccacggcgggaggaagcgcggcgcccgaggccccgcccccttcgacccgggggagccaatgggagcccagggccgccccgcgcggcccgcgcatgcccggacgccagcctcgcgtgtctcatcacgcccgtggggtggccgcgtcacgtaccagccccgccaccaccagagtgacccagagcgagtttcccttcacaaaggccccgactgttggcctgtaagagggtttggcgaagattcgagaatcaggctaggggcgttggcctgcccacgctgggtcttcgggctagttccctgcctgtgaaatggacacttcctggcacgtgccagggatccatgcggcgctggcagcggcctgtaccgtggcgctctcggcagtggtcaggagaatgagtcctggcccagactcatcctggacaagtcccttctcctctgggcctcagttttcctcatctgtaaaatgaggtggttgaactgaatgacccccaaggactatccctactctctaaatgattattaatatatgtctatgtcggccgggcgcggtggctcacgcctgtaatcccagcactttgggaggccgaggcgggcggatcacgaggtcaggagatccagaccatcctggctaacacgatgaaaccccgtctctactaaaaatacaaaaaattagccgggcgaggtggcgggcgcctgtagtcccagctacgcgggaaggctgaggcaggagaatggtgtgaaccccagggggcggagcctgcagtgagccgagatcacaccactgcactctagcctgggcgacggcgagactccgtctgaaaaaaaaaaaaaatttatatatatatgtctaaatcagaaaaccaggacagacactctgtttttccagggagcagtgacatgagcccttactatcttacacaacagcctgggagaccttgaggttttcccaggctgggaggagacttggggccccaaagaggcaggtgtgaaaccacctaccctcagggccatgtcactgacatgtcctggtaatgcaacatgtgtgcatctgagatgtggaactcagggagaaaaataagtccatggggcaccttctggggccagaggaaccagaagttgtcccaagtgacagcagtgggcttggtgatcaggaacagagggcagtgggttcactttgccctggttccctgggattggaaagcagctctagctcctgacccagtccagccttctttggtatgtgaaccagctctgcctgccctcctatgatccacactgccccacagctgagcccatgacatcacatttgccttgccaatgtgacttaaggacttgaggaagctcagatgtgggctgcagggaagggtgtccagtgggggcaggcatctccttcctggttctcagctctgggaccctcagaccaggacacactgtatctccatggcctcttgacccagctggagtgaagcaggagcagaagagttcagtgttgttttgaatgcttactggatgcggggcttgtgctaggtcaggggatggagactgaggggagacgtggccctgccctcagaaagtgtctgttgtggtttaattggtgagttaaggaagaggggaaagagaaagaagcccaggagaacagcacatttaaaaccacagcactttgggaggccgaggcaggaggatcgcctgaggccaggagttcaagaccagcctggggaacatagtgagacgccatctgtaaaaaacccaaaaattagccaggtgtggtggcacacatctgtggtcctagccattcaggagcctgaggtgggaggatcgctggagcccaggagtgtgagctcacagtgagctctgatagcgccatcctgccactgtattccagcctggacaacagtgagactctgtctccaaaaaaataaataaaaccacagaagatgacagcattgccttaagaactatgaaatgctacaggcaggaaaagtctctgctcacttgctgtgtgtggggcactgggccaggccctttcccctgtttcctgtgtcattctcatgcgtcctgagagtggaaataagtattagcagttgccatttacgtgccagccactttttaaagtgctttaatccttagaactcactaagaggtgagtatcacatctctgttttatgtcaaagactgacacctgggagtgtctgcggtggtggtggggaggctagaacccgggtctagtcaaggaggggcactgggagagagtccgggaggctgatggtggggaaggaaaggcattccaggtagtgggaactgcacgagcatggttaggaccccaggaaagacccccgctgtgtgagagcatagcaggtgggtggcaccatgggggaggccttgaaccccaggatgacagatatggggcaggcgtgttagacagtaagaacattttggaggttgtgagctagagattcacaagatgacgccatgcttaggtgggcttcccttcagcaaggctgtagggaagtgggaatgagggtctttctcaaactggggtgaggcggtgagattggaaaagagaatgagacccattctgaagtgagggaggaggcggcctccagcctttagagctgagaggcttagacatcaattagcccgactgctgtcctactttggcaaacaataatagaccccaaggcccacagaagaggttgctcaacatcactgagagagataatgtaaccgcccattgggttcaccttaccctctgcctagacagagccaatttgtcaagacaggggaattgcaataaggagagtttaattcatgcagagctggctgtacgagagacaggagggttttttttttgtttgtttgtttgttttttttttttgagacggagtctcgctctgttgcccaggctggagtatagtggcatgatcttggctcactgcaacagctgcctctcgggttcaagcgattctcctgcctcagcatcccaagtagctgggactacaggcgcccgtcatcacacccggctaatttttgtatttttggtagagatggggtttcactatgttggtcaggctggtctcgaactcctgacctcaggtggtccttccgcctcggcctcccaaagtgctgggattacaggcgtgagccactgcgcctggcctgtatcagttatagtttttgcaaaggcagtttcaggaataagaagcagaaccaggactgcagcccaagccaccacgagaggccagtctttggggatggtcttttaggatgatctttgggggtggcccaaggagccccaggcagctccagaggcaggaggtaggaggtcctgtttcccgaatctgtccacccgggagaaagcagcaggggtgggtgggttctgccttggccacagtgagaggagaagggagagaaggactgggccttgggcgtcccccatgggagactaggagctgcggggagatctggaggggagggtgcaggtgtcactgggccttgatgtttcccagggccgtttggtgatgggaagagggaactggagccccaggctgccgctgatgctgctggctgacatttccgttcattcagtcactcaggatttattgagagcccaccctgtgccacccgctgtgcacagaacacccagagatccctgtccagacagacaagttcttcccatcgtatgttggcgtgataactgtgatggagaaagagaggaagagccagcagtgcctccggctggggaggcggggcagacctcacccaggtggtgacatttgagccccagctggaggggtgccagggcaagagtgcccaggaagagggaagagccagtccacaggcctggagacagaaggctgactgaagaagagtctggaggctcgggtggctgcagcagagaaagcaagggggtgggtggcaggacgtgaggtca

SEQ ID NO: 5190 - DNA, 6000 bp, Homo sapiens
ctgctgcctttattgaaatgcagtggacagaccatccccagagtggtgcctggccctgtggttctagagcccagttatgggccccagccagtcttgtcctgtgtgtgactgatagttaaggctccatgtcagccctcagaggtggaggtcccagtgtgggcctcttgtgatggtaggggatgtgggaggccacggggaaaaggaactggaggtgtggggcccagtggccttccctttgatcctctcctcccttcccttgaactagagctcctgaggccaggaggtttgggtctgtttttggtcagtgctgtgtccctggctagcaccacagcatctgcttcacagtggccactcagtaaacattgtttgttttgttttgctttgtttttttgagacagagtctcactctgtcgcccagcctggagtgcagtgtcacgatctcggctcaccgcaacctctgcctcccgggttccagcaattctcctgcctcagcctcccaagtaactagggctacaggtgtgcaccaccatgctggggtaatctttttgtatttttagtagagacagggtttcaccatgttggtcaggctggtctcaaactcctgacctcaagcaatccacctgccttggcctcccaaagtgctgggattacaggcgtgagccactgcacccggccgagaaaacatttgttgagtgaatcaatgaacttcctccacccactcactcatttgttcattcaactgcctactctgcagatcccagctggtacccagtaagggctgggccatgggcacaggggcctcactgcctgagaggagctccctgcttggtaggagggagacactgatccagtggtgtctgggaccttgaaagggacccagtgcagagcaggcgaaggcagggaaagtcactgggggtgcagaggacgagggaggcattctgaggaggcaactccaagtggaaggctcactcgggctggatagtgcaaagatggaggttcaggtctaggttgtgcaccagctgtgcactaagtcatcccccctgggcctcatgtcttcatctctaattggcaatgacaattctcaggctgaggcttgagtggaagatacttagtggagcacccaccactgtggctggcacagagtgggtgtttgcagggcgggtccttaatgctctaatatggggcaaggagcccagcgagtcttgaagtccgtgggacatgagtgcaagtcccatccttcacctgggacaagtctctcagcctccctatctgtgaaatggggtgatagcagcacccctttcctgcctttttttatatttcctttttttgagacagagtcttgctctgttgcccaggctggagtgcagtggcacgatcttggcttactgcaaactccacctctccggttcaagtgattctcctgcctcagcctcctgagtagctgggactacaggcgttcgcccccatagcccgctaatttttgtgtttttagtagagatggggttttgtcatgttggccaagttggtctggaattcctgaccttaggtgatccacccaccttggcctcctaaagtgctgggattacgggcgtgagccaccgtgcctggcctattgtggtattattacatactataaaactcacatttttttttttgagacagagtctcactttgtcgtccaggctggagtgcagtggcgcgatctcggctcactgcaagctccacctcccaggttcacgccgttctccagcctcagcctcccgattagctgggactacaggcgcctgccaccacgccaggctaatttgtttagtagagatggggtttcactgtcttagccaggatggtcttgatctcctaacctcatgatccacccgcctcggcctcccaaagaaaattcacttttttgaagtgtacaattcagtgggtttttgtatgtttgcatagttgtgtgaccatcactactatctagtgttagaatattttcattatcccaaagaaaacccagaccccattagcagacactccccattccccaccttcctctggcaaccattaatctactttctgtttttctgggtttgcctattctggttatttcatataaatggaatacgtgggccaggcacggtggctcacgcctgtaatccaagcactttgggaggccagggtgggtggatcacctgaggtcgggagttcgagaccagcctgaccaatatggtgaaaccccatctcggctaaaaatacaaaattagccaggtgtggtggcaggcacctgtaatcccagccattccggagcctgaggtaggagaattgcttgaacccaggaggcagagattgtggtgagctgagatcatgccattgcactccagcctgggcaacaagagcgaaactccatctaaaaaaaataaaaaataaatggaatatgtggctttttgtgtctggcttctttcacttcacatagtagtttcaagaattcacctatattggccgggcgcggtggctcacgcctgtaatcccagcactttgggaggccaaggtaggcggatcacaaggtcaggagattgagaccatcctggctaacacggtgaaaccccatctctactaaaaatacaaaaaattagccgggcctggtggcgggtgcctgtagtcccagctactcaggaggctgaggcaggagaatggcgtgaacccaggaagcggagctggcagtgagccgagatggcgccactgcactccagcctgggcgacagagcaagactccgtctcaattaaaaaaaaaaaaaaaaaaaagaattcacctatattgtggcatgcatcagtacttcattagtttttatggctgaataatgttcgactgtgtggatgtactgcatcttgttattcatcagttgacggcttttgtgttgtttctgcatttggctcttatatatagtgcagctataaacgctgcgtacagatttgtgtgtgtgtacatatcttttcaattatcctaggtatgtatacctaggagtgaaattgtcaggtcatgtgataacattttgaggaactgccagaccattgtccaccaacagtgcatgagggctccagtttctccgtatctttgccaacacttgttactgtctttctcgttttaaagagctattattattattactatttttgagatggagtctcgctctgtcgcccaggctggagtgcaatggcacaatctcggctcattgcaacaactgcctcccgggtttaagagattattctgcctcagactcccgagtagctgggattagaggcacgtgccactacaccagctaatttctttgtgtttttgtaaagacagggtttcaccatgttggccaggctggtcttgaactcctgaccttgtgatctgcccaccttggcctcccaaagtgttggggttacaggcgtgagccaccgcgtcgggcctattattattattattattttaagatggagtctccctctgtcacccatggagtgcagcagtgtgatctgggctctctgcaacctccacctcccgagttcaggtgattctcctgcctcaggctcctgagtagctgcgactacaggcacgcgccaccacgcctggctaatttttatatttttagtagagacggggtttcaccatgttgtccagactggtctcgaactcctgacctcaggtgatccacctgcctcggcctctcaaagtgctgggattacaggcttgagccaccgcgtccggcccctaaagagctattatttaaccttctgccccagcagctgggagggatggtggtggcagagtggcgaggagcgggcactgcgcagttcacctgagccccaggcgctcgccgcgggacccaccagcacgtcccctcctcggcagactccctccccggggtcacgtggagggcgactgcggggataagcagggatggcaaggggaaaggaagggcgggccccaggcgggggatccccggacacgcagtgctttcccgcctggccccgcccaaagacgtgggcaaacagaggccacgcccttcctgggagccagccccgcccatactccgccccaaggacacgcccccacttcgggcggaggcggaaaccgggcgggggacgctggtgcgaggaggtcgaggaggcgccttggcacccgactctggcatcccgcacgtccgacatcagccctgccctccttctcaggggcttccattcattttgtgccaaaagggaactgccgccctcgcccccaaacttgtagctttgtggatggagggtgtgggggaggccgtgtgtagtgaaaggaccacccggctgaagacggtcctgggggtggagggcaggagggagcgagaaggacagttctgctcctgggagcctctcgttcctgggcgagggtctggggaccctggatgaagttttaggatcttttacaatgacggtctggggcagagaataaaattttgcagggagcagattgagggtctggaggactgggttaggtgggctctaggtacccaggacgatctcgggaggcgcacaatgagaatctgggggctccaggattacggtgtgggtgcacaggatgaaattctgggggcgcagattaggtaggacctaggtgagcaggatgacatttttggtgagcgtctgggggcccccgggtgagtctgggggcctggcatcaaggtcggggccccaggatcgagcactgggggaccctggtccggcgccgggaggcggctcctggcggcgccgcgggggaccgggtaggggcctgtggctggccgggggcggagaagcggggggtcggggtccctccccctggcgctggctcaggaatccgccgaagggcgggcggaggcgccggggtgggccgcgccgcggcaggcgggcgggcggggggcgcttcctggggccgcgcgtccagggagctgtgccgtccgcccgtccgtctgcccgcaggcattgcccgagccagccgagccgccagagccgcgggccgcgggggtgtcgcgggcccaagtgagtggctgtgaccgtccgtgggggagggcgtgggccggagtctcggccgagtccgcggcagcgtagcgcccacagaggcccgcgctcctcggccttcgccgcaggggcgcggggcgggggcggggtggccggggcgggtgggcctgggacccgggcctgggacctgggcctgtgaggagtcggcccccagccctgggaggccccgaggcccaagcacggtcctgagcgggcagtggcgggggctgggctcgggctcccggtacagggagttgaggtgccgcgggcagaggcccctgacccgtgtccaccatctcgcagccccaggatgctcccctgcgcctcctgcctacccgggtctctactgctctgggcgctgctactgttgctcttgggatcagcttctcctcaggattctgaagagcccgacagctacacggtggggacagtgagggccgctggcctgggacaggaagggtagggaggaagagaccgggacccagggtgactgctgccggggaagtcttcctcccctggctggtggagagctgggggccattgtttggagcaggccggagggtggccaggctcaggccctagtcttggcctggccagttggaggagatcttagggtgaccactggccacttctggttcccttccaggaatgcacagatggctatgagtgggacccagacagccagcactgccggggtgtgtgtgcctgggggaccaaacacccccaggaacccggaaagggattgatagctgctttccaagggacagccccacctccaagaactgccgtgggagcccagcagcccgttctatgcccagctctgctacacagaggccagctctggctctctggaggccagttgagctaggggtggcctcatcctctcccagaaacccaggaaaccttgtccctacccctcagaggagctggatcctgtacgccttctctgaacca

SEQ ID NO: 5191 - DNA, 6000 bp, Homo sapiens
ctgagtccaaacgtctgcggctctggggtattcagccctcacctttctgactcctctcctgatcttctacaggagactgacaaactggaagatgagaaatctgggctgcagcgagagattgaggagctgcagaagcagaaggagcgcctagagctggtgctggaagcccaccgacccatctgcaaaatcccggaaggagccaaggagggggacacaggcagtaccagtggcaccagcagcccaccagccccctgccgccctgtaccttgtatctccctttccccagggcctgtgcttgaacctgaggcactgcacacccccacactcatgaccacaccctccctaactcctttcacccccagcctggtcttcacctaccccagcactcctgagccttgtgcctcagctcatcgcaagagtagcagcagcagcggagacccatcctctgacccccttggctctccaaccctcctcgctttgtgaggcgcctgagccctactccctgcagatgccaccctagccaatgtctcctccccttcccccaccggtccagctggcctggacagtatcccacatccaactccagcaacttcttctccatccctctaatgagactgaccatattgtgcttcacagtagagccagcttggggccaccaaagctgcccactgtttctcttgagctggcctctctagcacaatttgcactaaatcagagacaaaatatttcccatttgtgccagaggaatcctggcagcccagagactttgtagatccttagaggtcctctggagccctaaccccttccagatcactgccacactctccatcaccctcttcctgtgatccacccaaccctatctcctgacagaaggtgccactttacccacctagaacactaactcaccagccccactgccagcagcagcaggtgattggaccaggccattctgccgccccctcctgaaccgcacagctcaggaggcgcccttggcttctgtgatgagctgatctgcggatctcagctttgagaagccttcagctccagggaatccaagcctccacagcgagggcagctgctatttattttcctaaagagagtatttttatacaaacctaccaaaatggaataaaaggcttgaagctgtggcctgagtgcctcactggacccagaggccaatgggagagtatttggagccctaggtcccagccttagctctacagactcactgcatgaccttggacaaattctttgatatttttggactttgtcttatctgacaagtggggctacatccgctcggcctcatctccgggactgaggggagacagtcctctggggtaaaagcgaagaggcttaccgcccctctccccgtgggggcccacagtgctgctgcgtgtgccacggaggggcgctgttatgcccccttccagcctcagaggaggcggccgagtggttctaggcccccagcacctgcttcctgccccattgtcttggacaggaaggagccgggaagggagctggagccacttcaggggctggattaaggccggtcccggcgcccgatgggggaagtctggtttaccactgccccgcatcccaccccaggctcgaagtaatgggggaatcattagttctgcagtccttctggatgggaattgtaccctgtatcagcaccccaccctcgccccaaccccggcgagtaccaaacagacgctgcccaggccgtgggctccgcttccgtccgggtttattacccccaatccaacccccagcaagtccctccgctccagccttcagtccccctgctgccctgccagcaagagcgaggggcccttcttggtgtcaggatttcttagtccatgccagcggcccctcctgcgcagccaggacggcgtccaggtcccgaggtccacagcggtcccggggctcggggagcaatccgggcgggcgtcggcgtggaggaagcagtgccttcaatcatcgggggaacaggccaggggcaactgatccggactgcccacgctgccagtgctggagcttccatcgcctaggtcgcggggcccgcacgggggcaaggcaagctcgggtgctggcccggctcctgatcccccggcgccgctggggccgccgcgggggccccattcttcgcccagcgccaggcagagctccttaagcgctaggttctcccgcagcagctcctcctggcggccctccagctcggccagcttctgccaacagccgcccaggtcctcgcgcacggcccgggatgcttgggtcccgaagagctgccactggcgtgcggcgcgccgcccgcgctggcgctccgagtccaggaagcagcagaggtcgcgcagctcacggttctctgcctgcagacgccggttgagctgcttgagctcgcggatctcgcccaggtggccctgcagctgccgattcacctcctgcatgaggcggccgcgctgcaccagtgccgccaggcgcgccgcctcctcccgccgcaggcgccgcactagctcttccttgcctagcgccgccatctcctcgtccgtcagctcctccaggccgcctgcctcggcctccatggctggtcaggcctctggagcatcgcccgcccgccgccgcggcccaggagccccacgtcgggcccggcgccactcaggctcgggctccggctccgcacgcggcaggcagtggccgaggcagcgtaggctgcagcagctacccgggctgggcacgcggcggggcgcgcgccggggcggggccgcatgtcgttatggaaggacagccaatccggtgaaacgtccccggaaaggggcggggcctgagctcaggggccgcccccctcgttccccacccactccgggtgttactgatcctcgatgtcaaggaacccgcgcgtcatcgccctccacatcggtctcaacccgaaactaggagcttcgaacctccaagtaccggatcgccccaagcttgagcctaggcctctcggctcttctgagaaacaagattcaggcgtccgcccctgactcctgcccatcccccacagaagtcagatggaccgctctccagtccctctttacctttgatcaaattcggaagtctcggcccactaaggatcgctcctggttcctcggaaccctgagtccaaacgtcctagctcaccaatagactaccctccctcccagggagcgtttcctgcctggggggaggaacatacaggattcgtttgttcaataaacgttttttatgtgcaaggcccatgcagaaataaatttaaccaaaataccgattccatcctcaaggaggtcgcagtctgtccgggaagtcaagctgtgttaagcaagaaataaatccgggaggagtatggtctgagggtccttaagagggttcccaaaagagatgctatccaagaggctctggtagatccataggactttgccaagtaaagagctatttcagggagagagaataacatagtgaaagacactggtgcccgaaagagcctagctgctttaggaacaatgaggatagcttggtttttgaaaagcagatgtgtcgagaaaatgctaagagagagagagcgaggcttcaaaggtaggtaaaagccagattcttaagaacttccagtaccaggttggagcatttccaaaggccactaaggatgttaagcaagagagtaacatttgtaaggatgttaagcaagggagtaacattttaaaatatgcctttaactggccaagatggtgaaaccccgtttctactaaaaatacaaaaattagccgggcgtggtgggaggagcctgtaatctcagctactcgggaggctgaggcagagaactgcttgaacccgggaggcggaggttgcagtgagccgagatcgcgccactgcactccagcctgggcgacagagcgagacgctgtctcgaaaaaaaaaatgtatttaaaaagattgggctgatctgtgtgggccggaccctgcggggaggggacataaacagggagattagtaacggtgtcaaagagcaagagcaaggagagctaagcagaaagacggctggggcagcatcagtgggggtggagaggacaaacagatactagaaatattcgggaggcaaatcagccgaactgaatgtggggagagaggagtctggaagaacgcccaggtttctcgtatgagaactggtggatgttagggctgtcactgagatagggacgcaggaaagaaacaaatggggagaggcagaggtctgtctagaatatgttgagcttttgaggggcttacgggaagagtgtggatagacttggccgataggcggcccctccggatgtggacttccaggcagagctcggaggggcagaattagagacgtcagtagctcgtggggctgggggtgggattaaaaccaaggtgggagcaggtgccccaaacccaggagaggtgctcatgcgcaggatggacaaaccagtctccagcaagagcccgaggaagtcgggtcataccccatttttgcggagatttaggatagagccctgtgaaacccctaagtttaggatacaggtcaaacttaggaggtcccgaagagggcagagaaggtgggagaaaagccaggaggaagtgaggggagaagttacggggaccgaggagacgaagaggaggcactcccttcgtgctcctgcagacggccggggagggagacaggacgcaggagcccgggactccccctcccggcgggaggaagcggtgctcctccgcgcaggcctccccctctcttccctcgccgctcccgccccgtcccctccccgactggctgtgtcccggaagtggtcataagctgggtcccgatgccgcgagcggaatctcggcgctcccggaagtggcctgaaggcggcgcgccagtcccgagcagtgctcgctcctgctcggggcgctgcggccccgggcgtcgccatgaccagtgagctggacatcttcgtggggaacacgacccttatcgacgaggacgtgtatcgcctctggctcgatggttactcgggtccgtgaggggcgtgtggggaagccagtcggcggagcggttgtgttgaatgggagagggggcggggctaagacttgggcatcctttagggaagtgggcgagcgcctgggaataagaggtgttataggggtctgggatggaaacccttaagggcctctggcgtcggcggggcggggcctgatgctagcgtccgctttccagtgaccgacgcggtggccctgcgggtgcgctcgggaatcctggagcagactggcgccacggcagcggtgctgcagagcgacaccatggaccattaccgcaccttccacatgctcgagcggctgctgcatgcgccgcccaagctactgcaccagctcatcttccagattccgccctcccggcaggcactactcatcgagaggtgctcaccctctgggatggtggagacatcaaccagtctgactgtatacccattttgccggctgaaacaggcccagggagggatgggatttacccagccatcagaaagttgagagtggaaggggtcagacctaggccctgctaggccccgccagactccctttcctgtcttttatggagggtcaatggtgttctctgactccacaaggtactatgcctttgatgaggcctttgttcgggaggtgctgggcaagaagctgtccaaaggcaccaagaaagacctggatgacatcagcaccaaaacaggcatcaccctcaagagctgccggagacaggtatgcactgcatccacacggacacagcatcccatctacacttcactccctccctttggccactggcccagttccagcctctgattgtggcagcagcttcatacctagtcttctcctcccttcccctttcccctcctttttttttttttttttcgagatggagtcttgctctgtggcccaagctggagtgcagtggcgcgacctcagctcactgcaacctccgcctcctgg

SEQ ID NO: 5192 - DNA, 6000 bp, Homo sapiens
tgagacagtctcgctctattgcccaggctggagtgcaggggcttgatcttggctcactgcaccgtccacctccagggttcaagtgattctcctgcctcagcctcccaagtagctgggattacagacatgtgctaccacgcccagctaatttttgtatttttagtagagagagtttcgccatgttggccaggctagtttcaaactcctgaccgcaggcgatccacctgccttggcctctcaaagtgctgggattacagacatgagccaccacgccctgcctcttttttttttttcctattttttggtttaattttattttattgtaagttttcgggtacatgtgcagtatgcgcaggtttgttacataggtaaatgtgtgctatggtggtttgctgcacctatcaacccactgcctaagtattaagcctggcatgcattagctattttttctgacactctcccagcccctcccccatcacctccccccttttttttttaaagaagcaaagtctcattctgtcacccaggatggagtacatggagtacagtggcgcaaccagagctcactgcagcctccaaccccagggctccagcaatccttgagcctctttatagggactttataggcgcgtgccaccgtgcccagctaatttttaaaattttttgtagtaacagagtctcactatgttgcccaggctggtctcgaactcctggcttcaagcgatcgtcccatctaagcatcccgaagtggtgggattacaggcatgcgccactgcacccggccacaagctgcttttggagaagcagacagtggaaaaggaggcaagtgtcagcatcaaagagagaactgaagagctcacaattctgtcatggcagtacctccctgcccaacaactgcaagtgagaggaagggctaccctgaacatatggaatctttttttttccccactcaggtcaggcgagtaatgtgcaagggtgtcacatctcacacatgcacgtgaacacccaatcatcatgctcatgaactacaaaaggatcagcagatggaatcttaaaaaacagaagaatctccctacctgtgccgacatgggaggtggagcggctttgtccccatcttcccctctcaaaaccggccgattcagcacgatgccagtctgcaaaagagaaaggactctaggtcagtccaaaactagctgtttcactaaacgacgttcgctcccaattcattcaacaaaacgtacccagtgcctgtctgccagcgctctggctgggcactgaagaggaccaagatggatacaagaaattacaactaagctggcaaaggcaagaacaagctaaaaagggcaagcctccgccttgctgtgccgagataaagaaagaatgaagaccgagccgtgatggggtatataaggtctcctggagaagctcggcctatcctgacgtcccgccgccaacacctacctggcgggtgtagctctgcagccgctccaccagctcctcgcgattacctgcagggcaaagtacacgatcaatggggcaggccagcccggccaggtcaggccccagcggcctgcctccgcccctcgcacccgagtctcccgggtaaccaggctccgcttctccgcaggcccgtaaaggcccctcgacttcctgtgttcctcaccctggatcggagctccgatctctgccaacttggcctgaagctcctgggcagcccaggcgccatagtggcctggaggtggcggcggcggcagctgcaattctgctttgggaggctcgggatgctccgtcgccatcttagccgcaggaaggcgcgcgaccaacccggaagctggggccagcctcagggcccacttgccggaacttccggtggcgccgtatgccacgtcctctctggttgggaggcgacgcgcactcaggcacacccgctgccgtgcgctgggcgacgggattcgccgcagacgcacctttctctagtggcccctcggcggtctggtcgcgaggcctcctgggagttgtagtgcgcaggtctcggtctctgcgggccctgcgcgccgctacggccccgaaggccggcggcgggccggagggcggggctgcgaggagggctggcacttccccgagggagtgttttctgcgcctcacctgcgggagcgaaggctctcaagctttccggcccggccctccggtcagatcctcgaacgcttacgctcccagggagtcccgagagactcatttccccggcggccccgcgttgcgggcgccaagcgggaggctggagccgatgcctgggataaaacagtgtctgattgtctgcccgcccacccccggcccaggcccggatgaatgggctgaaaggggatccaagccgggagagcagcaggcctgcccgggctgagctccagctgccgacctgggggaagggcgactctaaagcccccttttccaccttccaggccggctcaaatgtcgtcttctccactaagcctcctcccgctttcctttcctttcttagagctcccataatacgttcgaatctccaccgtttgttaagtctttcttgccctttcttcctacctctatcccaaaaatgtgagcagggacttgatcattttcagtctcgcatcgcctggcgttcaagaggcgcccaataaatgattactggaaaaaaaggaacaatgtttctggtgaaagcatttgtgtcttttttagtctcaaaaataaactcaggcccttttccctcagccgcacctgcactgggggccccaccttgcctcccactccccaccccaactccccttggcctttggagacagaggcagagactggcagggattcttgcctgcctagcatccacctctccctgtcccacaccatcaattcagtttctctccccacctctgccactagctctgccctctcaccaacagctagcctgtgtgtgttttttatgtgtgttgagaaagggagtggggagactcaagtgaaatggtctcattttccccctacacatccccttcagatcttttctccagctccattttgccaactgcccccagtggagaagaagctgggaacagggaaaaaaaaagaatggggcaccaggtcgggggaaggtgaggtttgggagagacagggaaaaggactgggttgagaaaggttggctcacatcctagcactgggtgggaagtcctcttcctcctacccaaaccttgacctttcccctttccatcaatatcactatgggaggctcctgcagccacactcccagaggagaagccaaacccggaaaggacagtaacgaagacagaaaaacagcgcccttccctccagcttgtcagcccactcaggcagaacctttctagcccaaaggaaggctcttctgctccctgtaactggagagcccagggcaggtcatctgaggctgagggccccaaggcatgtgtaggtgctagggaagggggcggggtctctgaggcaggataaactaaaggctgatggagtctcattttatttatttattttttatttatttatttatttttttttttttttgagacagagtctcagttgcccaggctggagtgcagtggctctatctgcgctcactgcaagctccgcctcctgggttcacgccattctcctgcctcagcctcccgagtagctgcgactacaggcgcccgccaccacgcccagctaatttatttgtattttttttagtagagacggggtttcaccgcgttagccaggatggtctcgatctcctgacctcgtgatccgcccgcctcagcctcccaaagtgctgggattacaggcgtgagccactgcacccggcctggagtctcattttataacagccctgggaaggaggcaaggtctcaagatcctcctcccccacgatattgtacacagcggaagattgatgggcagagaaggtgacatgcccaagaggccaaactggggccaccagcagtccttctgactctgagagtccctatttcctcctcctcaaccataacaaggaccctcacactatttcctatgtgggcctagaagggcgtatccagccccttccagtcccacctttgggtggctacccagctccaggatccttgctttaccaggcccagagcaaaatagaaagcaggtgtgcaggccagccacagaactcagtgtagggctcttgatgtctggcatggctttgggaggtgctgctgcccagctcccaggtgatgggagctgaggactaagaagttcacatggagccttcgtgtgtattatctctgctacctcagaacagcttcccattttacagctggaagcaatagggcttagggagttgcctcttgactctgggatttaagagcaaaccaggattgaacttgggttctttgatgcctggtggcaggtgcctaggcaggggtcccagcctcactatagctctggtcaggagtgagtgggtctggagtcctagtgaggaaaaatgggtgagcagccagaagctacatcagagggtatgggggacacgctggaagggaagggggcatgtgggcagagatgggaccagacaaggctggagcactgcttctctactggaggaggacagaggatgtgagtacctgcacgtgtaccagcatctggctcacccagaagcccacgtatgaccggcggtgccccagaatacccagcaatgcaggagtatccagacaccttcccggcctcagtttccctgcctgagtgagagaagggagctggccacattagtgtccaactctgcaaggttgccagagtaagacaactgcatctgaagatgccacccagagactgttcacggcagccagcgggcaagccagggaaccaccccccctcccccgtcccccttcctttcccctctctcccctctcccctacttgctcgtggcctggccccgcccctcgccttcctccggtgtgcgatggggggcggggggcggggggcgggcagagccgggaggagcgagcctagcggacgctgccacctgatcccatccaggcgctgagaggcaagccaccggcactcggcgcgcagggccccgggcaccctcggaccccgtgcggatttcgagacaagggtccagagatagcggcggccgcccccaacccgggccagaggcagagcccaggcgtgcggtgtgagtactgcagtggccggcatggggttggaggggtgggagtggaccagaccgggatgggggccgagaggcgggcgggagagtgtcttgggggcctagtggttggaaagcatgaggaggggggcgctctacccctggaaagtgggagaagatagggtgagcgggccaatctggcctatcccctatggtgatcagatcccactggcaggatccctgggggatgctgggatgaaattgagggagtgggaggtatggtgcgggtgggcagtaatggagacaggaggatggagggaattccaaggcagggatgatgcgggggtggatgagagagagaggaggctggggggccaggggcagacctggtgcaggctggggggtgggggaggaggaaaaagagggaggtggaaagatttgctctcccaggccagtactttgcagaccccctcagcccttcgcccctcctctggagcaccctgggtcagcgtccctcaacactgggctgtcccatccctcaagtcaggacaggatggagtctccgggccatccagcagtcaggtccaagtggtccagtccagggcaccccttcctctaagtgcatcggtttcagctctagagctcagaggagacagaggagaaagggctcctttaggagggtgggcaccccggcccattttcaaagctttggtcggctctactatttctttggttccctggagaaaagctagcaatttgcaaaactgggcagcagcgtgaggtagattgttctgactaaaattagcactgacattctgatgagcctgggcgtcctgacctgcctgggatagctggga

SEQ ID NO: 5193 - DNA, 6000 bp, Homo sapiens
ctctgtcacaaacaaaacaaaacaaaacaaaacaaaaagaattaacaacaatcctataacagtgtagtgtgcaaagtaaaaagaaatttacaacaatccttctcaaactcttccaaaaaatagaaaacactttacaactcattctatgtgacctgaggccaaactaatatacagaccatcccaagaaaactacagaccgtatctcatatgaatatagatgcaaaaatcctccacaaaatactagcaaacctaacccagcaacatattaacagaattatacaccatgaccaagtaggaattattccagaaatgcaagattgtttaacatacaaaaatcaatcagtgtggccgggcacggtggctcaccctgtaatcccagcactttgggaggctgaagcaggtggatcacttgaggtcaggagtttgagaccagcctagacaacatggtgaaatccgtctctactaaaaatacaaaaaatattagctggctgtggtggtgcacacctgtaatcccagctagtcaggaagctgaggcaggagaatcacttgaacctgggaggtagaggttgccatgagccaagatcgcgccactcactccaacctgggtgacagagcgagactccatctcaaaaaaaaaaaaaaaaaagaaaggctgggtgtggtggctcatgcctgtaatatcagcactttgggagaccgaggcgggcagatcacttgaggtcaggatttcaagaccagcctggcgaacatggtgaaacggcatctctactaaaaaatacaaaaattagccaggcatgatggcgcatgcctgtaatcccagctactccggaggctgaggcatgagaataacttgaacccaggacgcagaggttgccgtgagccaagatcgctccactgcactccagcctgggaaacagagcaagaacgtctcaaaaaaagaaaaagaaaatcaatcaatgtaatacaccacattaatagaatgaagaggaaacaccaagtgatcacctcaatttatgaacaaaaagcaagtgacaaaatccaacacgctttcaagataaaaagcatgtgacaaagtccaacactcgttcaagataaaaagcatgtgacaaagtccaacactcgttcaagataaaaatgctgaataaacaaggaataggtggaaacttccttcacctgataaagggcatttatgaaaaatccacaaataacatcatacttaatggcgaaagacctaaagccttcccccaaagatcaggaacaagagaaggatacgtggtttcaccgtttcatctcctcaacattgtactagaagttctagctagagcaatttggcaagaaatgaacttctgcactggggtgggaaaaaaaatggcaagaaaaagaaacaaaagttaaccaaactgaaaaagaggtaaaactattcatagtcacagatgacataatatatacatatatagaaaatcctaaggaatacatgcatacacacagagacacacacacacacacacacagacacgtacacacatacacaaacttttagagctaataaagtcagcaaagttgcagaattcaagattaacacacaatagcctggctcagtggctcgtgcccgtaatccaagcactttgggaggctgaggtgggtggatcactcgaggtcaagagttcaagaccagcttggccaacatggtgaaaccctgtctctactaaaaatataaaaattaactgggtgtggtggcgcacgcctgtagtcccagctactagagaggctgaggcaggagaatcacttgaacctaagaggcggaggttgcaatgaggtgagatcactccactgcactccagcctgggagacagagtgagactctgcctcaaaaaaaaaaaaaaaaagttaacacacaaaattctggttgggcacagtggctcatgcctgtaatcctaccactttgtgacgctgaggcaggtggatcacctgaggtcaggagtttgaaaccagcctagccaacatggcaaaaccccgtctctactaaaaatacaaaaattagccgggtgtggtggcatgcacctgtagtcccagctactcgggaggttgaagctggagaattgcttgaacccggggggcagacgttgcagtcagccaagatcgcgccacttcactcgagcctgggtgaaagggcgaaactccatctcaaaacaacaacaacaacaacaaaaattcagttatatttctatacactaacaatgaacaacgtgaaaaggaaattaagaaaacaactccatttacaataggatacaaaagaataaaatacctaggaaaaaattaacccaggaagtaaaaaacttgtccactgaaaatacaaacactggctgagcttggtagctcactcctgtaatcccagcactttgggaggccgaggtgggcagatcacctgaggtcgggagttcgagaccagcctgactaacatggagaaaccctagtctactaaaaatacaaaattagctgggcatggtggtacatgcctgtaatcccagctactccggaggctgaggcaggagaatcacttgaacccaggaggcagaggttgcagtgagccgagattgagccattgcactccagcctgggcaacaagagcgaaactctgtctcaaaataataataataataatagggctgggcgcagtggctcacacctgtaatcccaacactttgggaggccaaggtgagtggatcacctgaagttaggagttcgagaccagcctggctaacatgatgaaaccccatctctactaaaaaataatacaaaaaattagccaggcatggtggtgcactcctgtaatcccagctactcaggaggctgaggcaggagaatcacttgaacctaggaggcaaggttgcagtgagccaagatcgcgtcattgcactccagcctgagcaagaagaacaaaattctgtctcaaataataataataataataaataaaaaataaaacactgaggaggtcaaagaaaatccacatggcagcatgtctgacttctgagcctccagtctataaggcctgtgctgaaaggatctgcacttacttttctcctctttacagccaaggtcaccagtggaaactctcaaggacaatacctgtgtctcctccaaggcccatccctcgtgcctaacacagttcctggcagagaccaggtactcagtgtgtgtttttgctctgggctgcaaaataaaggttttctgatcactcttcaactcaacaaccttggcaccctactgcctgtggaatagtgggacaaacactttatccttatttgaagccctgcccagtctgtcctgacatcccaagattcagagcactctgccctataggggcctccctggctcagcctaaaaagttgagtaatatacggtaattgatttagcagtggcagtgtctgcccttcccacggcctctcctgttctaaagagtccacagatgaattaatccacaaatacttattaagagtatagtggcctgatattggaatgttcaaagccttctgcttaagagtttgtgtgcggccgggcgcggtggctcacacctgtaatcccagcactttgggaggccgaggtgggcggatcaggaggtcaggagatccgagaccatcctggctaacacggtgaaactccgtctctgctaaaaatacaaaaaattagccgggcgtgctgcatgcgctagtagtcccagctactcggggctgaggcaggagaatcgcttgaacctggaaggcagaggttgcagtgagccgagatcgcgccactgcgctccagcctgggcgacagagcgagaatccgcctcaaaaaaaaaaaaaaaaaaaaaaaaagagattgtgtgtgttggggagcagggcatgtggacacaaggtctccgccctaggagaagtgctggagagtaggacaagtaccactacttcggacggggagggcgatgcctccaatggggggcttccctgattcctgcagatcatacgttggcccccaacttcacactggccagaatcccggttctagtcttttccgtgccaccaacccctgggccctctttctagaaggaaagaaaacacctttggcctctgcccagagctacagacacctgaagtaggagcaggcaggagatgcgtggtggataaagaccagagagacttgggatcgaattccactctcacccccagttcagttttcttcagcttgctgctccacaggcaggatgtgaaaatttagatgcctcacccctcgcacctccagcttgctgctccaaataggcaggatgtgaaaatgtagatgcttcccccccaacctctataaaacagggccgacgaggatgggattcgaacccacgcgtgcaaagcacaatggattagcagtccatcgccttaaccactcggccacctcgtcctacgtgacaggtttgtccacattcacttatctctcatctactccgcaccttccaagcactaccacgtaagtcgcaacgcagacctcttcggacacagggaaagaagaagccgcggaaggaagggagcgttttgatttcctttctgctgagcccgcgccatcctttaccacgctgcagccgagctctgccgcggtttccctccgagtccggccgagcgcgccgcgcgttcagggcgcgcccggtccagggtgcgcgcgccggcggggagggagaggagtgcgtcccgggaagccggcggggcccgggcgggcgggcgtctgcacggcgcgcggccgagcggcggggccgtggctcctcctccctcgtagggggcgagccggcgcgccgggggctgggggcggtggcgggcggcgggcggcgggcggcgggcggcgggcggggcggcgctcggggctcggctggcctcggctcgcctcggctgcgctcggcaggctgcggtaaatccgggcttgcggccgctggcgtagtctgtggccgggtggtcgttgctgcgcgccccgagccccgagagccatgcagatgtcctacgccatccggtgcgccttctaccagctgctgctggccgcgctcatgctggtggcgatgctgcagctgctctacctgtcgctgctgtccggactgcacgggcaggaggagcaagaccaatattttgagttctttcccccgtccccacggtccgtggaccaggtcaaggcgcagctccgcaccgcgctggcctctggaggcgtcctggacgctagcggcgattaccgcgtctacaggggcctgctgaagaccaccatggaccccaacgatgtgatcctggccacgcacgccagcgtggacaacctgctgcacctgtcgggtctgctggagcgctgggagggcccgctgtccgtgtcggtgttcgcggccaccaaggaggaggcgcagctggccacggtgctggcctacgcgctgagcagccactgccccgacatgcgcgccagggtcgccatgcacctcgtgtgcccctcgcgttacgaggcagccgtgcccgacccccgggagccgggggagtttgccctgctgcggtcctgccaggaggtctttgacaagctagccagggtggcccagcccgggattaattatgcgctgggcaccaatgtctcctaccccaataacctgctgaggaatctggctcgtgagggggccaactatgccctggtgatcgatgtggacatggtgcccagcgaggggctgtggagaggcctgcgggaaatgctggatcagagcaaccagtggggaggcaccgcgctggtggtgcctgccttcgaaatccgaagagcccgccgcatgcccatgaacaaaaacgagctggtgcagctctaccaggttggcgaggtgcggcccttctattatgggttgtgcaccccctgccaggcacccaccaactattcccgctgggtcaacctgccggaagagagcttgctgcggcccgcctacgtggtaccttggcaggacccctgggagccattctacgtggcaggagg

SEQ ID NO: 5194 - DNA, 6000 bp, Homo sapiens
gcagagaatcacttgaacccgggaggcagaggttgcagtgagccgagattgagccattgcactccagcctgggcgacagagtgagactccgtctcaaaaaaatacaaaaattaacaaataaataaataaataaaacaagatatcgctgcacacttattagactggctaaactctaaaacattaacaccaagtgcccacaaaaatgtggagcatcaagaattgtttcattgttgctgggaacaaaaaatggtacaggcactttggaagatagtttggcagtttcttaccaaactaaacagtcttaccatatgacctagcaatggtgctcctcggcatttaacccaaataaattgaaaacttatgtccacacaaaaacctccacacaattgtgtatagcatctttatttgtgatcaccaaaacatggaagccaccaagacgtcttgaaataggtaaatggataaacaaaccatggcaattcatacaatggagtattatttagcaataaaaataaatgtgttgcctgggcgcggtggcttatgcctgtaatcccagcactttgggaggtcgagacaggcagatcacttgaggccaggagttcgagaccagcctggtcaacatggggaaaccctgtctttgctaaaaatacaaaaattagctgggcatggtggcaggcacctgtaatcccagctacttggtaggctgaggcagaagaatcacttgaacctgggaggcagaggttgcagtgagctgagatcatgccactggactccagtctaggcgacaagagtgaaactccatctcaaaaatttaaaaaattaaaaaaaaaagaaatgaattatcatgccaagaaaagacatgcaggatccttaagcacacatataaatgaaagaagccaggttgggcccagtagcttatgcctgtaatctcagcactttgggaggctgaggccggtggatcacttgaggtcaggagttcgagaccagcctggccaacatggtgaaaccctgtctctactaaaaatacaaaaattagccaggtgtggtggctcgcacctgtaatcccagctactcgggaggctgaggcaggagaatcgcttgaacctgggaggtggaggttgcagtgagccgagatcacgccattgcactccagcctgggcaacaaaagcaaaactccatctcaaataataataataataataatcatcatcatcatcatcatcatcatcatcatcatcatcaatgttgaatgaaattcagtacacaggtttaacattagattaagtacaacctaaaaataaaatctattatttattttttaaaaccatgttgataatttttctgagcctagactctaaatcctttttacatttagacaaaatgtattatttgcaaggcttgaatatacacagcattcttcagtaacacagctactgtctgtgttgacggacagctgccctttgacttctttggaacttgaccaggacttggtcacatttaagaaaatcacatcctagcataaagaaaagacaaatatttaaggtgatggacatctcagttgtcctagtttgatctttacacattatatgaatagattaaattatcacatacaccctgaaaatatgtacatctattatgtatcaaaaaaataaataaatagggccaggagcggtggctcacgcctgtaatcccagcactttgggaggccgaggcaggtggatcacgaggtcagcagttcgagatcagcctaaccaacatggtaaaaccctgtctccactaaaaatacaaaaaaattagctgggcgtggtggtgggcgcctgtaatctcagcaatttgggatgctgaggcaggagaattgcttgaaaccggaaggtggagtttgcagtgagccaagattgcaccactgcactgtagcctgggcaataagagcaaaactctgtcttaaaaaataataataataagtaaaataaaataaaataaataaaaataaaatttaaaacataaatgaggaaaaaagtttttttttaggccgggcactgtggctcacgcctgtaatcccagcactttaggaggctgaggtgggtggatcacgaggtcaggagttcaagactagcatggccaagatggtgaaaccccatctttactaaaaaatacaaaaattagccgggcatagtggcttgtgcctgtaatcccagctactaggggaggctgaggcaggagaatcacttgaacctgggaggcagaggttgcagtgagctgagattgcgccagtgcactctagcctaggtgacagagcaagactgtgtctcaaaaaaaaaattgtttttttttttaaagaaaagaggctgggtttagtggcttatgcctgtaattacagcactttaggaggctgagacgggcagatcacctgaggtcaggagctcgagaccagcctggccaacatggcgaaatcctgtctctactaaaaatacaaaaattagccaggcatcatggcacacgcctgtaatcccagctactcaggaggctgaggcaggagaatcgtgtgagcccaggaggcagaggttgtagtgagccaagatcctgccactgcactctggcctgggcaacagagagagactccgtctgaaaaaaaaaaaaaaaagaaaaaaaaagagaaaaagaaaagaaaaaaaaaggtaagaaaagaaaagaaaatcctggcaaactagtgggtctctgagtggccagtttcactgcatgcctgtatcgcatgtgagtttgtagccgtggattcactgcagttttagaaagaagggcaagcatttgacagcttcatgtaccatgaatattaacacattcacacacaccatgttattactaaataatttcccttatgattcatctgcagtaaaatcaggatattatctcgacatcaaatgttattgtgtataggtaggttttgttttatatgagtttcattgcaggatagtaacaaaatatttattacaaggacgatggaatcggctccagctgaccgtctgtgctttgaaatgaaatctgaactccttaatcagccctcagacttgccataaccagcctggctgttgtagaggctctgtcccctcctcccaccaatgccagccaaagggatctatttgtatgtcccagaatgtgtcagcactctcttgtcccttgtcttgggacaggctgttctctccctgaaatgccctcatcctctcccttcactgtctcaacaaattcagtgctccctagcctccattctcaagtccttccttcacaacctgtgccatagctgtgctgcaccagcggcctcgcttttctttaaataactcattttccataaataaattgatttttcaaagaaaagttgatatcataatcataaataggaaaccagtatgagtagccctgaaaataaagttgctataaaaataaatataagaaaaatacaagttaataacttttgataaaattgtcagcagaccctctgaggctaactgaggggaagggatgggaaggcagattaagaagtgttagcaacctgttaacacccttgacatattcagaggcttgaaagaaaatgggaagaataactttctctttcggtgtaatttaatgctgtctctgttctccctaaaatcacctgcattttactgcaaccacccatttatcactcaacggcgctagatgctgccagtaaaccaatggaccagataagcacagcctctgcccctacagactctcagtcggctggaggaaaaacataagcaacctgggaatggctataaaatgtcattgcttaagaaaatagtttgtggccgggcgtggtggctcacgcctgtaatagcaacattttgggaggccgatgcgggcggatcacctgaggtcaagagttcgagaccagcctggtcaaaagatgagttcgagactagactggccacctcttcagtagagctggtgaagccccgtttctactaaaaatacaaaaattaaccggacgtggtggcatgcgcctgtagtcccagctactcctgaggctgaggcaccagaatcgcttgaacctgcctgggagggggaggttgcagtgagccaagatcacgccactgcacttccgcctgggcgacagagcgacactcagtctcaaaaaaactagtttgtgttttggagcctctcacttctccagcgtccccgatacgcccggggattgcagagaacccacacctattcgtagattatgagagtaggagcaaattaatgatttatagtcttttcaaatttttttttttaacagaaaaagagtagggagttgaaagtaatgctgtttttttccaggcactcccggggacccagcgcggcgaagcccgccaggatcgcgggcgacctgtggcagctctggttcccccgcccgggcccggctcgggttacgctctgggcggggactccgcagcggctccctagttagggggcgccccggtgggttccagctttaggggtcgcaggagcggctctggcatcacctcggagctgacgaagcgggaagagccccgcaccagtgctgcccctacagagctctcggcggggggtggaggtgaggttacacctcgtccctacccccgccttcccctccgccgcagggatccgggacccgcccccgcggagaggacggggggctgcggggaggggctgtgcggggagcgggcgggttccgcaggcccctaggtggggcggggcccgagccagagtcgagtccctgaggcgggtgggggaaggagagacgggtggcgcgaccctctgtccccgcctcggggcggagcccaggtcccagcctgcggagcgcgagacacgccgaaatccgcccgaggctacctgtgcgactccagccgccctgcaccggaatctggggagacccgccccccgccccaccggtctgcggccctccgccccagcgcaggtgcaggtgcggcttctctgcccctttcaccccaggcgcatccgccgcggcggccatggcgcgaggagacgccccgcgggacaggtgagtgggcccgggtgcgttgcaagtggccgggggcgttgcagacccgctccctgaaggcgctccgaggctcagagaagaccggatcgaactacaattcccatcagccgactccctcggccgccggaaccggggtgatcggggttgtagtccgctccggagggggtggcctgggaggcgggagggcctgcggaggcgggtgcgtcctcggggtgaccttcccaccgatccccacagctaccacctggtcgggatcagcttcttcatcctggggctgggcaccctccttccctggaacttcttcatcaccgccatcccggtgagactcctggcggcgtggcagcctcgtggccacagccagcacccctccctccagccctttggatgaagcttagcgggcgcttcctcaccgcgcacctgtgacccctcgttgagctcattatgggctgaagctcggagaggggaatgcttcccccgtggctaggaaagtagaacttcagcaatgcccacatctcagaggggcaaggccaccagcccacagggtctggaatgagcaaaggcgctgccacccctctctgtgtgtcgttattcctgagtcagtcaccccaaaagtcggttatcgaacgtttgattttctttgaaataccatgaatttcattcattcactcattcattcaacaaactttttttttttttttttttttgagacagagtctggctctttcgcccaggctggagtgcagtggcgccatctcggctcactgcaagctccgcctcccgggttcacgccattctcctgcctcaccctcccgagtagctgggactacaggcgcccgccgccacgcgcggctatttttttttgtatttttagtagagacggggtttcaccgtgttagccaggatggtctcgatctcctgacctcgtgatcctcccgcctcggcctcccaaagtgctgggattacaggcg

SEQ ID NO: 5195 - DNA, 6000 bp, Homo sapiens
actgacccaggcctctctgtcccgcagacatgtccttccgcaaagtggtccggcagagcaaattccggcatgtgttcgggcagccggtcaagaacgaccagtgctatgaggacattcgcgtgtcccgtgttacctgggacagcaccttctgcgccgtcaaccccaagttcctggcggtgattgtggaggccagtggagggggtgcctttctggtgctccccctaagcaaggtgggtcctgtcagggttgggggaagaggaggcacctcggccacccctactgggcctttctgcacaccttgaatccctcatcttgccgtttctcacactgctgggcaggtgttataacccagatttatcgccccaagtgttagcacagatggaaagtagcctgttgccatagaggcagggttagaggcagcaaacatttcctgctcacctggcaagtggggcacagtcacatctgggccacctgtgagccgggacgtgcatgtcattcccactccatggaggggaagaccaaggcttcgggagggatggagcccactgactgccccctcgtgcccacagacgggccgcattgacaaggcctacccgacggtgtgtgggcacacgggacctgtcctggacatcgactggtgtcctcacaacgacgaagtcatagccagcggctcggaggactgcacggtcatggtgaggcacaggactggctgggccagggtcgtgggtgtggccgaagggggccagcaataggaccagcagaggactgagctcggtggccctgtccctaccacaggtgtggcagatcccagagaacgggctgacctccccgctgacagagccggtggtggtactggaggggcacaccaagcgagtgggcatcatcgcctggcaccccacggcccgaaacgtgctgctcagtgcaggtctgcaccgccccccgttttgtgctccccccccccacggacccctccatacatcccagcagcccctccagggcccacatgacaaatgggaaagctgaggccctcagagttggagagacccgtctgtcccagggtggtgggcagagtgggcctcagcctggtgagctaatggcctcctgccacccacccggcccgagctgacaaccctcacctgccaggctgcgacaacgtggtactcatctggaatgtgggcacagcggaggagctgtaccgcctggacagcctgcaccctgacctcatctacaatgtcagctggaaccacaatggcagcctgttttgctcagcatgcaaggacaagagcgtgcgcatcatcgacccccgtcggggcaccctggtggcagtacgtggctctggagggcaaggatggctgtggataggcccaggaccttgagcagggcgctgcactgaccagcctgtccccccgacaggagcgggagaaggctcatgagggggcccggcccatgcgggccatcttcctggcagatggcaaggtgttcaccacaggcttcagccgaatgagcgagcggcagctggcgctctgggacccagtgagtggccagcctgagggggcaaacttgagacttgggccccaccctgggccaggcaggcagggttcaccctggggaggcctgtggttcctagcttctctgcctggaacttgaggctctcagggcctaggactctgtcagactttcctctcctgccccctgctcgcccgactgccccaccactcccccatggcctcccactgcctctgtgtctttgcccatgttgttcatgccaacggaagggcccttctctcccttgcttgcctgtaccacccactgcctgcacagggctccccgctcctccagaaagcctcctcctccagcaagcctcctggccccagccctctctgcttctgcatagtgacctccagggcaccttgagcaggggctggtgccgctggcaccccagctccccacagtgaggtatgtttcagcacttgcttagtggcctgggcatagtcttaaggcctggaggaggctggaaaagagggaccctgggaataaagtgaagccaggagggccaggtgggggtcgtcatgtgggaaaaggcatagagatggcagagggcccacctgcatttaggggcagtgctggctggccttagtgaggccagctaaggcccgtcctggtttgggattagggggtgaggaggttctgcttggcctgactgcctgcaatgtgccaggaaaacctcgaggaacccatggccctgcaggaactggactcgagcaacggggccctgctgcccttctacgaccccgacaccagtgtggtctacgtctgcggcaaggtggggctgggcagggctggcgaggggcagggaagaggcgtgcccaggtgctgagccccctccccacacagggtgactccagcatccggtactttgagatcacagaggagcctccctacatccacttcctgaacacgttcaccagcaaggagccgcagcggggtatgggcagcatgcccaagcggggcctggaggtcagcaagtgcgagatcgcccggtaagagggctaccgaggccactcggggataggggcatctaaggtgagaggtcaggtcattggaggctgcttgggagcaggaaaccttgcgccagggaggcccggcgggccatgagaactgtcacgaggcagcccgtgtgggggtctagccaccttaggggtcggcctgcggaggtcctggggtgaggactggaagtggaggatgccaggagagctggcggtgggtggggggggcggtgagggttccacccgtggctcctccttgcatccccaggttctacaaactgcatgagcgcaagtgtgagcccatcgtcatgactgtgccaagaaaggtgaggccgcccgtccctcggctcacttggccctttctccagcaagcgggccatgcagttgtgaccagggcgaggcctgtgaatggaacatgacctagtatggtttgtgggcagtgagctggacagatgccagcttgcccttgtaccagccagctgttgggctgtgccagtcagggggcaagtggggatgagacagagggtgagcaggggccctgctctggatgagccacaggagaaggacaccaggcagtcagggagggagtggcagccacacagatcttcctgaaggaggcaggacccataacacagctggggtggcgccatccactgggggcaggccaggcgaagggcacagtggtgggaatggagagaggaacaaggagtctggctgcagtggggaatcccatgaagaggggaccgggccacatgtggcttggcctcagatgccaagagcctcggacacgcttccatgattctctggccagcatttgccgactgctctttcaacatgccaggcacattttggggagtggagctgagctgatagggcctgctccaggagctcacagtccatgggccccagaatcccataaagccacatagtggcccctgtgccttgcaggggaaggtgatgacaggggccttgctcagaagggtgggaaagcttccgagggagctgttgatggtgtccagaaaggaagttaaaggccagatttgagctttccaggccgtgggagaatgggttaacagagtgcaagcctggaggccaggggagggatgaggggaccctgatggggcctcctaactgatcctgacctccccggccccctgcccagtcggacctcttccaggatgatctgtaccccgacacagccgggcccgaggcagccctggaggctgaggagtgggtgagcgggcgggatgccgacccgatcctcatctcactgcgggaggcctacgtgcccagcaagcagcgggacctgaagatcagccggcgcaacgtgttgtctgacagccggcccgccatggccccgggctcctcccacctaggggcccccgcctccaccaccactgctgctgatgccacccccagcggcagcctggccagagccggggtatgcacgcgcaggcaggggtggtgctgggagccccaggtgtggccctggcctgctgtgtgggcttcagccattcgctgtccctctctggggtagtggtgggtttgggagggctatggcttagcagcccctgaccaccgccccctacccctgcttcatgtccccacaggaggctgggaagctggaggaggtgatgcaggagctgcgggccctgagggcgctggtcaaggagcagggcgaccgcatctgccgcctggaggagcagctgggccgcatggagaacggggatgcgtagggccacagccacacgccaccttcatctcctccgccgcccccttcccactcagcttctgccagcgggtcgcaccgggctagctggctgcccagagcctctgaggcagcgcaggggtcagttcccacccccacccgtcccaggcccaggccgaagccagcgcccagctttcctcactgttcctgtggaggatgtctacgcccaggcgagctcctcgacctctgagggaccatctccccgaccactgcccagccctctgctccctccccagaggaggcgggagggtgggctctatattttcattccaaataaaattctctttctaaaagccaggctgacctgctgctgcaagggtggggctgagaagtctggaaacctggagacagaggatgtcacaggagtcacacatgtgcagaaggtctgggggcagtgagcagccccacaggcattgctcccctggattgtcaggcagggaaactgaggcagaagacctgagaacacatgcaaggctgcatccagcttcaagttggtgctgcttcttccttggaggacaggcccggcagcccagcctcctccagagagactggggagggtctggtgtggaccaggggtcctgcagcagggaggggcaggtggggtatgtgggcaggaagcggaagcctgggccacccttcactgcagacgagcactgagctcacttctcgctcgacacagccagagctggaggtgggtgcccggcacggaggggcctgcggaccaatggtaagcctcggagccccccgggttcttgggatgggggccacaggcggtcggggctagaatgtctgggcctgtggagctaaggagggccccacattggccccagggaagaggtgagacctaagaggagtatggcagaggctgaacctttctctcacctgagctgggctccctgggactccaggcctggcccccagcaccccataccggaccaggcccctgtcaggagccctgggaaggcccttacctggtcttcctgtgagcgggaacttgcattcctggagcctgggcggacagcctggggtggtgggggaggctggctgcacctcagcacccctcccccgacaccccccacctagcctgttccgaccgcagacttcctctggcagctgcgcccgcctcccccagccccccccagcccccggccctgcacgcctgtggccctcagggactgggagtggaacggaaaccctgccgctggggcagccccgtggtggggagggaggaagaggggcctcacggacccccgtttggggacctggccaagcagaagatgagcagttgcctctgggtgcatccaggcccctccatcccccatcccaggcctcagggagagccagccctgacaccagctagcaacctccttccctccctcccatctcctctcccacccacccaggcagcctagacacatttaatccatacttattgagcacctactaacatgcttgacccaaaaagcccccgtttcctagcagcttattgtggggggtagataagacaatagacataaaaaatgagtacagttatctcctgcgttaggtgacatggaaggaaaaaggcactgagtgctggggggtgctggggtgggctgcagtgatagacatcagggtagaggttaaggtcaggttcagcctcactggggtgaagtttgagcacggtgagcaggccatgcagcccgg

SEQ ID NO: 5196 - DNA, 6000 bp, Homo sapiens
agagccagcgtgctgtggggatgatgtgcaagctgctgtgggtgtggacaggcaggggacagggtgacaggtgtggaggaagagcctcctctatgccccttcctgggcctgccgctgctaccatctccctggtgccctgggcctccgtagctcccggccccggggcctctgggccaacgtggcacctgggaggtgctcatcatggccccccccacccgccagctccctgcctacctgggagggcggtgaggtcttctggaccatgcccacaccggtggcccgtgattagatagttagggtgggggtgaaggactgcagagcccctgtcctctgtgtgggatggagcccccagccactgccagtcacgtggctcagcatgtgacagcccagccctgccattctctggagctcagccagattgagcgggtgccaggcagggctgggcaggggctgagcctgtaggtctcagctgggagtgaggcccagagagggcagccactggtctaaggccacacagcaaatcagggacccatcttggcgggtactggcaggtgggaggggtgtttcaggatcccgagggtcccctccctggccagggagctgttgaagaatttcccccaactcacaggggccgaacttgtcatgaatgcaggagcaacctgggaggaggcccccgaagaggcctgtcctcccgggacagaactcctagccttccctgggagtgaggctccccccaagggaggccacacacctcccaggagggctgggccctccccactctgggttgggtgcccctcactactcctcaaagctccagaggctcagtagggcctgggagtcccatctttgttgaggagcccagggtaaatggggagccctctgggtagggcaccaggaggactcacttttggagccagctctggggtgaggtctgccaaggcccaggccagccagggggagtgggtggaggggttgctcagggctccgggccagacagctgcggccccgcctgccctgcctcctccttgctgggctgacgcttcgcctctttgggcctcagtgttcccatgtgagaatggggctgactacagtcccgggggcatctgtgggtgaatgagagggttcggcaggcatggatctcagcacctggcatggagggcgttaagtgtgaggtctgggctcaaatcctggtcctgtcacttacctgtgtgacctaggttagtgtcttaaccccccgtgcctctgccttcccatctgtaaaatgggacataagtgattgtgaggctgaaacaagttattccatgcacgtgggcccggaactgtgaccattccaagtgcccggccccctctggaagggtctgagagctaccttccagactctaggacaggagtgtgggcagggcatgagcatggcatcaggtggaatcattcatccattcataattcattcattcattccctcacttctcagaaacacgcccctgagcctggctcacagggcctcagacctgcccaagagcatctcactgcctcatctgcccacgagtgaccttgaaaagaaacgtcccctcactgggcctcagtttccccagctgtaaaatgggggctgactctgcctgcctcacatggctactgcgagggtgaaacgagagccgacctgaaggcaccgacagggcacctggttctcagtaggcgctcagagcatgtgaatgtcctcctgcccctctccttgccctcctgaggaagtggctgccccaggccttggccctgaggccctggccctgcctcccaccccctccctggcagtcttgaaggctggacccaccctggctccttgaagaggcaaagttagaggctgtaggggcccagggcccaggacacagtcagaactcacgggcaacggtgaatgcgggtcacttgttcatttacgcactcaacaaacctttactgagcacctactgtgtgcagacacttcacacaattttcacaattcccagacattattgaccatgctttccagctgggccacacagtgacaaggactcatggggatccacaaccagcctggcctggctccccggcccacggtgcttccaaggtgcctggagccctcgcacaggaatgggctggagtcttcagctctgggtgagccctttgccaccaactctcaggagcctcaagtctcagtggaaagcagcagccacctgggcatttgctgtgccaggcactgggcagagcctttggcacaccccaacctggggacctcccaccatcctgtgagccagactcagtgatcatcatccccattggctttaatgtttaaaatattgtggaatcacatccatgccagggaagtggtgtgaagggaatcacgtgggctgcccagcacgctcctgtgtcagtgcaatgcggggcaacaatattccaagaggttgtttcagggagttccagttgagagcaatatttattctcttctgcttgcttttctgcaaggaacatcgattattttcataatgagaactgaaagtaaaggcttattatagagaaaagcattggcaaacagtgagcacggggggatctggccaccccttcctggggatgtgactgtgcactgttgcaacctggatgggttggtggaggtgctggccctgctcagatctctgtcccgcaggtcaccctggtgtgtttatctgggccaccctatcagcctcttagatagtctccaggctccccaagagcagctccataaaccacctaaaaaaaaaaatcctttctggagagaggaggtgtatcagtcagggtttagtgcctccagggctgttttttgttttttttgttttttgtttgtttgtttgtttgagaggtctcactctgtcacccacgctggaatgcagtggcacaatctcagctcactgcagcctcatcctcctgggctcaagcaattctcccacctcagcctcctgagtagctggggctacaggtgtccaccatcacaccaggctagtttttgtattttttgtagagatgggttgggggggggggtttgtctcactttgttgaggctggtcttgaactcctgagctcaagtgatcctccttggccagccaaagtgctgggattgcaggcgtgagccacagcgcccgaccctctccaggtgttttgagtaggagacattgagtgcagggaattggtggtacagcacaggtgatggaagagcccaggatgggcaaccatagcaaccgccacaacccccaggcccagaggaacaaggggaggaagagattgcaccaggccccagaagtttggggtccctcagggaaattgagaagctcggggggcccactcccagcactttgggggctaaggcgggtacatcacttgaggtcaggagttcgagaccagcctgggccaatatggtgaaaccccatctctactaaaaatacaaaaatcagctgggtgtaggggcacacgcctgtaattccagctactcacaaggctgagtcaggagaattgcactttctcatcatactgtgtaatgatgctggtgtctgccatctgagaacggcccccgccatagccatactctcccacctcctccctgcccctgcgcctcgggccctgccctctcttcggctcctttcctgtctcccacttccagccacccacctgcatgaatccacctgtctgttccccacatctgcacttgggcatcgtcacctggagaaagttctacctcctggaagcctgaagccactgcagattcacgcctccccccaccttcccagcaatccttgcggggtgggaggtgtttgtcatccagtcactcatgcacccatccagtcacaagtattgatcactcagtaggtgcccaatgccatcctctgcatttgggagaggatgtacctaaagagcagtgggtggaggggggtgcacagggagggcatggaaaaccagaagggaagtgaagggactgcattctctgcagggatggtctcttgttctgagagctgagtgggaaggaagccacctgggaggcgcagcaggaagagcattcaaaccagaaggaacccaggggagagaatctggatattttcaaaagtggccccgtggctccagccaggtcggtggtagccagtgctttggagtgtcggccccaccacaggctcccgctgcagcccgggatccagtgcccagcaggatgggggcaggtggctctgggccccactacatggttgtggcagggtcccccatgtagttcagtggggatcacaatctccacctcccaggacccactcaagctcccatttgcacagcccaaactggagcaggatggggacatgggaggtgggctctggctgtagcgtccggtggtgggaggtggggtccaggtggtgacgctactgtccctgcagtgctctttgatgagctgtaacagcaggcttggaggtggggctggggacgacccaggcaaccctgaggggagcttaagggagccaggcaaccctggcacttttccaaggctttgcattaactcaatagttccgccatggccccgggggtagtgccatgtatttctgttttaccgtcgaggaaacggaggaaaccgaggcacaaagaaatggagttaattcctaaagtcacagggccaggaggtggctgagtggggattcgaactcacaccccagagggcacacacaggcaggcccctgcacacacgcgcgcgcgcgcgcgcacacacacatacacacacacgtgtcctggaggaggcggcccgcagggcgggacagggcggggcgggggcaggtcccggccgccgggaggaagtggccgggcggtcgcagggactccggggcgaccgccgcgagtccgcagtagttcgggccatggaggcggagccgccgctctacccgatggcgggggctgcggggccgcagggcgacgaggacctgctcggggtcccggacgggcccgaggccccggtgagcggggacccggagtgcgaggcgcgggcgtcccctgtgggccagggtccccccggcgggggcggggcgggccggggggcggcgggcaccgggggacacgggttcggggcgcgatcgcgggtgcgagcggcgtgcgtggctcgcagctggacgagctggtgggcgcgtaccccaactacaacgaggaggaggaggagcgccgctactaccgccgcaagcgcctgggcgtgctcaagaacgtgctggctgccagcgccgggggcatgctcacctacggcgtctacctgggtaggtgccgctcggggacccggggccgccccgcccgctcccagcccggcccgggaaacagaaaccgcgggccgccgcctcccgcccgctctcacttcccctccgctgccctcgcagctgcagccacggccccccgcggcgggggtggggttggggggtcaagtagcgcagcgtccccgggtcccagccagagcctcggtgtgggtgggggacgggggtccgggctcccggacagacctgccaccgtcagaattggaggccggcggagcaaggcgggtgggggtctgggcttagctggccaagtggccgcgggctggcagaaggcgtggcgcagcccgggaaccccgctgtcctgaggggcgctgtcagcgggaatgccttcggtgattggagctccctgcgaggcctgcatgccgtcttctgctcggtggcgcccaaagctaggctgctccctgcacgccgctctctgtcctgtccccaggcctcctgcagatgcagctgatcctgcactacgacgagacctaccgcgaggtgaagtatggcaacatggggctgcccgacatcgacagcaaaatgctgatgggcatcaacgtgactcccatcgccgccctgctctacacacctgtgctcatcaggtgggcgcggctgctcctgtgggatgctgcggtactcccatttcggaggggtacagaggccggcgggccaggaggtgtccatctgccggggtgtt

SEQ ID NO: 5197 - DNA, 6000 bp, Homo sapiens
tcagcctctcaaagtgctaggattaaggtgtgagccaccgcacctggccatcctctttttttgaagtgaggaaactgaggccagatgagcagtgaggcacccatgcagccagccagactcagctctgtgccctgtggcctgctgcaccctctcctgacctccattcttgcttcttcactgtgctgcctccccacaaggcaaccccctgccgaccttccttgtgcctcaatgggccaaccaggtgccagggactgagaggtgcagaagaaacagagcggagtccggctctgaagggacgacggagagtggtgaaaggtttgctcattagtgccctgggtcaaggtcctcttttttgttgttgttttgtttttttgtttttagactgagtttcaatcttgttgcccaggctggagtgcagtgacgcgatctcggctcactgcgacctctgcctcccaggttcaagcgattctcctgcctcagcctccagagtagctgggattataggcacctgccaccacgcccagctaattattgtattttttgtagagatggggtttcaccacgttggtcaggctggtctccaactcctgacctcaggtgatccacccgcctcagccccgaagtgctaggtttacaggcgtgagcctctgcacccagctggtcctcttttaagtgaggaaactgaggcacagatgggcagcaaagcgtccaggagcagtgggatagaacgtgttctgggctgggtgcagtggctcatgtttgtaatcccagcactttgaaaggctgaggcgggcagatcacttgaggtcaggagtttgagatcagcctggccaacctggtgaaaccctgtctctagtaaaaatacaaaaatcagccgtggtggcacgtgcctgtaatcccagctactcgggaggcagaggcaggagaatcgcttgaacctgggaggcagacgttgcagtgagccgagatcacgccattgcactccagactgggtgacgaagagagactctatctcaaacaaacaacaacaaaagaatgtgttctgatcccgtgttcagagcagacgtgttccattaagaaaacagtgcacttgttgctctgagtcctttccgtgcacgtcctcttgctgcgtgcaggtgctttcgtctgcatcaccctgttctgtcctcatgaaaccctggtgatgcaggctcagcaaagtggaactgaccatatttactcaacacctagaggcccaaggtgcaaggtcagagggactacaggcttcggagaggagagggaagcacaccacactgagatttcaacactgtttcctatggggataccagagctgagttccaaaaaagtcgtacacacttctggatcagaatctgctgggagctgccagcaagaaatgaggctggcgagatcgagtggggactcagctgtgctcttggcaggcaacagggtttaccattttctgtaacaattgttcatctattttaggtgggacaatgatagtatggtcatattttttagttaagaatatttatcttttagaggtttgtactcgagaatttgagggctgggcgcagtggctcacacccgtaatcccagcactttgggaggctgaggcagatggatcaccagagatcaggagttggagactagcctggcccaacatggtgaaaccctgtctctactaaaaatacaaaaattaccgagcatggtgatgcacgtctgtaatctcagctactcgggaggctgaggtatgagaatcgcttgagccctggaggcagaggttgcagtgaggtgagattgcgccactgcactccaacctgggggacagagcaagactccatgtcaaaaaaaaaaaaaggaatttgtggacataacggtaggatttctgaatttgctttaaaataaacagtaggactgggcaggagtgggtaggaacacaggcatacaccttggccctagctccataatggttgatgttgagttttggttgtataggcctttattatactattctggttaatttttttcaaaggtttggatttttcaaaatattagccaggcatggcgggacttgcctgtggtcccagctactcaggaagctggggtaggaggattgcttgagcctaggatgtcaacactgcagtgagctgtcattttgctactgccctgcagcatgggcaacagagagagatcctgtttcaaaaatgaatgaatgaatgaacgaatgaataaaaaggtttggatttttccataaaaaagtattttttgagtaaaaagagaaatcttagcggtaaataaaaacattacctgcattaaaaagaaaatttttcttgtagctatggtaggcaattgctacagtattcaaactggggcagaatctgtaaaaaacaaggcttgagaaagattactctagtttcagaggcagacatggagacgtttttggccccagggaactgaggctcaggcccggagctccccgggaggcctcgttctctgcttctttattaatagactcagctacgcagccgcgggagccgcagacccgggcaggagagctgcagcgtggtcggcgggaggggaataaggcctccccagtgcggctgcagttgcaggccggcgcgggctcgttgcagctgccgagagcccggccaccatggcacaggtgagcgtggcgcctcggcgtccccacagactgggtccctgtccctgccccgcccggcctgcaggtggcacctaggcggcgcgcagggaagggcgcacggtcaaggccgaagagccctgggaacagacagggcgcggggccaatcccagctgggcgcgcaccggggcgctgagcgagggaggaaatgaccttggagcggggacctgtcggtggctgaggttccagggaaaggagggaagggcatttgcggtgagaatgacagtccagcttccgtagtgcaaaccgcgaaggcccacgtgcaaggagagcctcacgcgcgagagccgcccgggctcgtggggtgcagccgcgcgtcaggaacgtgtgccctggcccagcccactggcctcttggggcggtgaaatctgcgggggtcgagtgcctgggctcactggtggtccagacaagcgcaagcagggggacaaacccccaacttctaacctcaaagaaatgcaaattaaaaggagagatgagagattcttccctcccccacccctccttttaggattggcaaagattaaaataatccataatcggagacagggccccgcttgcacgcgcgggtggcagtggaagttggtaaacttttcggcatggtagcttggcctgtgtcaccaaaatgtcgcacgtgcctggttgcttcccctccagggatctatcctacaggataatcaggagctccaggaggtacatcgacggccaacgcagcttttatttatacctgcaatggtggggtggggggcggggaggaggccctaattgtccaatgggggccgcgtaaatggatcacagcatagtcaaaggaaatcttatgcagccttgggaaggccggtggtcatctccgtcccccagcagagacctgtctacgacgtaagccaagtgaaaacaaaacagccttacagacagcttgcatcctagccttcctttaaaacagcgagcccgggaaccgcagggagagttaactgcagcggtggtggggggcgggatcaaaggagaactttcattttctcttctaaattcttctgcggtaacaactaaatgatacagaaagaaggatggttgcaaacatggattttttcataactagaagaagtggtcgaacttaaaaagagcagggttcataaaagaggtttaaaagagtctttgttcataacatcggtgcatttatggagcacctgctgtatgcagagccgccagctcgcgcctggaagcattgcgggcaaagataggggaggggtggctcccggtcaggaagacccccttggccctcctgttacgcttggggcccctctccctccccctcaaccccctgggtcccctgcagctgcgctcgccctagactcctgggaccggtggatgttcagttcccgctcccggcccctctcccgagctccagcacaagggtctctcggtcgctctgccctggcctccagctactcctctcccagcacctattatgttcttgacgctggaagaattattttagtaaatctcaccaaagccccccaagtgaggcatttttatcctagctagatgaggaggagccacgctgcctctggatcgcgatgactgccactcgtggtataaggtctgatttggggcatgggctgtggaatcagatctggacccaatgtccgatctatcacttccccgcgcttttttttttagagacggggtctcgctacgttgcccaggctggcctcgaactcctggcttcaagcgacttcccgcctcccgagtagctgggattacaggcgcgccccaccactccctgtggatcggttgcttctcagctcggtgatgtggggtaacttatttcctggcccgcgacccttgtctgcatgaaagagtcaggggtgaataccatcagggggtgcctggagcattacacggggcaatgccgatagataagtcgcgaggatcagccaggcacggagctaagcgattttatgcgcacggcctccacgagatggctcgttttacggatgaggaaactgaggctcggagggtgaggaatctcgtcctagaccccattccggcagaggtcgaggacgcgagcacccgctcgagcctcagtttccctcccctcctagccccgcggacgccccgccccgccgaggccccgggcccgccctccgcgcgccgggagtcacccgcctgcaggcgccgcagccggacccgcctcagccaatccgctgctgccggcgtcgggtgcgctcggcctcgcccgcggccctccttccccggctcccgctcgccgctcgttcactccaccgccgccgccgccgccgccgctgccgctgccgctgccgcacctccgtagctgactcggtgaggcccggtcgcccgcggtggggagggtggcggggcggccctgcgggctgcgggggccggggacgggcggggcgcggggctgccgggaaccggaccgggtgggggacgccgccggaaccggggcgccgagaggaaccccggtattccccccggacggcggggttgtggagatcctgaacccagaaagaggccggggctccccatgttccccaggggattgggtctgagggtccaccgggggtcggtccatccgcaggcgggtcccgtgcggccgcgggagggatgctcggccctccggacttggctggacgcctccggcccggggccagcggggccaccggctcccttgtctcccactccttaatccgccctggactggattgagtctgagggtctgcccaggggtcggtcagcctgcgggtggccgcgggagggatgctggacgctctggatgctttccaggatgccttcgcccggggccagtagggcctccggctcctgtccctgcccatcccaccctggctctggagaggattgggtctgggggtccgcccgtgggttggtcacctacgggcaggtgcagtgcggctgagggaggggtgctcggccctcgggattcggcagggcgccgctgaccccatcccagcgtccgtctccccggtccccctccccatgcccgccctcgcggtgcagccgtcgggacacgcccttggcgcagggactccaggcgcggtccgagcgctgccgtgagcaggatgagggtgccgggcccagtgcctgcttgggagcgccccgcagcctctcccgtgcagcgctgggtcaagggcgggtgggcgcggagcatgtgcccaaggtcgtgccgggctgggagcggcggggccgcgggagggtgggggtgtcacgtggccgtgccctggcgaacttggcctgcgagcccgacggtgcggtcagggccacgcggggca

SEQ ID NO: 5198 - DNA, 6000 bp, Homo sapiens
tgagtgcgcaggtggccacggtcaccttccggcccatcctggccgcagtcgcttgggcaggaggccagcgggggacagcaagaccagggtcccagcgaggtaggcggctgggacgccggaccttccgggttgcccggccccgccccctccccgcccatccgttgaggctccggccaaggaggactgcggcgtcaggccctgcctacggatcgccccgccccgtctgaggagctcacgaccgcgcctgcgcagcgaggtggcctcagcgttcacggcaccgcgaagggccccgcccccgccccggctccacccacgtcccaggccccggccccggcccggcccttgcgggcaaacccgttcaggtgcacaggtgcagggggctcaccgcccagctgcagcacccctctattttatcccacaccgccaccccacatccagcttagccatgttttattttaatacggcatgaaacgttccaaatacaccaaaagtggagagtacggtaggagcgctccatcgtgcccgcgggacagcagacgatagcaatcgattctccgtgctgggaatcccgccaccctgggcggatggcgctgaattcttgggaaccctctcctgcccctttcactcctgtaccacgtgtgtaagtagctcaggtagcgcactgtttgccttttctgaaactacaggaactgcacttgaatgtgcttctgcaacttgattttttcccctgtaatatgagatacgttcttttaattatttttctgcagtttggtattccatagtggcagtaaagcaggtttattcaatagcggatgggcattgacgttattagcagcgttttgccaacagacgcacgcacacaggcactgctgcaatttcctttccggcaaggtttccttcgtgacctcgttccgccagttcctgcagcagctttgcagagtagtagggttcgtgctgtttgactttactaaatattgccaagtctcttctccagggcgcttgcaccgattcactaccagcggtttctcactttttattttttcacatttcctctttagtccacccacggtagaatccatttttcccccatataaataactgcctcatcatcgttgcttgaagaggccatccttccttctgtcattcatgttagtttaaaaacacacaattcacaaatttggaaaaagagaaggctttatttcttgtaaacggtcgtagcctgcaaggtggcggccatctgtctgaggctgggaatctgtctccagccaaggccagagacaggcacgtccaaggaggaggggttggggcaggagcgctatgctgaagggattggctaaacatacatattcaacaggtaacaggaggagctatgaatattcatgaaggtggtcctgacacatgccctcttattgagcaaagcatgtaatatatgacccatgttcactttggggtggagacttaacatttacacatcttacaattagggcctttatggcaaaacgtcttttcaggacacaaaggcatgcaggtgcatcatctctctctattaacgggtcagctggtcggcatggtcagctggtcggtggtctcttattaggagaaagtcactgaaatcagtctcttgtccaatcacagctgctatggctggtgaaacagagtcagttagttggcacctagtggagctgcaattgttttaatattccctatcccaaggctagtgtgtgtttggctaatagagaaacagaaagccttgtggctcttagaatatagtttattctctaagtgtgggttgcctgacttaccctcgcctagcatggctttgggtcctgtttataatttggtatcttattgccacagagtccgttctgtcagtcttacgatctctgttttaacatgaatgccggccagttgtggtgtccaaactctgaaacagggggctattaccaggcgcatctgacctcccatcccatcatgtctgggaattcagtgttgaggtttttctggtgtccccttggtcaggagaaggtccctttggtcaatggggggcttaggattttatttttaccttatgtacatatacccgttttcacattttgaatcactttttttcctgtctataaagtagtgcttgttcatgacaatttggaaactccacaaaagcaccagaatgttatacatgctaacttatttaatcctcacagtagttttcatgcttctgaaatccacacgatctgctcaaattatctcctgccaacaatggctgatgccaggcctgggcagagaaggggaggatccttgaacatctggttgtcccagaaaataagtaagtactcaaaggatggtagatacatgtcatatgaaaaaagaagccaatttgaaggggctcccgttagctaaatacaggacaatacagtaaggatcataactcggtcagctaaatccattagggcatactgataaaaaataaatcaaagaggaaatccctacagaagaatgcttgctaataaataatttattaataaatgttgagggaatgataaaattagaaaattaacactttgtcccaagaaataagggattcaggcaagattcctcattaaatgctagttcactgggtgaaaggtcatttgggaacagcatatttacagtctcaaagtatcactgcaccaattactcattaataacaaaaggaaaaatggagacttctggcagaaaccacggagccccactatcaatcatggagcacagtgatatgttgtcttaaaaaagaaaattttaggactcttgaaatttattaggtcaacttgggcaacagagcaagatcctgtctttaaataaataaataaaaataaataaatttattatgtcaagagggaagttaagtcctagaaactgggtcacatagcatgtttgtaattttgtcttttagattataggctgtttttctttatcattcatgttttataaatgactaggagagaccacagaccaggcctgctccccttttaattactgatctttattatagattgtctcttattatcccgtacttagaccagactcctacatcttcagtgtaaaatgttaaatataccttccacctaaaaaagaccacctcagctggtcagattataactttatgcataaaaagatgttaaaattctgttaaacttccctaaaatttgtctacataaatgatcccaaacatctacagttcaaaatactgatttccattctttaaaatctgtgcttcccaggcagcctgtcctcaaactttatacacttaaataaactctctttaagctaaattctgacctgtttggttatttcaggttgacagccttctaacaagataaaacatgctctatgtagtatattatcctgccaaaaaaagtgcatagcctgaatgcacagtgtggctccctgattagatcctggggtttaaaaaagggctgtagggcagagcttcacacctgtagtcccagcactgtaggaggccacagtgggtggatcgcttgagcccaggagttcgagaccagcttggggaacatagtgagacccccccccccacccatctctaccaaaaaaaaaatagcgtgtggtggtgtgctcttgtagtcccagctactcaggagggtgagggaagagaatcgcttgagcccagcagttcaaggctgcagtgagctgtgatcgtgccactacactccagcctgtgtgacagagacccccgtcttaacaaagcaaaacaaaacaacaataacaaaagggctgtaaagggcattattgggacaaccgcgggaaactggagatggaaaatagataacagcattgaactgatgtggtcattgtattttggtaatataggaggttcttgttcttaaggagttggataccgaagtatttgggaggggggtatcacggtatctgcagctaatggtgggggctgagtggggaggaaaaaagaaaaatacacatatataaacacagagggagagaaatgaaacgtggccagctgctcacccctgctgaacctaggaatctgcgtgctcactttacgttcaacttgtttgtatgctgaacatttttcaaaacaaaaaggtgcagggaaaaaagaaaacatgatgtctctctgagggccacagagacgtggcaaccagatcgctctgacagtaaggcctgttacccgagctgttgggtgtggggtcagcagacaccttcagctgccccctcctccagggctgcctcgccccaggtcatgccctcgcaacgtggcccgtgcgtccggctcgcactgtggctcagcttctccctttgcccagtcctgctgctccctcccctcccgtcctcgcacaggtgtgcccccctaataagcaggccacccagactccatctcgggtcactttggcggtctcccagcggcgagccttccctgacacccatgtgtttacctgatcgtttatggaggatcctcttcgccccgggacgtgagccctaggaccaagaactgtgtctgttttgctccttgcggtgcaccggcgcctggacatacgctccatcaatgtgcgtcgcgagccgctgaagccccatttgccgagggggaaactgaggcacgatgatccaggtgatgagcctggcgcgttctccgcgcggcccacgtggccactccgccacgccccacccccagctggtcagctgggatcccgaagaagcgccagaggctgcgcccacccactagggcccgggcgggccggtggggcggcagggcggggcctgggccgtcaatctcgagtccggccgctgccgaatggcgggcgcggtgggcccggagtcagctcaggctcctcgaccaatcacggggcgcggagccgccgggcgtgcagggtccgcctccgattggcaggcaatcgctgacatcatccgggggcgggcgcccctgccctgcgggtgactccgacccctggctagagggtaggcggcgtggagcagcgcgcgcaagcgaggccaggggaaggtgggcgcaggtgaggggccgaggtgtgcgcaggtgagtggccaaggtgtgcgcaggtgaggccaggggaaggtgtgcgcagtggggggcgcttgcccaggtgagcaggtgcccactcacagggcgagggtggggtcaggggtagggggcgtgcgcgcaggtggggagagggtccagctcacaggcgaggggccgctggggctccggggaggcggggcggaggcgtggatagtccccctcccccacgagccggcgtctgagggatgctctgtccccgcgctgtctggagcttccccgggcgaaggctgcctggctccggggtcggctcctggccccatgccgcgctccgcggcggctctttctcctgccccacctgttgttcgcctccctctttgtcagtgctgagccaggcacagcagctttgcgatgggactggcttgtccgccgtcctccctgacatgcggctgttgaagccctgagcactggaccttctgcctcttgcttgactcctactgtgggccttgagcttctgccctctcctgaaatgtcagctgcctgcggtcttattcatttttgtgttccttgcaggactttagccggttgagaaggatcaagcaggcatttggagcacaggtgtctagaaacttttaaggggccggttcaagaaggaaaagttcccttctgctgtgaaactatttggcaagaggctggaggtaagtgtatctcagtgccctggatcgtgggcgcaggctatggcttcacagcgttgaaagtacagacagactggtccaccagctctcgagtgccaacgactgtctgtgcctcttatgagtaaaatacaacataccagggcacctcccctttgtctgttcccagccgtctattgggaaggatgttacttagatgtttattgcacaactcaatgcttgtggctaaagagctgactcctgggtgaatgaactctgtaataagctaaaagtacttctttg

SEQ ID NO: 5199 - DNA, 6000 bp, Homo sapiens
tcggtctcaaaaaaaaaaaaaagagaagaagaagaaagaaaactaggtggagtgtggtggcttgcacctataatcccagcactttgggaggccgaggtgggtggatctattgaggctaggagttcaagatcaacctgccaacatgacgaaaccccacctctactaaaaatacaaaaaattagcacggcgtggtgtgtgtgcctgtaatcctagctacttggaaggctgaggcaggaatcgcttgaacctggggggcagaggttgcagtgagccaagatcttgccactgcactccaggctgggcgacacagcacaactctatctcaaaaaaaaaaagaaaaaacaaaagaaaactaatatatcaaaataatttctagttagttggattcactcacttattcattcaatgacttattgaattatcatatattactagtgctttttaatacataccttctacaatttttcaactgaaaattacttcattgatcagggctctttaaactgatctccatttgcattgttttactaactatagttattattcatgtattagcactctgagcctactgtaatgatgtgtaccttaataaagaactgaatatttgtaatggctggcagtgaatttagtagttcttgaatttagagctcaaaatatgggagtaatttgctgctttatttcctttgagaggtaatagaggaaaaacagaatctaataacaatcacagattttcgggaaagcactgtaaaaccatatgatcaattctagcttcttatgtaaacatggaaagattgccagctgaacacctgtcatgctctaagaagttggggagaatttgcatttttagaactgtgagcaaaatgagaacgactgctatgttcatgctttgtgaatttagctttatttcattcacacaattcatgggaaaaaatgcatcttttaactcggtgtttttcaattcaacttttaaaatacaggagtgggccagacccggtggctcacacctgtaatctcatcactttgggaggccgaggcaggtggaccacaaggtcaagagatagacaccatcctggccaacatggtgaaaccccatctccactaaaaatacaaaaattagctgggcatgttggcacgtacctgtaatcccagctactcgggagactgaggcaggagaatcgcttgaacctgggagatggaggttacagtaagccgagatcgcgccactgcactccagcctggcgacagagcaagactccatctcaaaaaaaaaaaaaaaaaaaaaaaaaaaaaaaaaaaaaaaccaggatgtgttaccaaggaaaattcatttacaatggttaattatgtgacaaacatgtcaagtaattccatctggctttgtgtcaccatttccccacccttttttcagaaaccaaaaccaagaagaagaacaaacatcaaaatggacatggaaattaacaaatatatgattcaatttaatctcctaagaggttttttaaaattattttattttgagacggagtcttgctctgtcgccaggctggagtgcagtggcaggatctcagctcactgcaacctccatctcccaggttcaagcgattctcctgcttcagcctcccaagtagctggaactacaggcaagcaccaccacacccagctaatgtttgtatttttggtagagatggggtttcaccatgttggccaggatggtctcgatctcttgacctcatgatccacccgccttggcctcccaaagtgctgggattacaggtattttttattttttttgagacagggtcaccctgtcacccaggctggagtgtagtggcacaatcatggctcactgcagcctcaacctcccaggctcaggtgatcctccatgtcagcctcccaagtagctggaactataggcgtgcaacaccatgcccagctaatttttgtattttttgtagagacagggatttgccatgttggccaggctggtcttcaactcctggcctcaagtgatccacccgtctcaacctcccaaactgctaggattacaggtgtgagccaccgtgccccatctcatctgctaagtgggtttaaagaaattcagtttcatgtcaatttttaaaatgtatggttatcaaattcgacttctttttaaaaatgcaatcagataactgtatgcttgtttgatgaggggaggaaagttaatatagccaatctactcaatatttttagcagaaattatcagagactaaggaaatgtttaagtttttctcatgttggttttaattacctaatgttttcagttttctctttcattcttgtgtctttttttcattttcagtgtttcaaatacagtttgtatttaaagatttagaagttccaaaactgtaagcacagtggattgtttcctgggatgatgttaaaattatacaacaaaatatatgaaactttgtcaatttggttattggcacatacaaaatatttacaaataaacgtgtgtgtgtgtgcgtgtacacacaattcaatgaaatagatgtgaaacaagttttcttttttttttttttgagacagagtcttgctctgtcgcccaggctggagtgcaatgtcgcagtctcagctcactgcaacctctgcctcccgggttcaagcgattctcctgcctcagcctcccgagtagctgggactacaggcacctaccaccactcccagctaatttttgtgtttttagtagagacagggtttcaccatgttagccaggctagtctccaactcctgacctcaggtgatctgcccgcctcagcctcccaaagtgctgggattgcaggcgtgagccacctcacctggctacaagttttcaaaatacatttatctgtacccatacattctccagtttgtccacaggacatcttatgacttgagcaagctgctaaaaatccaagggtgcagcgtttgtatgtctataggattgctcagatctgcccccaccctgaaagaatttaagagaatttcttgaggccaggcacagtggctcacacctgtaattccagtactgtgagagtccgaggtcagaggactgcttgaggccaggagttcaagagcagcctggacaacatagggagacctgtcactacaaagaataaataaattagccaggcttagtggctcatccctgtggtcccagctactagggaggcagaagtaggactgcttgtcccaggaggtcaagactgcagtgagctgagacccagccacctgcattccagcctgggcaacaaaaagagaccctgtctcaaaaaataagttaaataaataaataataaaaatagtttaaaccctaaacacatcttctttttcaaagaggacttcttaaggacttcatgctgcgtcctgttgatctccacttccctttttcagcgtccacacttttaacagtctcttttgccaaggataataagtatatagtttctggaatccagattcttccctgtttggacagccagggggacaatttttggtctgcaggcctttgcatctgttctgctgttgctcagcaatctcacagcaaatttgccgagcctctccggaatgcacagccagacagagctcagcgcaaaagctagagaacctggcggagggagactcacagtgccacaaaaaaactttatcttttctttttttttttcttttctttctttctctttctttcttgtctttctgtctttcctctctctctctctgtctttctttcctctctttctttcttttttcctacatggcaagatctcctcatggcagaaataatctgccttgacttctgtttccacgctgcttctgccaggaccatgcgctcggcgtgtttttctttccgctataattatccaggcccatcccagctctggtcccctcagctgttccctggcagtcccttctgctggtgaaaacacatatggcgccggcctgaccagggtgtaagtgtgtgaatatcaggaagatgactgaacgtctttgggactccgtttcctcattgtaaaatggaggttaataccagccttcttctactccccaaacgcacgtgtttgtcccggccagagggcccaattgttggctgttcacgcgtcagttacccccacaggacgggtcagccaattaaaggcgaaccaggcccggtccatctcctgacgccttttctcatcccagggctggacaggcagctggcctgggcccggctctgccttgtcacgtgcgggggccggcccgtttgcttgtctgtgtgtaggagcgtgaggtcacgctgggtgctcccgccccgccggggcctttagtgtcctggtccctaaacgccaggccgctccaccgggggagaaggcgcgaaccccagccgagcccaacggctgttgtcggttgccgggccacctgttgctgcagttctgattggttccttcccccgacaacgcggcggctgtaaccaatcgacagcgaggccggtcgcgaggccccagtcccgccctgcaggagccagccgcgcgctcgctcgcaggagggtgggtagtttgcccagcgtaggggggctgggcccataaaagaggaagtgcacttaagacacggccccgctggacgctgttagaaaccgtcctggctgggaaggcaagaggtgtgtgactggacaagacttgtttctggcggtcagtcttgccatcctcacagaggttggcggcccgagagagtgtgaggcagaggcggggagtggcaagggagtgaccatctcggggaacgaaggagtaaacgcggtgatgggacgcacggaaacgggagtggagaaagtcatggagagaaccctaggcggggcggtccccgcggaaaggcggctgctccagggtctccgcacccaagtaggagctggcaggcccggccccgccccgcaggccccaccccgggccccgcccccgaggcttaagccgcgccgccgcctgcgcggagccccactgcgaagcccagctgcgcgcgccttgggattgactgtccacgctcgcccggctcgtccgacgcgccctccgccagccgacagacacagccgcacgcactgccgtgttctccctgcggctcggtgagcctggccccagccctgcgccctttgcgccccccacgcttgttctgcgtgcgctgcccgctcttccatttaccttctctcccacccaagtttgtactcttttctttctctcggttttattttttgtttttgtttgtttgtttgagacaggctttcgctctgtctcccaggctggagtgcagtggcgcgatctcggctcactgcagcctccacctcccaggttcaagcgatccgcctgccgagtagctgggattacaggcgcccgccaccacgcctggctaatttttgtgttttgtagagatggggtttcgccatgttggccaggctggcctcgaactgctgagctcaagcaatccgcccgcctcggcctcacaaagtcctagaattttaggcatgagcctccgggtccggcctgtgctaatcctttctgtccttggttctttatttctcttctctctttttcttagtcccttttgttctttccctctcccgttcagttggctgtcgtttgagcctccaccttttcactccctcctttccaccacgatgccgagccctgccttggatggggaccatcagcgatgaccacaatgacctctcccttaccaggcagctccaggcagtgttcctgcaccgcctttcccagggcttgggggctttttctagtgggctttgagctgctcaatctggcctctgcagggccggctcccagcccttccaacctcctcacagcccgacctgggacctagccaattcccggagagtctctgtcccatcgtgaccccctcacaactctcccactcaccaaagtctgatgactgtgctagggggtgcttatatagagtactgagtgttacaaaagcagaagtctggatgagaaccaatttgtgatattaagc

SEQ ID NO: 5200 - DNA, 6000 bp, Homo sapiens
aaagtttggtagccaagcagtaggtaggtgctttatgtcacctggcaactccaggagctccaaagggccaaacagagagtgtattattcaccgccatctccctgagagttggatatgttcccagcatcacacatgggactaaacccagaggacaaatgacttgtctaaagccatgcaacaggagaagggatgaggattcaaacctatcctggaggtgacgctgcctccttctccagaggcacagaaagagtcagggctggggttcacgtcccagctctgctactcagagctgtgggaccttgagtttattccacctgaatgtagtttccttatccacgacatggggagaatgatataccccccatatggggttgaggtaagggtcaagcaagataaggtacgtaaagcgctttgtaaaccaggcagctctacataaatattaaccaaaggaccaaaagatgagagaaaccagcgtcatccattggtggtgccatatcctcagtggtaacctagctgacttcttcctctccaggacaagagcgaagccaccaggggagctctctcccaaaggccttgtcgccccagacctaactcgctccccctcaacctgcctgaggaagaaactctcaggattgcacggatattttcttctcagtactcccagaaagactgacgcagcctgaggggctggggggaaggagacacctgcccaccctccgtcagctttgtccagcttgcaggaggcaccaggtctggctccttcagggctgtcacagtcctgaaaccaccacttgcctaggccacggatgcctcaagagacccggtcagcccagactggaggagtgccccaaaccagtccagtgtccacttgccagaatttcagctccttttttctgtggtgaggcaaaggctagaaataaaatggaatccgcgcccaagtgggacccaagcaggcatctttcggtggagaaacgccccccagtgtccttgacacagctgactgctggcatgagcccaccctctgcctgaagatgcaggaccatttttgccttaaaagttggggaggagggacatgtagattgtgtgcattgtgcatagtcaaggaaatcctagggccacctccagttcatttgtgtgggaacaaggatattttatagatacaaattatttttatgctgtgttgaattaatcaattaggagaggaaggggaaatcacttccttcaaactttttatctgattgtctaaaattctaaccatgcttttaacttattatttttacccagctctgaaggtcattgttcttgcctgtgtttgaataaaatcatattggtgtttgtaatctgtgcacaagtgtttcgctggagtggggatgctaggaattcgtgtgtgccctaactgccagagagaaagattaacaaccatacaccccacgcagacgaagatcaatcaccatgagacttctggctcctccagaatcaggttggtccagatgacagtgacacccagtatttcctttgctgatgcttgaaatccatcagacaaagccccgtggggaggacaagaaaagggccatggatgggtgcagtggctcacacctgtaatccaaacactttgggaagccgaggcaggcagatcacctgaggtcaggagtttgagactaccctggccaacctggcaaaaccccgtctctactaaaaaaaaaaaaaatacaaaaattagctgggcgtggtgcacgcctgtagtcctagctactcaggaggctgaggcaggagaatcacttgaacccaagaggtggaggttgcagtgaaccgagaccacgccactgcactccagcctggacaacagagcaagactccgtatcacaaaaaaaaaaaaaaaaaatggggtcgcgggagccaaatgtgcagagtgagcagtgtggctgggcaacaggctttcacccccaagtacatgtcacttcactcagtcctcaaaacagctctctaactctagatattatgatatctagagtttctgtaagttcagtgttttgcctctgtttgtgtagttaggaagtgattaaccacacaagaaatcccagaggtattgcaaggctactgctttcagtaatcaaaacaaggtacagccaataagtgctctgaatttagggacttcatggagaaagaccatgtgggctggggcagtcagggaaggcttcctagaagagacaggtcttggggtgagcacagagaattggcccaggctgtggacagctatagagagagagccaggaaagcctgtgagcagtgtgcagctggagatagagaccagtctcactgcgtctgagcctctgtggcctcgtctgtaaaacagagataatcaccccagcttcatggggttgtgaggaagatcaaatgagatgacatttgtgaaagtgcttcgcctacttttggcacatggtggaagcttaggaaatgtcagccccacccactctcctgactttcgggagcaaaccagtagagaggcaagcatgcagccactggggcaggcagagcactcctgggcctcagagggtgcaaaatgatgcgggaacctcaaggaaggagtgggtgctgccttcttggtgacaagccctcccgcttctatttatctctgctccgacgcctgccagcccacccctccccagcaccacagaggccagcctccctctcaagtcaccagcacagagcattcaaggcccagggccccacttcccttggggcccaggggacctaaagaggggcagtcagggcccaggcctgagggggaaagccccaggtaaagaatattcctccaaatcccactccagctcccgcagacaacctgatcggggtcaggaggacacactcctaccccaggctgagagcagcctctgataacacaaaaggaccctgagggtggagacctcccacctccacttcaaaacagtgtgttatttatcaatatcttatccccggaagttgaatctatctcccagtgccaactccgagataaatgacttgaccaggcgtgtggcatggattaaggcatgagataggtgttcccaccaccagaacgagccagtggctgcctctcttccctttgagccctccctccacagagacctgtgaataggtgtttctgatccctaggctggttgcatcccaacccagagcaggcagccttcggacttctagcatgggctggcctcaggacatggagccaaagcaggcagacctggccctgccctcaagctcccaagctaaagagagcctggccctccctcccactaggtttctccagagcctgctgcctcctggtttgggcttctactctattcttcccccacagactccctgcaatttactgcatcacctctagactagcaattacagatggagctcagaacctacttcctgagccttcctaatctcagcagccctgacagccacttccctcttaacactaatgcagctgcttattctgctgacattaaggtcagggcctggtccaaggaagaggacaggtacagcccaagctttgcacttgaacatccatgcttctgaccacctgccctgtgacgctggctctgtgccccagtccagaaaagacttctgcctactcctcctctgccctacccagttaactccctttccttccctcccttctgcttctcactcctcccctcccttctcttcttcttctccccttcccccatcacctggggcccgattcagctgtgcccagcccttactctgagtgcccacagatggagcctccagtagcttctgtggggcacccttccaccaggtcccagctcccttggctccagcagtgtccatgctaaagcctccaagtgtcatgttggagagaatggtggtcacagtagataagcccaaaatgccttacagtttacaggctggagtcaggccccgccacgtgctggctacatgacttccctgagattccatttcctcctcagtaaaataagtggtaagattttaggatccccagcactaaaaagaaacgaaatactgatacaggctccaacatggatgaattttgaaagcattactatactaagtgaaagaagccagtcacaaacaagcacatattggatgattccatttctaggaagtgttcagaacaggcaaatttatagagacagaaagtagattgattagtggttgcctgaggctggggagcgggggaagggaggtgactaccaatgtgtatggagtttttccagggtgagagggtgatgaaaatgttctaaaatagattgtgttgatggttgtgccactcagaatatactaaaaaccatttgaattgtgcacttgaaacagatgaattgtacggtatgtgaattctatatcaataaatctgtaatttaaaaaaaaaaaattaggtcgggtgcagtggctcacacctataatcccagcactttgccagactgaggcaggaggatcacttaagcccaggagttcaagaccagcctggggaacacagcaagacctcgtctctactaaaaaattttaaattacaaaaaaaaaaagtaaaaaaaatagaatcctaatagtacctatctcataggattgtggaaaatagtagtaatgtatgtaaaatatttagcacatagtaggcacaaagaaatgacattattattaagagacctgggagagctgtgcccagcctatcgtgggaggccttgacctttggactcaaaagtggcagcaggtccacccccccatacacccttgtcaccaaggaagcgtccacagcttaaaggagctatattaaagcaccccaagtcaagaggactgaaccagatctggaactcactcacctcccctctcacctcactgccctcaccagccagcctcttgtcaagtgatcaggctgtcaaccaacttctctaggataaggtttcaggtcagcccgtgtgtataagaccagtgccaagccagaagcagcagagacaacagtgaatgacaaggaggggccatccaatccctgctgccacctcctgggatggagccctagggagcccctgtgctgcccctgccgtggcaggactcacaggtaagacccctttctcctccctcatcccttcccctctccctctcccttctccttgttctccctttcattggaggctttcagagagcagccccgagcagtcagggctcactagctgcagcttgtcagacctgatagagattcagtccagccgccaccttatgaaaagggagctgtggccttgatgagggtactgtggcagggctggggcttgaacccaacacccgtgtcactcactcaagactcacaccccctttgccttgctggctgcctctggtgggattttgcaaatccccatagacaggaagtggctttcttctttgcctgccccagaatctctgcgattcctccagagcataaatccctctctttccatgaggaccctggggccctcttcctgagtagggatgacaggggcacttctgacctgaggcgtggtccaggtcatttgctgggagctttacagagcccatggtctctgcccagacggcttcttcagtgggctgctgtgaaggctttgccgggagggtgggttggagttggggaggcaactggtgttgggtaggatgtctcaaaatggggtcctcttcccctgcttcagagctaccacagggagttttcctaatgcagattcctaggccccaccccagacctaaatcaggatctctggggctgagagctgagaatctgctctgtaaacaagcagctcaagggatccttggctctccctgaagtctgagactctctgggcagtgaaacaggcgcagcttcagatgtcagacaaacgtgggcaccaatctcagctccagcacttcagctgtatgactagcaaaagccctggaagcctcaggtccctggtttacgaaatgagaataataatagcaactacttgtagccttatgaagggatcaaatcagtcagtg

SEQ ID NO: 5201 - DNA, 6000 bp, Homo sapiens
tgctgttggaatcagaatgagacgcacatcttcagacacctcataaacacatcagtgagaaggatgtagcactccccttagagagggatttggaagagagagaagaagaggggatagagaagagggaacgagctgatttctgggctgtagcatttcagatttggggaatgcaagggattaaggaccaaactgacaagccaggaggagataagaccctgaaggcacagacacgggctcctcatgaataatagaataaagtaacttgatgtgactgtgaaacttcctctgtgagtcacactgcatttccccctggtgacccagtcttctgaaactgttgacaggtaccatccacactcaccctacctctcaacattttccccccacttcctagaccttaagttaggaacatcaaatatatcagagtcatctggttaggcgttactgaaaaatcaagatgtaactcaagggataccaaggtggaaaagaaacaactggtctctgttctcatagcgcttccagtccaatgggaaaggcaggccccaaacagataaacagaagattgggttgagttctatgaagaaaacaaacagggaactggatggatgatggtgccattgactgagacataggaaagtgaaagggaaagaagtcaagagtcccagtccccacattatccaaacagagacatcagggaggttgttggatatgggagttcgatgctcagaggaaaggtttggcccagaggttgaaaaagtctcctactgacctttgaggctctctcaggttctatctcttcttggaagctttctctgataacataattcctagggatcttccctctcatgaccattattcactcactcatatattcaacaaatttttactaagatctcctctgtgctaggcttggtgctgggaatggcttagtgccctcaatgaatttatgttctaggtgtggagtcaaccaatagaggagacaattgtaacacagaatggtaagtgctgtgtgagaggaaagcccgaggggctgtaggagcagagaaagtgggcttctgtgccagccaggtccttcaggaagaagatggccatctcatatggataattcaagaaggctctattcagagatgggcagggagtggggaaaccacaggggttgtgaggtatcctggagctgaaagcacctgggcatcactaccacccctaggactgaagaggaaagagaaggaggtggttacaggaatccagactcagggagagctctaagatagggctgagggcagcgggagctgtgggcctcagttgaagatgcagcaagaacaacaacaaaagacttttttttttaagtaagtgaaatatatcagaatcatctgttaaggtgttactgaaaaacaaggcaggggatggaggtagggaggcaggagaagggaggaattagcatttatagattggatgctcagggaaggcctcaccaagaaggtaacatttaagccaagacttgtttgtggcatgtctctaggtgagtcttcccctcatcccttcaatcagctcatcctaccctcaaattccatccaccccactcccccatcttcccagggtcagggccatgtctccaatgtctttggattagggagctccttgaagtccctgtcagactagagatccccagagacaggaactctgtttcctcctgctctttctcatccagtgacaatagaagctgccatttattaagcctatgcctcatgctaggcccggctccaggcatattaaacgcatcacttcatctaagcctgctggcaaggctccagggcacaggtggggaacatgaggcagctcagccccctttccaatggccagctgccttccctgacatggttgctgccttatcctcaccccagagaagggggagtagaggatagaccttaaattctttttttttttttctttgagacagagtcttgctctgtcacccaggctggagtgcagtggcgcaatctcagctcactgcaacctctgcctcccaggttcaggcgattcttctgcctcagcttcccaagtagctgggattacaggtgcatgccaccacacccagctaattttttttttttaatctttagtagagacggagtttcaccatattgagcaagctggtcttgaactcctgacgtcgtgatccgccacctcccaaagtgctgggattacagacgtgagtcaccacgcccagcaaattttttttttcttgagatagggtctcactttgttgtctaggctgtagtgagtgcagtggcacaatcttggctcactgcagcctcaacctcctgggctcaagcaatcctcccacctcagcctctcaagtagctggtactacaggcacatagcatcatgcccaactaatttttttattttttgtagaaatgaagtcccactatgttatccaggttggtcttgaactcctgagctcaagtgatccacccacctcagcctcccaaagtgttgggattacaggcatgagccactgctcctggccgaccttaaattcttgaaagactgtaaaagggaacacagatcagacttctatttcatgtctccaatgggtgcaaggaccaaagggtagaagtcaacaggaagcagtttttgttaaaatgtgagaacatcctaacaatcagagctgtctggctgccttgcaggcattgagctccctagaggtgtgcaagagaagctggatagcctcatttcaaaaatgaaatagaggcagagtgtggtggctcacacctgtaatcccaacacttcgggaggccaaggcgggcagattacttgaggtcaagtgttcgagaccagcctggctaacatggcaaaaccccgtctctactaaaaatacaaaaattagctgggtgtggtggtacacctgtaattccagctactcaggaggctgaggcacaagaattgtttgaacctgggaggcagagtttgcagtaagctgagatcacaccactgcactccagcctgggtgatatgtttccaaaaataaagaaatgggagaatctgttaggctcatgagggatttgactaggaaactcttgagagttcttccaatttacattccagaaccctaagatgatatgattctaagactttggttctaagattttattagaacaaaagacaatccctatcttcaaagaactcacaacctagcagatggggtggacaaatggttactttctataactgtcatagacagtcctacagagtaaatgcaaggccgtgggcaggatctgagaaagaaccctgaccaagccaggactgcttcctcatggctagtctcaagaaccatttgcatcagagtcatttggaaatcttgtttgaaaatgctgatttctaggctctactccagatttcctgaattagaacctctggagtggagcccaaaagtctacttagtaaaacaagctccccaggggattcttaggcagattgaaaactgaggttgcaggatgggcacagtggttcatgcctgtaatcccagaactttgggaggtggaggtgtgcaggtcacttgagcccaggagttcgagatcagcctgggcaacatggagtaacccaatttctataaaatacaaaaattagccagacatagtggtgtgtcccagttactcaggaggttaagggaggaggatcacctgagcccaggagttcaaggctgctgtgagccataatcactccactgcactccagcctgggtgacacagtgagatcctgtctaaaggaaggaaggaaggaaggaaggaaggaaggaaggaagaaagaaaggaaggaaggaaggaaactgagattgcatgcttaggtgattaggatgacttttctgagaggtgatctccagactgagaaaaaggaatagtagggtcaaaacaaggtgggtacaatatacccaccttgtatattgtatacaatatacaatatacccaccttgtagtaggtctttttaaaacgatagcacttcttagatatattctgggattctgtaattgagagtatgtgcttcagatatcctggagcagacctttgcaagggagtgaaagagctggcctgaggctgttattaattattctgaggcagtgagctggtaaaagggcaccccacagggtcccccggagaaattctctgcaactgtcccttcctctgccactagcctcctggctcttattcctcagctgccccggctgccccagttctctgaagcctgcaatgtcaccagcaaggaaacaacagtttgagtgagggcatggtggtgggaaaataaactgttctgggacagagatgagtaaggtgcggctgaacacaagttggtcaggcactgtcacgaacttttgaggcttggtggaggaaacatttgctggtgctactcagagacagaggggtgtgtagtggattttgggtctgggctctgctacctgggcaaatcccttctccaactgggcctctgcgtcctgtgtggaaaagagtttgtgtaagaatcatattattttgctgttgaccctttggttttaatactttggactcaaaggtctcatctgacctcaaccataagcctgtgaagaatgcatggaggaactgtaccaactttacagccaggccaaggcccagtgaggggcagcgactcgcccaccaccacacagccacactggagcaaaaccgactcctggagatcggcctcatgctgggcttgctgaggcccagcggagcgagaggctttcggtctctggtccaggaagcaggcgctgcaggggacggaagggtcggagcccacagccgggggaggccaaggagctgggcggaggcactccaggccagcccggggagaagtgggtgtgctggggcccgggcggggcagggggaggggacgcccgggggagggaaaagggagccgagcgcgggtgggagcccagagccagagagcgcgctgggcggtgctgggcacccgcggagtggaacggggctggtggaatgcacagggtcgcagcgcttgggccaccctcggtcagagggcgccgtgtccagcgagcaaacgggcgccccggagccttgctgagaggcaggtaaggcacccacccagctgggaaggctgagctgcggcctggggtggaaatgaggggtcttcccgcctcccttccaagggccacggcgcgctctccgtgagactgtggaaccgagggggagtgggggaggggtgggcgctgcaaataccaagctagtcctcccggatcctccccgatcctcccgagcgcagtgatcgtggagcagcatgtgggagtagggagctgggctctgcgcgccccgtctggaaaccgtggggacttgcgccgttattcccagccctcaagacggccacaagaaaagttcctccacacccacagacgtgcaagcgaacacttgcagctggcagccagtgcacacgcagaaacgacatttcaggacccagcacagtctcatttggctggagccaccggctctgcggagctgacttgcccattccctctacacctcactgtgtccttcaccctgtctgacctagtcccgggaaacctggtgactcccaaaagcatcttctgctgccagtaacataggtcgaggctgggagtcgggagacttgagttctagtttacaggctgtgtaaacccgggcagtcatccctcagctctgcgccttgtgctcgcttttcctgggccaccatttgtaaaacgggcctcctgctcctgttgcctgcataccccatgggacagaaggggaaagggggattggacctcagagtctcttatctcgaaaataaatgagtttagttcttgcgtgaaagcccaccagagtatccctcctaaaatcctctccactaatttgcatatagggaaactgatgccccaggggagatgatttacctaaggttacaacagagaccaaacagaattagaacccaagtttcctcagtcctagcccagggctctctcc

SEQ ID NO: 5202 - DNA, 6000 bp, Homo sapiens
aagaaagattaataatcctgttaaccataacctttacatttcattccttcatttctgcgatgcagtgagggaggggctggcgttatctccacttcataggtgaaagctgggcaactatgacagcaggggccagggcctgccccgagccccaccgcagagcctgcctgcccctcatcatcacggtacttccctggagcagtgcgtctcaaagggtggtctgaggactggcagcatcagcgccactgagggtttgctggaggtgcagattccgggccccacctctgacctactgaaccagactctctgggatggggcctggcaatctatttagccagtcctcagggattctgatgcttgccaaagcttgagaagaactgggctagacctctgaagaggttgctgtgtgaacccaggagcaccccacgtgaggcctgtggaagaaagtggaggaggagaataagaccttcggcccactgtgtgacctcgggccacgtcctcaccctctctgggcctagaatctgtcatatttcttggcatgggattagaggaggctgggaagattctctgaaatttatggccacctctcctcctctatgccagcacccggctcctgtgagtggtgcttttaggagctcatgtgtttgcagccacctcatcctggccttggctcgttgctgtttttagtaccttggagatgacactttgtgacctcacagaccataaccaaagcccaaagtgataaacactggatcatcaagaaaagggtacatcaggtttaacctttaagcagttaaaacagaggaaaaagttgcatggctcaaaggcacaagacctcgggttcccagcagcctggtgctgcagaaagctgcggtttcatggtccacagctcagcacagcatcaggttgtggagacacttctgatcctgccctgcctggtccatccccccaactcccttggggcctctgggagcctccagtcccttcagtcacagtagtcactgacgggactctgaaccaggagcctttcgtgtggtggctgcggggtatatggggtctcaccagcacctgcttcccctgccttggtaacgctaagtgctgccatgagggggtgccttgtgcctccatcaagaacagaaaacccgcagagtaagtcctcattctctggccacgaatgaggacttggagcctgaggacttggatgggcatgcccactgtgtctgctgtgtgaccaccagcaagtcatagagtccctgcaggcttcatctctcttctgtaaaaggggggcagagataggcctcccctcgtcagatggctatgggcaggggataagtaaagaacctggccccaggcctggtcctgcaagcccttgatattcccactcaagagaccagctactccccaccactgggccattcataacatcctcctgcccctccaggaggtggcctagagctggtgtggcctgagtccatttgccctagggagaaagggaggggagtcaggggaagaactggggaacccagggttctgccctagaaggcagggcccagaaggggctcgtgagggaactcccagactctcaggggcccatgtgggtgctgggcagaagcagggagtgaggacagccacatctctgcactgagacctggcctgaaaatcagaagacctcggttcaattactggctccatagctgtgctgtgtgactttaggcagttgcttaacctctctgagcctggtcagtaattgagaataaaggtctctgagtttcctggtcagtcattgagaataaagacacctaactggaaggctgtctatggctgtctttactctcatttgccacatgagatgaaggactgacccacagtgagggttcagcaaacagcagtggagactaaattgtcagtctagggtgccatggtcctttccactctggctctacagttagatcaggacagcaaggctcagagagttttagcagcttgtccaaggtcacacaggatgtgcacatcatcacctttctgggccacttgctcctgcgtaggaccctcaggtttcaatctggcctgaggtgaaatcctcccagggagctttgagcctgacttggtgcccgagtgggttttttcattacagaatggtagtcccgaggacacaggaagagatgcatctcttatattttcactgacaatgcatgaaggaatggaagcatttccacaaaaatatcaacaccatgaagactgagctgtctgctgatgggctgcccaggagaactccccatttctggaggtgtgccagcagaagctaagtgacactggatgggaagttggacttggtggcctttaaaagaccctccacatggctgcaaggcaagcctgagtctgctcagtttccacccactcctcctcctgcagactcaagctctgcctcctagacttggccttcaaggcctctggactcaatcatcctctgtgctctcatctgtctctcatctggcctgggagctccaaaaaagtaggcattgggcatttttattcagcaactgtcctgggcccaccagaggagagaggtcatgtttactgagcaaaggcccccgcgaccaggaacttcacacgtgtcattacaggccatcctcatacacccggtactgtaattagtttcactttgcaggtcagcaaaccaaggtcaggaaggctgagcaacctgccaaaagtcacacaacaacatgactgccaaagaagtgaagagatgaaggaaggggcgctgagcctgtgggcttcccggcttttagcccctggtccccagaggcatctgcagcaggtgggcacgcttggttgcccatctgcctcaaatgtgggggagccccatccgggcactgagtaaggtggaaccccacgagctgactaaccacaaccacagcctctgggggcgggggagtgggaggtggggcactcacccccagcccaccatagccccagccccgccctcctgggccctagcagaagctctgccatggcccagtgatttctgcttggtagcagctccgggaagggtgaggcagtgctcagcgagcctgggtctggatggctgggagctggtctgatacacaaggccaggaactgcccgaatgatccagtcactctgctcatactgcagggcagcttcaaagcactttcctgaacatttggccccttggacagggacctggaaaaggaagcccacaggatataggagtatccaccaactgccacaataaaggcagtgagaagttgcctaacaaccactgggtgcaggctccagctggatccattgcacttagttctagcaccaactccaagtagtagctactatctttcccactttacagataggggcactgaggttccatttgaccaaatggagcactagagaccagagagggggctggatggaccagctaggaccctgtggacatagatctgaggccttgggtggctgggagggaagggaaagaggtttggatacccttcgcaggccctgctgagagattccttacctgcacctcctgcccatcccctcactgcagctcaggcctcctccttagggaagccttccctgatttcctcttctaagactaggtcaggcccctatggcacctgctatcatggcttgtcctctctgggttgaccccatctccccagatccatctccacagtggactgaacaggggtaagaaaaggcagtaactgtagagacttcagggaatcccgcttctgagcccagccttaccctgatttgccacaaggccctgggtggtcactttcatgcatgtaaaatggggcaccctgccccactctcagggctggtgacgatcagggaagagaaacactgtggaagaggccccttctacacttggaaccaggacctggaggacagccagggcccctctcttctagggacccgcatactagagtccacaggcagcaaggcagggtacctgtgatttggtagggtcaaggcatctagaagagaggtggctttgggaaagatctgcttcaacctccaatctaaatgacaataccgccaccccatatttgcacagtactttaaaaattcgggcaagataatgcccaaactgaatcagacttagctttatgaacagattgggctcaaatcactgattcttattagctgtgttgactttggacacgccatttaaccttttctgagcctcaggttccccagctataaatagggaccttactagtctcagacaattggttttcatgtgtacacactgcccccacccctagcctcagcttctccatccgaaaacaggactttgatggtgccgtttcacaggctgttgaagggtcccgcagatgatggaggagtacgggtccagacactagagcacaatccggagaggaaaagtgacctgccaggacccaccagagtggacggcttggtgcggggaaccccctccgcggccgccccagggccagcgaagggtcatttccttccgcattcagccccgccgtcacctcgcctgtttgcccccgcgttaagtgcggcggcgccagcagctgggaaatcggggccaggccggatttcctctgtggacctgcggctcctagagccaccgcgcccccctccggaccccgcggggccgcgaactgcacgtgcggcggccgctgggatgggcctcgctcccacggcgcttcctctgcaacccctctccctcccgccctctcatccccccacactgggcccccgccccttcccggccgaggtcccagggtggtgaagatgcttcgccgccccaccccactccgcccccgccggctccggataaaccgaggcacggggccaggcgctaggaccccacggcctcgccagaggggggcgtggcggggcgggccggcgggagaggtatttaaattgcagccggagcgcgggggctccggtggggcagctgagcggcctgctcctcctcgggccgtgaccccggggtctggcgcggggtgggacccgggggcgggtttgcgcaaaatgtgccgagactgcccgggagaggagctgcggccgcgctgagccaggtaggagccgccgggcaggcgaggctggccggccctcggggggcgcactgtcgcgcgcctctagcgagcgcaaggcgggggctggtcccaagggacgccccccaaacactcccctcccgccatccccactgcgcgcgtggagccggggctgaccctccctcggtccctgggagttccccagcgctcctgtcttggcggatctttcccgcaaaggggtgaggccggccttcccatttgacagctgggaaaacaatggcctgaagaccgtgacttgcccaggaacacacagctaggcaagggcaaaccggaatttgaattcaggtttcctgcaacgctccgatcccagccaggcgtggggctgcccatcccacagcactagatggcctgcccatttctcgtagtggggtagggggcacccaccgctctccaaggggctctgaacccagccttcttcatgggtggtaagatgtgaggggcccccacccccacgccgagctgcctgaaattccgccatcacagccacattcctttgggttaaggtctaattcccccgtgggatgcacatgtctccagaacgaggcttgcccttagtgattcactgcttgacaggaacgtccgcagcagctctcccaggaccccactctgccagtaagtcagctgaggccgagaggagggagagaggacctcagaggccagactgtgagctagtctgccctgctcctgcgtgtgaggggtcgttggcagggcttagggaaggagaccttgatttggtatagtgggaacatttgctttggagacagatgaactggattctgatcgtgaccctgctattttctccttgtgtgactttgggtaagtcacttctctgagcctccttttcttcatgggcaaaaaaaagacagttctattgggggcagtcggctcagc

SEQ ID NO: 5203 - DNA, 6000 bp, Homo sapiens
ttgtagcaaagtttggaactgactagtttgctggggtggtttgaacagcgggcttatggggtccttttgttttatcctaaggtacttctctttatgacagacgcatacagaaagacacacaaagcccaccagattcgctactgtttaacaagagccttaaaatcctttgttgcattaagaaaaactttacagaggatataaacagtgattgttatcattcattcaactggtttgcacagagagaggacagacatctgattggtaagaaatcctttcacttttgctggttgccttttccctgagttgttctagtaacctggctcactgcactatagccctgggggccaagttgcaacacaaagagaatttatctttttccacattggccagagcaaaatacatgtgacaaaacatagacattagccactccacttagcacccaatatcaaacgggcaagactcaaacttgcccctggatgggccctgtcatctttaaatctttttagaagcttctgcatattaataggcatccctagatgagactaatttgggagccctcatttttaaatgcacttcagtgcattgttgttcagttgaaactttccactgtaagttatgtttagtaaaattttgccatttctgtaaggctctgctgcttcccaggcctaacacttatgcaggtataagctggaagaaactcagtcctccagaaattaaggatctatttttacctaagatattggcttcactttcagtttcccttgatcagcttagccaatgattttttcctacctaagcaagcaaaaaaaatgaaataaaggggaggaacagaaaaatccctgtgaattttcaaaagccaaattttacaaccccaacaataccaccacgtactaccagtttctttctggcctagtcagatataaaaggcctctaactggattcaagccagttaattaccagatcaaatttgatcctggacccagtctagtttctgtcgcaacttctaaacctagtttggaaaagaaatttgctcaaagaaactcagagagctggccgggtgtggtggcttatgcctgtaatcccagcactttgggaggctgaggtgggtggatcacttgaaggtcaggagctccagaccagcctggccaacatggagaaaccccatctctactaaaaatataaaaaattagctgggtgtggtggtgcatgcctgtaatcccagctactcaggagggggcaggagaattgcttgaacccaggaggcggaggtcacagtgagccaagatctcgccattgcactcagcctgggcaacaagagcaaaactctgtctcagaaaaaaaaaaaaaaggaactcagagagctcaaaacactaatctgtggagctctgaaatctgagagagaacttaccaggaaccccagctgctgtgacagatcaaaggacacagtggattctgcaggtaacttgcttgttcactcagcactcctggggatcgttacaacctctacttcagatcccacttctgacaccatctgttaaaagaaaaacttcagcagaattaaatttcaaggagtttaattgagcaatgaataatttgcaaatcaagcagcccccagaatcacagcagattcagagagattccagggatgcctcatggtcacaacaaatttatagacaaaaaacaagagaagtgatgtacaagaattggaagtgaggtacagaaacagctgggttggttacaggttggcatctgccttatttgaacacagtttgaacactcaacagtgtatgagttgttgaagtatggctgctgggattggccaaggctcaactattgttacaggtgaatactcctaagttaggttttcaaagttatctccctattaacttaggttacagtgcatccacaaggactcaaatatagaagtacagagccctcctcaacccatatttaattcactttaacactaccaacaaactagtctacgttaaaggaaaaaaaaatttttttgagatggagtcttgctctgccacccaggctagagtgcagtggcacaatcatggctcactgtagcctccacttctgaggctcaaatgatcctctcacctcagcctcccaagtagctgggatcacaggcacatgccaccatgctgggctaatttatttatttattttttggtagagatgggggtctcactatgttgcccaggctgatctcaaacacgttaaaaatttaatgccagcctaactgttgagaagatagaaacaaaactaccccacacatcctgtcctccagcctcagcagtcctactgcaaaggtattaccatactgagtttacaaggggatttacttgaatttcacttgttctctcatggccaaattattgctcttgagtttaatgcctcaggtctctcatctgtaaagtgggtcaataatagtaacttcacaaacttgcaaagagtaaatgaagagatgatgcaagcaaagtgcaggtaaagtgcctggaagagagcctggcacagaacactcgttaactttagctaccattatgacgattttggaagtctttcttcctattactactatactctttagtgcctaacgaagaaacaaaacatcaattgcaattttggtggattaattcctttccagtcagtgccccagctccttactgatgtagctagctcttcaccctgcccttattaaccctttatacttatctgcccacctgacacgtggggacgtggcttgtgcactagggcagtataaggacctagattgatgtatgctacttggttgtgtatacctgagatgtgaacagtcccaggagatggggacggggtggccagatcagaacatcataaccgagttgggagacttctgagctccagatgagtggtctctatgtcctatgcatcctttggcaagggactccatgtattagtctttctctctttgtttttttttttttttttttttttttttgagacagtgtttcgctcttgttgcccaggctggagtgcaatggcgtgatctcggctcaccgcaacctccgcctcccgggttcaagcaattctcctgcctcagcctcccgagtagctaggattacaggcatgcgccaccacgccaggctaattgtgcatttttagtagagacggggtttctccatgttggtcaggctggtctcgaattcccgacgtcaggtgatccgtccgcctcggcctccaaaatgctgggattacaggcgtgagccattgccaccggtgtattactctttctctattgcaattcccctgtcttgataaataggctctgtctaagcagcaggcacggtgatcccattgggcagttacaacagggttgtatgtaactgggttacagggttgtaacagggttgctgctgtaatggcccaatgggttcaccttgcctgttgcctagacagagctgatttatcaagatggaaattgtaacagaaaaacagtaattcacgcagagctgctgtgcaggagactagagtttgttgttgttgttttgagacggagtctctctctgtcgcccaggctggagtgccaaggcgcgacctcggctcactgcaagctccgcctctcgggttcacgccattctcccgcttcaacctcccgagtagctgggactacaggcacctgccaccacgcccggctaattttgtttttgtatttttagtcgagacggggtttcaccgtgttagccaggctggtctcgatctcctgtcctcgtgatctgcccgcctcggcctcccaaagtgctgggattacaagcatgagccactgcacccggcctagagttttatttttactcaaatcagtttcccagagcattcagggatcaaagtttttttgttttttgttttttgttgttttttttttttttttgagacggggtctcgctctgtcgcccaggctggagtgcagtggcgctatctcggctcactgcaagctctgcctcccgggttcacgccattctcctgcctcagcctccccagtagctgggaccacaggcgcctgccaccacacccggctaatttttttgtatttttagtagagacggggtttcaccatgttagccagaatggtcttgatctcctgacctcgtgatccgcccgcctcggcctcccaaagtgctgggattacaggcgtgagccaccgcgcccagccagggatccaagtttttaaggataatttggcaggttggggaaggccagtgagtcaagagtgctgattggttgggtgggagatgaagtcacagggagttgaagctgtcctcttgcgctgagtcagttcctgggttggtggggagggggcacaagatcacatagccagtttatccatctggtggtgccagctgatccatcaagtgcagggtctgcaacatatctcaagcaccgatcttaggtgcagtttagggagggtcagaatcttgtagcttgcagctgtaatttctaatctaaaccataatttctaatcttgtggctgatttgttagtcctacaaaggcagtccagtccccaggcaagaaggaagtttgttttgggaaaaggctgtcatcatctttgttttaaacttcaaactgtaaactaagttcctcccaaagttagttcagcctatatccagcaatgaacaaggacagtttggaggttagaaacaacatggatttgggtaggtcagatcgctttcagtgtctcagttataattttgcagtggtggtttcactgtgacaatcctgagggacttcccacagaaccctcagttattgaagcccaaagcctcagaaatggcgaggaagaaggggaagggtgttgcgcggtcaaactccacacgttcttagccgacctccgccgcttttcctagaatgtctcatctctatggtcgacggcgttcagattccggggcagactaagttgttcttccggggtgactgcctcttccagggcgggcggtgtggtgcacgcattgctgtgctccaactccctcagggcctgtgttgccgcactctgctgctatgagcttcctcaaaagtttcccgccgcctgggccagcggaggggctcctgcggcagcagccagacactgaggctgtgctgaacgggaagggcctcggcactggtaccctttacatcgctgagaggtagggttcctggtccccagcgctggcctcctgcgcgccgccctcctccttgctggagcaggcggtgcgaaggagccgggcaaggggcggcctggaggcctgctgggagcggggtctcgtgcccgacgcctcagggatacctgtagcgggtggaaggctcgatttttctagtactcctccggagtcttccattctctgttttctccggccggaatttccccttatggattgtgctttttttttttttttttctttttttcctctttctctttctctgtctctttctctctttctttcttcttcttttctttctttctttcttttattttcttttttttttttttttaactcgcctatttactggaggtctggcgcgtgcgttgcccttaacgcacggtctggttttaagggtctgaagtgtgcctgtctttccggatgaacagatgcaggagatgttcccctctctgggatacgtagtttcagagccgactgtggaggacttttaaagtttggttacacaataaagattttcttctgtaggtatagtaaggagaggaacacccttaactcgacacagacaggggtcatatgcagagggaccagactcccgttttggggtcctggaaggaattgcccttttatttggccacgtggagcactttggtattttgacagtcagatagatctaccgtaaatattgtggttgtagaacagaggtccctgtttccttgacatgcagttttctttattttgaagcctgtaatgacacatcgaatctttcctgcccttcagatatgtgttgcttccccttttgctccatcacttgtctacagccag

SEQ ID NO: 5204 - DNA, 6000 bp, Homo sapiens
ttataggatgtccctctattgaaatttctctgatgtttttctcatgattgaactgaggttatgagttttggggaggaagatcattttcctcacatcacatcaagggtatatactcggtactataaacaaaaaatgaaagtctcagccccccaaccatctgaatggacccctccttctggccaagggcattccaaagttaacctgaaaaactagttcaggccatgactggaaggaggtcagacatgcctcattatacccttcccccttttggaattcaggcacagctgaccagtattaccatcaaaacagagaccttaagactgacagaacagtctgtcagtcatgcacaaagtctgtcagtctttaagtctgataagaaatatttgcaatctattctctctgaagcctgctacctggaggcttcatcggcatgataaaaccttggtctatgcaaccctttatagtaacccagacatccctttctattgatctcaggtctttagataataacccattggcaagcagaaaatccttgcttttttatttttattttttaagagtagagacagggtctgactgggagtggtggctcacgcctgtaatcctagcactttgggaggccgagccaggcagatcacaaggtcaggagatcgagaccatcctggccaacatggtgaaaccccgtctctactaaaaatacaaaaattagctggttgtggtggtacatgcctgcaatcccagctactcgggaggctgaggcaggagaattgcttgaacttgggaggcagaggttgtagtgagctgaggttgcaccgctgcacttcagcctggtgacagagtgaggctctgcctcaaaaaaaaaaaaatagggatggggtcttgctatgctgcccaggttggtccccaactcctgggctcaagctatctgcctaccttagcctcccaaagtgctgcgattacaggcatgagtttccatgcctcagaatcagaaaatcgttgaatctgcttatgacctggaagcccccacaaccccttccagctgtccagtcttttcggacctaaccagtgtacgtcatacatgtattaattggtatcttcatttttattatattttaattaattaattaattttttttgagacggattctcgctctgttgcccaggctagagtgcagtggcataatctcggctcactgcaacctccacctcccaggttcaagcaattctcctgcctcagcctcctgagtagctgggactacaggcgcatgccaccacgccagctaattttttgtacttttagtagaattggggttttaccatgttggccaggctagtgccaaactcctgacctcaaatgatctgcccaccttggcctctcaaagtgctgggattacaggtgtgagccactacacctggccttatatatttatttacaatctctagtccaacagagatatatattttttgagacaggatctcattccactgcccaagctggggtgcagtggtgtgatcataggtgactacagccctgacctcctaggctcaagagatcctcttgcctcagcctcccaagtagctgagactacaggcacatgtcaccatgcctgactaagctttgtattttttgtagacatggggactcaccatgttgcccaggctggacttgaactcctggggtcaagtgatcctcccatcttggcctcccagatccactcccttgggattatagactgagccactgatgcctagccaattgatgtcttttcttttcttttcttttcttttttttgagatggagtctcactctatcttccaggctggagtgtaatggtgcgatctcagctcgctgcaacctctgcctcccgggttcaagtgattttcctgcctcagcctccttagtagccctagccggggatacaggcacgcaccaccatgcccggctaatttttacatttttagtagagatggggtttcaccatgttggccaggctggtctcaaattcctgacttcaaatgatccacttgccttggcctcccaaagtggtgagattacaggcgtgagtcaccatgcgtggccctagtgtcttatgtctccttgaatatataaaaccaagttgtagcctgaccaccttgggcacatgacctgaggacatcctgaggttgtatcgtgggcatgttcttaaccttggcaaaataaacttttaaattggttgagacttgtctcagatactttctggtttacagcaagcacatactgttgtcatgatcgataactgttggcaactgattttggtcacctggctggagtagtattgatcagtttccccaatgtaaagtttcttctctttttcctccttcccatattgtactcgttggaagaagtcacggcgcataacccacacttaaggagtgggaaattatgctccctctcctttagagttatattttaactctaggaaaacaaccccacaaaacagatacctaactcttttcaccagtgggcatgctttgtactccaagcagctgccctgggctggctaaatagtctacactggccactgttatagtaaattaaaatggagatcaggcctgaagaatccctggctagacaatgctagttaggcctcataagggaactcagccttgctggatttgcaaacataagcaaaacttaacttgggtcaatgtgatggttaatactgactgtcaacttgattggattgaaggacacaaagtattgatcctgggtgtgcctgtgagggtgttcccaatggagattaacatttgagtcagtggtctgggaaaggatggcccacccttaatctgggtgggcacaatctaatcagctgccagcatggctagaacataaagcaggcagaaaaatgtgaaaagagagactggcctagcctcccagcctacatctttttcccgtgctggatgcttcctgccttcaaacatcagactccaagttcttcatttttggaactcggactggctctccttgcttctcagcctgccaatggcctgttatgggaccttgtgattgtgtgagttaatacttaataaactcccctttatatatatatatatatatatatatatatatatatatacacacacacacacacacacacacacacacacacgtgtgtatatatgtgtgtgtgtatatatacacacatatgtatatatataacggggagttaaaaaagtaatggaatatatatatacaaatatatgtgtatgtatatataccattagttttattttattattattgttttttgagatgggattacactcttgttgcccaggctggagtgcaatggcttgatctcagctcactgcaacctccgtctcctaggttcaagcgattcttctgcctcagcctcccaagtagctgggattacaggtgcccaccaccacgcccagctaattttttgtattttgtagagatggggtttcgccatgttagtcaggctggtctcgaactcctaacctcaggtgatccacctgccatggcctcccaaagtgctgagattacaggcgtgagcaaccgtgtccaaccctattccgttagttctgtccctctgtagaaccctgactaatagagtcatttctggtaaatgctaatgttagacagaaacgaaacttaacattagccaaccacaagcagccaactaacatacaattaagtagctgtggacttttcaacaaaggaaaccaaaaaaggagattttttaactgtaaccaattttatatatatatatgtatatatatatatatgtgtgtgtgtgtgtgtgtgtgtgtgtgtgtgtgtatatatatatatattttttttttttttttttgagagggaatctttgttgcccaggctggagttcagtggtgcaatcttagctcactacaatctctgcctcccgggttccagcgattctcctgcctcagcgtccacagtatctgggattacaggcacatgccatcacacccagctaatttttgtattttcagtagagacggggtttcaccattttggtcaggctggtctcgaacttctgacctcaaatgatctgtccgctttggcctcccaaagtgctaggattacaggcgtgagccaccatgcctgtccccaacaaaatatcttgcttccatattctccccataaatatttgcctctgatgcattgtcatgggaacactcaacctctttccatctggtgttccccgattcaagaattgcctgttactcaagtatactcttaaaaaagttttgttgatcctcagactttacattttaacaccaccctacctcctagagcgccagttttctgatctgtaaaatgggtgttgcggatctttcactccctaggactgtagggaatagaaagtctctggttgtcaatgtcagtcaatgtcaattccttctgcctcccccatttcactactgggaactccgaggcccagagaggggcattaactaatgtcaactttaataacgggattcaagcaatatgtttaagtaatttatttaagcgtaaaagaaaatataggaagaggcaagttgccgtggctcaggcctgtaatcccaccactttgggaggctgaggtgggaggatcacttgagcccaggaggttgaggttgcagtgagcctgatccgccactgcacttcagcctgagcgatagagtgagaccctgtctctgaaaaaaaaaaaagaaagaaagaaagaaaaggaaggaaattaatctatatcaaaaggtcagtccttaaggggtctgctccatttctcggtctccaaagtcagcccttctcagggcctaacaacttttagaagccccaaatagacagactgtccatttctttctgcacttggcccagtctcactgcaagccacgcctggctcagccccgtcccgccttgagcctcggtgttcccacctaggggcgggcagccaggggcacttccgctggcccaagtgatctgcatgtggcagggctgcgcagtggagcggccagtgggcaggatgacgagccagacccctctgccccagtccccccggcccaggcggccaacggtaagtgcgaggctagctgcgtccccgcgcctctgtcctccgcctcttccctccgcctcttccctcccttccagtttctcctgcccgtccctcccagacgcccgagccccctgcttctggcgcgctgtcccccttcacctcgggctggtcgctctcttcaatctttgccgtccctcctgctgggatcactctcctttcgcgcctcggtgtccctttctggtttggctctgtccagcctttcctctttgcccttttgcttcctccctctacattgggtctttagttcctttcccttgtctcttccccaccggcttgtcctagcccacgactcctcctctgccccaccttctcccttgctcccggtgggagaagcccatccaaccagctcggccagaggatctttccctcacctgcagccctctccagcctgcccctgccccttggctgggtcttcagcctgcccctgccctctggctgggtcccaaatccctctgcttgcctgcctggtccccagcttgggtgaggggagttggggaggaggatggggaaaaggctgcgtgcactctgggagcagaacattcgggttctctcctgcactgagagtcatcctgaagacctggaggaagagaaagcagatccagcagcagggcagcgtggctctctctaatagggccatgatcacgtcattgttgttggctattgacaaagccacatgcctagtgccaggaccaccctaggtgttccataaatgcctgaatgaattactggggaagtgtaaggcactgtgcatgatgccaggtagggcaagattggccttgaacagaatactagatgctcctgtaaatcagaggatattcccctcccttaggagcctcacagagtttttgtttgtttgtttgtttgttaaaatagagatggggtctcg

SEQ ID NO: 5205 - DNA, 6000 bp, Homo sapiens
acatgagggccagcctaaaacagtaaggtcaagttgttcagacaaaaaggctacagggcgcggtcccggtccttgtgtaagaattccgaccacacagccctgtacttcagctgtgtgtaatgaaaagggttgggatgagtcagggagagctagtgtggtagcagtttctagagctgttttcaaggaatggaaagaggagtggggaaaggatttaggatctgtggggttggctaggtttccctttctgagtttatataatggtttcgagaataaatgttgaaggagcaggagggtgtcttgttgagaagatttaaaggaggggctacaaagtagaaggtcatcaatatattgaataaggtgagaagcagaggggtggaaagaaagtaaatcatgagaaagagcttggctgaaggaatgagggctgtccctgaagcctcgtggcagtacagcccaggtaagttgctgggactgatgggtgtcagggtcaatccaggtaaaagcaaagagggctgggacgaggggtgcaggggaatagtgaaaaaagcatctttaagatcaagaacggaatagttgtggaggaaggtattgaggacaaaagagtgtacgggttgggcaccacagagtggataggcaaaacaatttggttgataaggcacagatcctgaattaacttgtaatacttgtccggtttttggacaggtaaaatgggggaattgtaaggagagtttggaggctttagaagcccatactgtagcagacgagagataataggctttagtccctttaaagtctgttgtgggatgggacactggcactgaggggggtaagagtgattaggttttaataggatagtaatgggtgtgtgatcggttgctagggagggagtagaggtatcccatacttgtgggttaaggtggggggatacaagaggaagaagtgaaggaggctttgggttgggaagaagggtggcaatgagatgtggctgtcgtccaggaatagtcagggtggtggataattttgttaaaacatctcaacctaataagggaactgagcaggtgggaataactaaaaaggagtgcataaaagaatgttgtacaagttgtcaccaaagttggggagttttaagaggtttagaagcctggctgtcaatacccacaatggttatgtgggcaagggaaacaggtccttgaaaataaggtaatgtggagtgggtagcccctgtatcgattaaaaaggggacagacttaccctccactgtgaaagttacccgaagcttggcatccatgatggtccagggggcttccaaggtgattgggcagcgtcagtcttcagccactaagctgagcaggtctggtaaggagtcagtcagagacccttgggccagagctttaggggctgggctctggaagtggctgccgggtgagctgggcggtctgatttccagtgggtcactgcacagatggaacatggcttgggaggaatcctgggctgcaggcattccttggcccactggccagatttctggcacttgaagcaagatcctgagggaggaggtcctgtaggaaagcctgaccactgcagcttaggcattttgaagttcttgtgtgccggaggtgcagctgggttttgtctcacagcagaggcaagtaattgtaactcagaaatgtgtttctgcttggctgcctcttctctattattgtacacattgaaggcgaggttgattaattcctgttgtggggtttgagggccagattcaaatttttgaagcttttttctgatgtcaggagctgactgggtgatgaaatgcatatcaagaataagacagccttctggcccttcagggtctagggctataaagcatctaagggtagccaccaaacaggccatgaactgggctgggtcttcatctttaccttgggtagtttctttaagtttgtcataattaacagatttgtatgctgcctttttaagcccttcaactaggcaggaaatcatgtaatctcacctagctatacctgaggaacctgcctgatagtgccactggggatcttctcagggaaccgtctgtaataccttcctggaggcctggctcataatgccagtgggtgtctgtgtgggactaggctagaggaaacactctttcccattcatctggggagagggtagaaattaggatgacatttaagccactccaggttaaattgtaagactgggttaaatactggaattcatgtatatatttggtggggtctgacgagaaggagcctaagtgttgattaatttgggaaaggtctgatagagaaaatggtacatgcactctgacgatgccctcagttccagccacttcttgaagaggaaattattgggcaggtgggggagtatttgccgcagaacgaaattgtaagctggaccaggtgtggggaggggagatgatagaagggttgtagggtggggaagtggaggctgaggaagagttggaagctgattcagcctggtggggagcgacctgaggaggagcagtctagggaggagggtagaagtcagatgggtcggtagaaaagaaatattcaaaagactcaccggcacttcaggttgggactgaagggacaggcgggagggaaagaaggaagatttgcggcaagtcgcactgggaacagagattagggaaggaacgaagtgtaaaaaatgcctggatgtagggcacctcagaccatttgcccattttatgacaaaaattatctagatcttgtaggctggagaaatcgaaagtgctcttttctggccatttagagccattatcaagtttgtattggggccaagtggtgttgcagaagaaaataagacacttaggttttaggtcaggtgagagttgaagaggttttaagtttttaagaacacaggctaagagaggaagaagaaggaatggagggctgaaggttgcccatagtaaaaaggtaagtttagagaaaggaggaggttgagacatggagagagggggggtggtacttgccacccaggggaagtggtacttgccaccaaggtggaagatcaaaacaggtgtccccgcagtgatcgaacacctctgaaatgtgggtgaataatcaggcaggcgtccctgcagtgactaaacacaagggaagacagtcttcccgagtccatgaccagcgccagagttttgggtccacagataaaacgggtctcctctgtctctaccagacagggaaaggaaccgaaattaagggaagggagagactgaagggtggtgccgaaattgaaaggagaaagaggttgagggatagtgaaagaggttgaagaagagagtagaaagaggccacttacccgatttaaaattggtgagatgttccttgggctggtctgaggacccgaggtcgtaggtagatcttcctcacggagcaaagagcgggaggacaggggattgatctcccaaggaaggtcccccgatccaagtcatagcaccaaatgtcaaatgcatccgtgtgaagagaccaccaacaggctttgtgtgagcaacaaggctgtttattcacttgggtgcaagtgggctgagtccgaaaagagaatcaatgaagggagatggggaaggggttgctttataggatttaggtaggtaatggaaaattacagtaaaaggtggttgttatctattgttagcaggggagggggtcacaaggtacatgatggggagatcataagacttattgtccagaagaagaatgtcacaaggatggttgatcagttaaggtagggcagggaccagtcacaatggtggaatgtttgttaatcagttaaggcaggaagtggctgttttacttcttttgtgggtttttggctgccccagacttcttggctcccgcaggccatctggacgcatatgtgcaagtcacaggggttacaatggttgagcttcggctgagaggcctgacagcagagactggaaaattgcttaacagaattataaattccttctttcattactcaaacctttttttttttctttttgagacgaagtttcgctcttgttgaccaggctggaatgcaatggtgcgatctcggctcactgcaacctccacctcccaggttcaagcgattctcccccctcagcttcccgagcagccgattatgctgcctcagccttcccagtagctgggactacaggcacccgccaccacgcccagctaattttttgtatttttcgtagagatgggatttcaccatgttggccaagctggtcttgaactcctgaagtgatccgctcacttcagcctcccaaagtgatgggattacaggcgtgagtgacggcgcctggcctcattactcaaacctttagggaacacctcctcactcagccatgtgtaacgacgtgaagacccagaggtgaaacattttagggtgctgcctccgaatctgaatttcaacaatagactaaaacgatccagtcctgggcttctctaaattcttttgttgctggccagaccttaattttaggctttggagggagtgtctatgcgaatgaacgactgaaaactcagaaaacgaaaactagcttttatggaatttcaattaattacgtttatcaaaactacgcatcatgcccatttgtgggtattggatgaaaagataaatctttccagaaggggcaggggagggagaggcaattctggttggggaagttgggagaaaagaaaatcagtatctcctagtcttcgcccagtttggctcgtttggggtactcctcgaccccgcgttaccaggcccgtgaatcccactcccaccagagaattagcgcgggcggacgagcaaagtgaaacttagtagcccggaacttcgcgtgccgggttcccgcagcaacacgtaccgggaagcgtttgggcgctgcaccgcgctgcgccgtgcccgtgagtccggcgcgcagaggaggaggagaaagctgaccgcttaggccggggtagtggtcgtcgtggttttccttgtagttcgtggtctgagaccaggcctcaagtggaaacggcgtcaccatgatcgcacggcggaacccagaacccttacggtttctgccggatgaggcccggagcctgcccccgcccaagctgaccgacccgcggctcctctacatcggcttcttgggctactgctccggcctgattgataacctaatccggcggaggccgatcgcgacggctggtgagtgctgcgcggccgggatcggctgggaggagaaggggtcgtagggctgcagactggcccggccgtaggcccccctgaggtgctctgcttttccgtgcctttttgcctagctggccccatctcgcctttccggggagtccgcgccccattagctctttagaatcaagcagagccagagtgtcatttggcacttgaagaaactgaggtgcagtgaagcaggaactgagtctgtgaaggacccgaaactactctcctcagttcgtgttgtgctgtgtgcgcaaatgagccatgactccatgccatgcactactcacactgtgggcattattgatagcatttcggccttaaaacacttttagggatgtattattcacaacgaggaaaccgagcctaacagattaacagcagcttgcccaaggtcatatggctattaagtagcagagcttggttttttttttttttgacctctgaatggatatgggacaccagtgcttctcaaacttaatgtgcatacgaatagcataggtgtcttgttaaaattcggattctgggctgcgcgaggtggctcacacctgtaatcccagcgccttgggaggccgtggcgggcggatcgcctgagctcaggaattcgataccagtatgggcaatagggcgaaaacccgtccctacaaaaaaatacaaaagttagccgggcgtggtggtgcacgcctgtggtcccaggctgagggaggctgaggcaggagggtcgtttgagcctggaaggcagaggttgcagtaagccgagattgcaccatt

SEQ ID NO: 5206 - DNA, 6000 bp, Homo sapiens
tatttttagtagagacggggtttttgccatgttggccaagctggtctcgaactcctaaccttgtgatccacctgccttggcctcccgaagtgctgggattacaggtgtgagccattgtatgtggccaattcttttattttttaaaggtgaaccgaagaggcatggtggcacatgccatgcctgtagtcccagctactgaggataagcagagactcaggtaggagagactgggttggaatcctattttagacattcatgccattcaacaaatatagagcgtatctgttgtgtcagctgctatgtgggttgctgctgctacaatgatgaataaaacagaaaaggtccctgtcctcatggagtgaataactagtgagataattggataatcacacacatagtataaaattgcatccagctgacaggtgcccagggtaggataaggggaggttggggaaggctgtcttggggaagcagtgcttgctataaaagccaaaggatgaagagctaactagcctaaggggagaaggaagaacattccagacagagggaagggcgtgtataaagggcagtgacaggagggaacatggcatgtaccaaaggctgaaagcaggtcattatgcctagagtggcaaaggtgggtgaagaggaatgcatgaatgtgagagacatctaggaggttaaatagacaggacctggcaagagcagtgagaaatgcttttgctggaagaacaggtaaactgaccaactgtggcttaaacacctaagggtggtgtgggcgtgtgtgaacctgacccaatagtaccttagtttttttttggacaaacatagaaattgacccttctggtcttaaagctggaaagttatatttatctgagttccttcctcaggaaatgaccttcaggtctctcaaaaaaagtatcaaagaactgaaactcaccggatcacagcatccagaaaatgagatgccaagcccctcattcatcatgattgcttccttattcctccctagttccttttttttttttttttaacacattattacatttctttcctgctatataaacctagttttagtcagtcagggacccaagtttgagattgatctcccatctgtttctctgcagcacctgattaaagccttattctttggcaataatcatctcagtgattggctttttgtgaagcaaggaacaggaactagatcggaacccctggtgtttcagtaacacgtgtgtgtgtgtgtgtgtgtgtgtgtgtgtgtgtgtgtgtgtttcctcacataataagtctggaggtagagggatttgtttattagctcaatgatgtcagggccagcatgaggcagtttttcctaacagctgagtctagctttatgcctcatgttcaagcctaaagcagaaagaatgagaaaaggggtacaattcatgacaactgtctctaccattttttgttagaactcagaaaattcactagaaatgaagttaggggaaaaaacctcagaaaaataagattcccgtttattgttggacaacattgtttcacacatacatcgaacaggctgaaaaaataagatttgttgtttttgcatttatttatttttgagacagagtcttactctgtcaccaggctggagtgcaatggcatgactgctgctcactgcaacctccgcctcctgagttcaagcaattctcatgcctcagcctcccgcgtagctgggattacaggtacccaccaccacgcctggctaatttttgtattttcagtagagacaggttttcaccatgttggctaagctggtctcgaacccctgacctcaagtgatccacctgcctaggcttaccaaagtgctgggatcaaggcatgagccaccatgcctggcctatttttgctttttttcagatagtctcactctgtcgcccaggctggagtgcaatggtgcgatctcggctcactgcaacctctgcctccggggttccagattctcctgcctcagcctcctgagtagctgggactacaggcacccaccaccacacctggctaatttttgtatatttagtagagataggatttcaccatgttggccaggctggtctcgaactcctgacctcaggtgatccacccgccttagcctctcaaagtgctgggcttacagccgtgaatcacctcgccagatctatttttcattttttacaagtttgttttttcttttcttcctcctttgagattctaatgaacatggtcacactacaagtaaagtcagaagttgggcaaagaacattctgaaagctgctttggtcatccaagattattaaaaatgcctgcactctaaaaatatgtacaaagatataaagtagaaacaaaaaatatagaccaatttttctttaaaaaatgcttttggctaggtgcagtggctcaggcctgtaatcccagcactttgggaggccaaggcaggtggatcacgaggtcaggagttcaagaccagcctggccaacacggtgaaaccctgtctctcctaaaaatacaaaaattagacaggtgtggtggcatgtgcctgtaatcccagctacttgggaggctgaggcagagaatttcttaaacccgggaagcagaggcttcagtgagccgaaattacgccactgcactccaggcaatagagtgagactccatctccaaaaaaaaaaaaaaatgcttttaagaaaaaatgcaaggccttggaagttttggttcttctttcctctcctgttgcagattcacgttacggttttggatgggtggcagaaagtgcatgtcaccttcggtggcacggtctgcagtgggtgggcctctctactggaaggtgaccacctttagatactgagacagcaagtacgagtggccttcttttaccttcttttaacttatccttttttgctgtctggtcatcttcattggtcttctgcttctcggtgtcaagatcatcatcatcatcatcttcagctgcccatttgactgtagctattacaggaaagtaatcgattgtaaggatggaagttggttggaatgatgtgaggaaggggccaaggaatgcaggcaacttctaaaagctgaaaaagacaagaaaaacaatctccctgcagagcctctggaagcaaccaatccaaatgacaccttgactttactccagtgactgattttagatttctggtttacagaactgtaagagaataaatttgtgttgttttaagctactaagtttatggtaatttcttacagcagaaatagaaaattaatgcaaagtgcctttaaaacatctaagtagctgggcatggtggcgcacaactgtaatcccaatactttgggaggctgaggcaggaagatcacttgagcccaggagtttgaaaccagcatggacaatatagggagatcccatctctacacacacacacacacacgttgccacatccctgtggtcccagttactcaggaggctgaggtggggaggactgcttgagcccaggagatcgaggctgcagtgagctgtgtttgcactattgccctccagcctgggccacagaatgagaccctgtctctcaaaaacaaaacaaaaacatctacgtgaggtcaggtagccaactggagaccagggtctgaaagtgagagaagagtgctgagctagaaatctgtgaatcatattcacatgggtggcagctgaagctgtgggagggcataaactcatattagggaggtgacactgtcacctacttgctgtgcatctttcagcaagataattaactgatctgacacattattgagcatttattctgtcctggaatcatatcaagcaatttacatgcattctcatttaatcctcacaaccagtttatgaggctgaaacttttttttttttagaccaaaagcatcttggataaacaggcctgaggcttgcccaggctgaagtgcaatggcgcgatctcagctcactgcaacctccgcctcccacgttcacgcgattctctagcttcagcctcccgagtaggtggaattacaagcgcccgccaccatgcacggctaatttttttttaatttttagtagagacagggtttcaccatattggccaggctgatctcaaactcctgaactcaggtgattcgcccacctcggcctcccagtgttgggattacaggcgtgagccaccgcgtccggccagaaaccatttttatctcctattttcaaaaataaataaataaataaaaattttaaaaaaagaaactgaggtttagagtttagtttgtccaagatcatacagtaaaataatgagacaagcctaattaaattgcatgtgcctcagtcattacgcaatctgcgagtttgttgggcctactgaatcagaatccgaattattttaacatgaaccgtaggctatttgtacactaagcgttaggactagcctctaccctgcttccagaatgggttccgctcaagcaggaggtgagccaagagcctcgctcagagttctaaaaacacaatgtttctcacctctgtatctttgcacatgccattctctagctggatttaatactccggtgcaagcgtccaggttgggagcccccgcagttctctgaggtacttttatctactgtaactctagggcaacaatcctggcttctccactagtgcgtgaacgtctctagcgttaagtttttttctcacctaagtatccccaatactacacagtgatgacccagcgcaaacgaccactctttcaacgcaagcatgaactagctgataaaacttaaaagtggctacaaacgcctgcgcaggagcccttccggcccggggtgagacgcgggtctaaagaaaaggtgggcgggaggtttaaatagctgactgcagtccccggactggctgcgccgctcgccgcatgcgcgcagctagcgggcacggcttcagagggctttctccgcatgcgcgggatcccggatgtggatcaagttggtgggaagcgtgcggtgccgcagcaatggcggcgctcacaattgccacgggtactggcaattggttttcggctttggcgctcggggtgactcttctcaaatgccttctcatccccacatagtaagggactcgcacggccaggggctgggcggggaggccccgcggtcggtcagggcgggagagaaaggtgtggatatccctgggtatgaagagaaaactttaggtcgtgtttgtcgctatcctgcctttgctaagctttctgtttcgccagttgttacttgacttagccccagctggctaggttcagacctggcgctgtctgatttggaacaaatcactttaacgtttctgaacctcagggtcctcatccttaataggcagttaagaacctctgcctccaacagccattcagccagtattatcagatgcctgaggtgccaggtaccgttctaactcccgggagatgcggtggtgagcaagacattgctggtccttgccctcgaagttggtgggtggagctagacaaacaggaacttttcagattgtgataaaggaaatagagggttactaagtggctgtgcgctattcctttagaaggtgatgtttgagttgaaattcaaaaaatgaaaaagaataagtgatgtggaaagcagttcaggcataggaaagagtaagttcaaaggccctgtggcaggaaagaagtcagagcattctaggaacagaaagtgccccttgtggctgcagagcattgagggagaggagtggcacagcatggggtgcactggggacagataacacagggtttcgaagaccacagttagactgctgtgtaaaaaatggatgtagggccaagactgaaagcgtggaaaccaagaagcaaccatgaaatggtggtgtgtatacagtaggtactcagtatttattaatattggcttccgccttcccttcatccttcctcttttttctttttctccctcatcccttttctcctttccctcccacttcctagtttagggtttgtttta

SEQ ID NO: 5207 - DNA, 6000 bp, Homo sapiens; identical to SEQ ID NO: 3217

SEQ ID NO: 5208 - DNA, 6000 bp, Homo sapiens
ttgtttttaaaatcaaaatgcttatttattgattttacactgagaagtagaacacagaccagaatacctatattgatgtgatcattgaaagatacttttgtcttcttccatgtttgatttatttcaattagggttaaacactttgtgctgagttcaaaggatgcagttgcaaataagagagctctttcattgccctactagcaaccacttactttctgtttggggaaaagggtacaaactaagttatagtgtaattcttgttttaaatacaattttgttaagtgttgtaatagagaagcacaggtgctaaatgagtgtttaatggaaagatgacatgagctatcttagaaggtgacccggtattcagggaatgctttcttgaggaggtgatgatatgcaagttgaactccaaaggacagggaagacaccagaatttctgagtaaaagagatctggatggcaatctggttggaagtaaagactagaagctttattttggagctgtgttgcatagtaatcccacttctttttagattatactgtatgtttatttacggtggctttgggggagttgcctcttgatgcagcctacagaagggtgagtaggaattaattatgtgaaagtatgaagtggggaaaagaacatcctccatggccacaaggtaggattgagctcaagtattcaaggcctgtatggttggaggacagagcaagagtgtgaggcacagacaagactggtaaaaagccacagaggccagatcacatgggtcatgattaaagaccatccaaactactttaaagattatagtatcaatgaggataaagagtcccagaaaatgacgtttaactgacaggtatcaagcataaaggacctgatcataattgcattttaggaattactctgggtgctgtgtgagagagaattagagcaagggtgtatgcgagagaccagttagaaagctgtttcaccagttctacacagaaatgatgctgggttagacatcacagtggtcatcatggtgattgaaagaaatagataaatgttaaagatatttacacagacaagtatacaaatactgtagagcatgacttaatttgccaaggggatctgaaaagcttacagaagtgacattagtttaatcttgaaggatgagaacaaatttctggtagaagtatagtttagcacttagattcaattgcaaaaatatgcaaattttaagtgattattacctttttactagtgtttctttcagaatctttaagaaatattacataattaatgttctgatttctgtatttgtgatactaagtaccttagaatataatacatttacatttcctgaatacaattttataatttagacttgtaattaattcagattaaccccttccccatcaacactcacccaaatccaactatgctagttacaattcgggacattttaaaagttttttctaccttctattaaatcctctgttttggttaaatctttgcatcaattaagcatgttttcttccacactaaattcctgcttgtttttgtctcacaaaagttatgactaaattagtttaaatattttggaaataattttagagcctaaaatactttacgtattcctggctttcttattttgaaggaaatgtgcttggatctggagattatctaggccaaaggttattagatgtaaaagaatgcggatttcttagcatttataaatctctagtttttgcaatcataggaatagactgtacacacttttcaaagcattttatgattatttggcgtattacttgtggctgataaggatgtctgtcaccagtcactctttagcaatcacttagctctccttttattattaatattttcatttcccatatgcataattttatctggaaaaagattctgtatcaagttttagtgcagtacaatatatttatccatttttgctattttttattaaatcaagctaggatattagtcttaaacgcttgctttgaaactagtgattgttctatgaagccagtgccaggtcaaagagagttcaataagttatatctcatctaggcattgctctgtgcaccatctgcccatgttaaatcacagtgataagtaggatgtgtacttgtgcatcgctaattcttgtttggccagaatttcatgtcatctcatggtcattacaattgtccaattatagttgatcaaattggattaccattaattagtgagtctgtcttatagtacagagggctagttgaacatatttatctgtttaagtgggctgtcctcagaaagccaaatgtcatgtttgaaaagaaaagtcttgtttgtggggagggaaagataggagtatggaattactttacatgtactaaactgaaggagtgatttcaatatagtcttttagtaagcttaataaaagtttgctttagccttaaagatcttttaagcaaaataacattagttatacaatggatgctatttaactataaagaaatgacatgctaagttattaaaatagaaattctgtggcccttgtgatgggaagaaattgcgcattctgaacaacccattcataacagatttaagtctctgtgaagatttgtaatatcttgagtagtgtcaagccagaaaattgtttctgccttgctgcaagctgcacacaccattacaaagttgtgatggatgcacactgacttatgtctatgtagattgattcttatacttgagaggcaaatggatgagaaccggacatgtgttccctgaagatgccaatgggcccttgtgcaatgatatctgcctaaaaaactagagaagcatctatggttagataagattggagacagccaaacttatcactttccgacattctcatttgagagtgatggcattggcatattgcatcaaatcctactgtacagccatgcatcatggttataccagaaaagcctaaagttctctagggttttcttcgacccaacagttctttcaggtataatctattgatctaaaataaaaaggggggagggagggaaagagagagagagagaaataattttctcccttttcgtcactgtcttcaggtattgattttaacttcttgatcttctttaagaaggcaaaaactattaatgcctttgttatttctgcccaacagttcaagtttcatatatttttgacaaatttccttaacaagaatacctcaacaccagaactaaatttaactttaaaggaatagtttatgtttctagaacattgctgaattaaatattattattttaaaaatgtgtatcaactccttcatttctctattttttccttccatttatacttccacccaaccatccattcatccgtcaaacatatgtatgtatttactgcctgttttgtggtggacggtgtgaaaggtgcttagagaaaaatggccattaacatagaccagaacctgccctctaaacttacatatctggccattattattgaacaaacgtgttttgaataccttctgtgatgggcacaatgctaatatcagccccttgtgcagaatttggaaaagtacccttatatggagatacatggacaaagaagatcctactccttactttcaagatttttaagtctaacagtgatttatccagggagtcttagtgttcaaatgtagaacttgctatgatctcagcccttgcaataagcaccttgccagctcaggcaaaaatcaggcctatactgccccagcacctggtcaatccactgagaaggtagatttgatggcatctgatggtctacagataaagtaattatttcataggattatataatctttgttaggtactgcatggatggtaactggctgcacacttaaaccaaaattatttccttagtaatgtgtgataaggatagacattttggaaatggatgtggaaagtttcaaacagaataaaaattattaatgttatggcaattagcctttcacttcactgaaaatactatgtatggattcagcaagcatgctaaaatttaacacaaaaatcctctttggaaggcaattgctttaagttagaaaaaattagctcatttttcagtgaaagaatttgaaaattctgtctttggaaaccaaaatactgtatggcagagttggatgcatctttcactttaaaacgcagactctatttgtggtgaatgtatttgttatggtaaagtatttgaaaggaaaccctcagaataatttggggtaaggaaaaatactgttttaaaataagcccaacccatcagttttaaaccttgaaaactgccttgctttgaataagaaagaattaataatcgtgtatagcataaagaatatatgtttggactaaaatgcataatcgtgatttaaaacaaacttccaaattttaagagactctagtataatggtgtgacctcaatgatttttccaaatgaatttatgttcttcagagttaatattgatgatcttatatagttacttcatgactgggtctgtgtcttggcaaatctctctctagataagtgattcttataaatgttgaaaattcctttacaggttaactttcccatcattttttattgcttatgctataaagtttaagcctagatgcatcctttctggaaagaagggtcctactaatctcataagaatctcataataagttctctttcttaaggtttgtattttgtgtggggatcggcaaggaaagggaaaagccggaatgccaaacagcaaagagttattctttactgtagggctccatccaaaaagggtttgtaacacagtgtacagtcttgtagcccagctgtgtggagcattgattgcttctgcctagagcagggatactgtcaagttgctctgtgagttgagtcatctattgacaaagagctaccagcccgcagataatgctgtgcggagctgctgtcgctgctcccactgctcccacgatgcactgcttatagcagctgtcaaagatactgaggaatccacggtggaaaaaagacttttacaactggctggaagaaaggggtgtgagggaggagacatttctgtgcagagctgaccaaaggaaagagtaggcatcagtgcagtatgaatgcatacctcaccaagcaacacagctgcagccgggggtccgatgggatggatgccgtcaggagtgcgcccaccctgatcagggatgcccactgtgcttgtggctggcagaggaactgtcaggggctcgggtacagttctcagaccatgccctcctcaggaccagggggcccagcttcaaacaggaccggggggtccagcttcaacaggaccttgtgggacagtgtgcggaaaagcccccacaagacgagcaccaagggcaaagggacttgtggggagcattgtacctgcccacatggttggttcagcccagcacaggtgagccttttccttatgactttcccttgagtgtctgaagaaagtgagagcaagttgtttaaggttagaatggcttggaaactttgcagagtaccacgggtatgcctgtatgtaaaatattaggccaagaaaaacctgtcattttcacacatgtttgtgggctcatacctctggtggcctgtgaaagtctagggatgccgtgctcagtttatttcactgacttttcttcaacttctctagtcctcaggttatattattttttatcatagtcttttagcagcccttttacttctaatcatttttaacttttgttctgtcctgcctgtttattattatttttttaaagagcagagaaaaaataaattttaactaaactttccatctctttaaaggcaaaagaacatttgtttctttagctatagaaaacagtgatttgaagtatgctattctaattttactcttataatactgtatgccttttcagttatggagaagaacaattatttacactaaataattaattttacaaagaaaaggaataattatgagcaaaacagaggatggttaaactcagaataaaagaa

SEQ ID NO: 5209 - DNA, 6000 bp, Homo sapiens
atttgatattcttaaatgatgttaaattcttcttaccacttctgtgttcctgagactttcttaattaaaaaaattatttatattttttaatcaaatgcattacataattcttaaatgatgttaaattcttcttaccacttctgtgttcctgagactttcttaattaaaaaaattatttatattttttaatcaaatgcattacgtaaaacagctttcctataaggctgtttcagagtctgagttgacttctctttaatctacctatagaacttttaggtttcaaaaaatactttttaaatgactttttgggtttggaaagtacctttaatacatttaagctagttttcctcctggaaatatttagaatttcttccttaattggcaacctttatagaagtctggtaagatttgtcgcaaagatgtgccacagatggacacaaatttcccattcgggagcaatatcttaccacagtggtggctaaatgctagggacaaaatacaaggccggaactttccttccctcagataccttgtgctgtggtgttttgttgccactttctccctctcattttcaattatatgcacaatcttccctttctagagtatgactttggccagatgactcacctgatgccacctaagggcattgcctggccaggtacatttctctggctccagccttggctaagttgatgacctgagtcgatctccacattcatctacatgaacgtgggggcgttggttttggcggccaggctgtaaaatgtagggcttgtctcagtttgctatttaatcaacatgtggacattttagcagagaaaccccagagcaaataggaatgagaagctacctgattaaaatgatgaaatgatagagaatgttttttggctgggacattttaaccaaagttgcacaactgatgctgattgccttccttgtagtttagtagaatttgtcatttgtttagctccttttcgttccagtgaaaatagataagctttactgagtggcttactttgaggtgtggactcctttgtaagtagctatagggtctcttcttgaacactgaccaaagaatccacctttaatcctattcagttaagttgaagcccctctaaaaaattttgttgttaataaaaaaaagaaagaaattgaaatatcaatctctaaaaccatacatatttatttataaatctctaattaaatctctaaatttatttaatctctaaagtaaataaatttaattaattaataattaattaatgtaatggcaagaataaagccagcatgttaaacttgttgaggtaggctcttactaaactgcccatgagttgctagtgtaaactgacccacaggagaaggagcgcttgcaaatttgcaattatgttagagactatcatctaatgtgtatcccagcataactgactgaatagtaaaaagcctatctaaaaaggcagcgttaaataatcacctaggctgggcacggtggctcacgcctgtaatcccagcactttgggaggccaaggcgggcagatcatgaggtgaggatatcgagaccatcctggctaacatggtgaaaccccatctctactaaaaaatacaataaagtagccgggcgtggtggtggctgtagtcccagctactcgggaggctgaggcagcagaatggtgtgaaccctgaggcggagcttgcagtgagtcgagatcacgccactgcactccagcctgggctacagagcaagacttcatctcaaaaaaaaaaaaaaaaaaaaaaaaaatcacctaaacagagcccagagaagacattttagaataacaagccaattaagaagtatcaaatggtatagtcatgattttaatttaggtttatatactctaacctaaattattattttaaagcaaactgcagtgggggtggggtgaaaaatgaagagaaacctactataagggtactgtaattttggggagcaagctaacacatttgacttgcggctgagctcttaactaagcaatacctcagtatgctcctttgggaaaaattaaaggttcagtagtcaaatacttttggaaatgctgggccattatgcacagagaaggtccgcagtaaggaacattttaaatttgaacagagaacatccaaatctaattcatcttagaatccatttgctatggaatgtactaggcagaactggaatgtatttcaggaaattattgtctagagaagtggttcttaaattaattgattccttaatcgaatcactcattgattcagcaaatattttgaagtgtttatttccagccactgttctaggcactgagaatacagcagtaataaatgtcagtacttaagcttattcatgatgcagccattccttttataaaataacggcattagtaaatgatagaggcctccctcccgcaactttaaaatgccttactaaaataaaaatttgactatcccatgttatttcccaacatttcattggaaattatactagatcatgaaacccagaaagtctacaacctttgatctggagaatgcactcatatgtgtacccaattatacacagatgttaaacatctgaatcctgccttccacggttttgaattaattttattaatgctcctagaagtatttcatggctgtcttcaaaagctagaatgttaaatgggaagagtcaatgtctggcataggacaaatcatatgtctaaaataggagtaaacaactaagagatcacatttctattaatgtggtaatcttgtttttgtagggtttacgtttgcaaatatttcttgaccaggaaaattatgtttaagagcatattaatagtggagaaattttattttcttctgtgaaataagtgcttcttaaagtagaaactcatagcataatgtctcttttcagcctaccatttctatgtccatatgttagaggattttttttttttttggtattgtgcagtgttcatcgattttgttttataacaggttcagaagaagaacccagtcctgttttgaaaactttggaaaggagtgccgctaggaaaatgccttccaaaagtctagaagacatttcatcagattcatcaagtgagaataaagttcgcctcactgttcatgccccatctaagcttaaaaatgcctatgtgctctcctgtagcctcactgcgtgctgttgtgcactgcaccctctaatgggggcagttaacagatgaaaataacctctccaaagtgcgctgaagaggctcaacctaaagtggctggaactttgcttataaaataatatattacatttggttactaaaacactaggtttcctttaattgaagaatcccagtttgagtgtttctcaagtacagtgagtttcaaaggatagtggtagctagtagtattagtgaaaatagtcataactagcatttattgaatattatttgccaaaacgtgcctaacaattttacatgtattatctcatttaaccagcacaagcaaccctatgagaggtgaattattgttatccaaatttaaagatgaggaaaatgaagctcagaaatgtgaaatgacctttttagtattacacggaagatctgggactcaaaattaacaggctattatcaagaacatttatgaagggaccacattatatatgacagcgttggatgtccagtgaattttgcatgatacggagttgaattagtccctggcttcaaggactttcctttctcttttatcccttctattctgttcacacttttcttctagatactggaactataagcccaaaactacttaacatgaaagactttaggtacacgattccccactggcagctgctttaatggtgaaggatttcttgagtactagcagaaaacataatatataaagagagttgtgtgctagacaaatggactaagaaaccatgatttcttggggttttgttcttgctattttcaagctaaaatgcacccctgggattgcagatggtcataagaaaaattatcaagtgaaaagttaaccactgccaaactcatatgattgaaaattggccattgttatgtttagaatattttttgtgcatttgcaattaagaataaaaagtcagaatttaaaaatgaaaaaaagaaaagaaaaagccacttcaccaaacatttcctaaaattcacagattcccaggggtttgaagacagtattcccaatttggaatgtagtcctgactatcccaaggatcttggaatctcagggttagaagggatcttaaaaatcacccattttaacctcccctcaatgcaggaattctctctaaagcctcctcaacaggcggccaacccccatatccgcctgaatgcttccagagaaggcgagtcgaatcctttgttggacagccctgattgtttttcctgatgttggtgatgggccttgagaaaaagaaaaaaagaaaaaaaaaatctcagaacaattggcccatttagcaaacctcttgcctgtgaaacatggggctatttccatggtgcagctttaaagtactcaggaatgtatagggttaaaaaaaaatcaccatcagctgacgggtattcctgcacgctcccttccaaatactgatacccactctcacactagcctgccaagattccacttagcagctggtccccagttacatctcttcagttgacttcccaagcaagcctcccagaggcatatgtgaatgatgatgcacacacacaaatatttgttaatgaccatgggtttgggaaggtgttagtcatggctagcatcataccctttacagaagaatagagaggctgttgcagccccgtgctttctcctgctgctggccgattgcttgctctgaactaaccctctaacccttgggagtctgtgtgcagcagtgatgtgagctgcatccgggctgaaatgggagctcccgctatggcactggctcaaggagctaatctaaagagaaagtattttggggaagacatcttggttgcacccctcattgcatcttgactaattgcttccaactccgggggcttccagggacaatctcattgttcttttctctccaagggtcagccatgttaaccatttgttaatttcttctgaacagatcaagcaaaagtagataatcagccagaagaattagtgcgtagtgctgaagatggtaaatatctttatgtatttgcgtgtctgtctttgtattaacttctggggtgatttgggcagtctccgggacgcagctgttgggtaaacagaagaacgtcatttgccactatgtggtgaatagtgcctaagttactataaaacagttctgatttggtacatttaatatagtttgtattcttaaggcttcttctggtgatactgtcatgaggatctcatcagagacccttgtgaagcaagggtttctataaatagaaaattgtatttctttggatgtgagctgatttttgctactctgacttgcagaactctttgtaaaggcaggaagagtggagtgaattcctgggttaagttattcttctgtttgattctcaagtctcagcatttagatctctctgggcacaactggtaaaatcttaaattcaaaggaaagagtcccagaacaagggtgggaaatcgtgcctctgcttatataaataactaaatatagacagagggtgaagttgattctgaatataatggagccagaagatcttgaagcttgtcagtggatcaggtattacttggctctgttataagatgaatagtatagtggtgccttggttgagggagagacagaaatgagtctgatttttatattgcagaatttatgcaaatgtataatttgtatttgcatgctggattttatttacttgttgttaaatttgccttcactataatcataaaaatgtgtactcactgagctttcccatataaatgcagcaacagagctccttaaaggtcattctttacttttatgtaatcgttctgtctttcttattttatgtttacaacaacctcact

SEQ ID NO: 5210 - DNA, 6000 bp, Homo sapiens; identical to SEQ ID NO: 3219

SEQ ID NO: 5211 - DNA, 6000 bp, Homo sapiens
tggttatatatacataaaatgtatcatcttagccatttttacatgtacagctcagtagtattatgtacattcaaactgtgtgtaaccatcggcccccatccatcttcataactctttttgtcttgcaaaattaaatgaaaactctgtacccattaaacaaagctccccattcttctctccccagcctttggtagccaccattctataatactttccgtctctatgggtagaaaccaactaacttgtaaaggactcactagtgtctatcattttgtgaggcagatagacttgtgttattctctattgtttcccagcacctagcataatgtctggtacatgtcatgtgttcaataaatgtttgcacactgactaagtgaatgaatgatagttccaactcctggtccgccctcaagtgaccataagttaaagactcagacatacaggaaatacaggttggatgcaaagagaatattattgatggagaaggacaccagcattttgctgctctatttgtctccacccaaaattcattccacaaatataaactgaatgcttctatatgatggaagtgcattagagcctcaaatacaaagatgaacacatagactgtgcctccaatgtgtgctttcccacgaccacttcatagcattgattacactctagtataatcgtgtatgtacctgccctgccactatactgtaagctctggctaggacattgtccatcatatagtaagcactcaataaatagttggcgaatcatctaatggagactgtagcccactgtggggaaaaagacccacaatcatacaaagtcaggatccttagctgtacgaaagaaaagctgctgactcttgctgatatagcagaaaaggattatattgaagatattgggtagttctcaggtgtgttggaaggtgtagagattcaggactggggccattcctctgggaataatgcacaaaaccactgcagaactagcccagcaagaaaactatcaccattgcagctctctgtcaataccactattacatcagaaactccatgttgcaaccactgagaaactaacgtcactgctagtgctgccaactaaggcagccgcctggctattagggcaattcataccagcaaggcaaggagctccataatgagccactttcctctggttgcttatacctgaatttaagtttgatatggatgagcctgactggcaaagcctaggttatattcttgaacccagttgtaatggaggctgggaaactgagttctaaataaaagaaagtaggctgggtgcggtcgctcacacctgtaatcccaacactttgaaaggccaaggcaggtggatcactttacttcaggagttcaaaaacagcctggccaacatgggaaaccccatctctactaaaaatacaaaagttagcaaggcatggtggcacatgcctgtagtcccagctactcaggaggctgaggcacgagaatcgcgtgaacttgggaggcggaggttgcagtgaggtgacattgtgcccctgcactccatcccgggcgacagagcaagactctgtctcaaaaaaaaaaaaaaaaaggaagtgattcgtatgacatgaatccagtagcaatatgcgataggcacttggccaaaatatgcattcacttttttattctcatggaacttgtatttttgtaggacagacaaaaaataaacacataaatgaacataatgatggatagcactggatgccacaaaaagaaacagagctgtaaactagggtattcaagaagggcttttctcagatgagcagtgttgaaggatgtgaggaagcagcaagtacagaggctccgggatggaaactgacttgacatttctaaagtgctgcaaggaggctggagctgagaagtgaaggagagggtagaaaatgaggtggtaagggcagccatggaccatgtcacgtaggccttgcaggccatggtttcagactttgttaagtggcaagggaatggcataatctgacatgttttaaaagaatcacactggctgctatgtggagaatattttatagagaacaaggttagagacccagttgatcaatgtatgagcagagggatccaagcactaaaatctgcccagatgggtggggagatgggatatgaagggaatcttgagagaggagtagaaactgcctaagagaaaaggttagagggcatcttgggcaaagggaagaacaggagcaagaacacaggggcgtggaaggccccagcatatttggaaaactttgagtgctctagtgaggttacagagagggatccagacatgaggctggaaaggaggagagacctaaatggccaagggctgttcttttaacttttcacatcaccaaagtaaaatgttggtacagtgatgggggctgaacctgaggcataactggggctacaacttctctgggaggctagtcctcccaatagagtttccaagagagcaggaaggccacacagttccttgctctttcccctctcctcagactagaaaaaacatgggcaatccacagtactgagctgttagtatcaaagatgggcacacccactcactgtggtgtggcaatcagatagcagagatctgaaggtgtctccaacaggtcagtacccgggaaaaactgtccaagtaaataaatatcttgttctccacactgtcttagtccgtttctgctgctataacacaaataccttaaatgggatactttatcaacaaatttataaacaatagaaatctatttgtcccagttctggaggctgggaagttgacagagcaaggcctcaacagatttggtgtctggtgagggccctctgcctcacagatggcgtcttcctgctgtgccctcacagtacagaagggtgaaacaagttccctcaggcctcctttacaagggcactaatcccattcattagcaaccaaatcacctccggaaagcctcacatctttttttttttctcttgagacaagtctcactctgtctcccaggctggagtgcagtggcgtgatctcggctcactgtaacctccacctcccaggttcaagcgattcctgtgcctcagcctcccagctactcgggagcctcccgagtagctgggattataggcacgtcccaccacgcccagataattgtatttttagtagaggcggggtttcaccatgttggtcaggctggtcttcaactcctgacctcaaacgatctacccttctcagcctcccaaagtgctgggattacaggcatgagccactatgcccacccaagtcccacatcttattatcatcaccttgaggattaggtttcaacacatgaatgtggtggggatataaacatccagacctcttattccaccccagattcccaggctataagtacactgagccttaaaggaagtattagctgtgggttggtgaagagaattccagaaggaaagaacaacgtatgcaaatgccaggaaccagaaagcacccttctccatgggcaacagaaccaaggctggaaagacaggttgggcctagattgggaaatgcttggataatggggtagtcaccagaacggtttattcctaaaccagattccccagttaaatagaataaccaaaatcgaaatgtgcaatgcttgctttttgtccatgataagctgcaggggaaacatttgcaggttggctgactgaatccacagatggaagtctctgtaaatttaggacagattgtctcagttaatctctaggaccagtcagacctctgtaatgatggatttgcctgacatgagaaagttctacctctcataacacagttttcaaaagttaactgcaatgtggcctttatgtgatgaaatctggctcaggtgccaaagatctgcaacattaagacctttgcaggtggggattcactgtgattttaggttccttggatccttcagtcttctacttcagctgagggttcccacccaagccaggactcagcctttgttattctcatgcattagccacaggtagctatgtcacttcagagttctgagcacgatgaaaatgcagactttacaagcacttcaagtcaagacaagtgattagcattggctccaagggtttaaaaggaactcagccaaaaactgttcaaaactggccatttcatctgaactgggacagcagggcacaaggagagaaaaggctggttggattaatgcagcccccgctttccatggctctactgtatttcactgagagttgctaccaactcctgcgcgcgcccccacccgcccactccactaatctcgtgtcttaatcagagatacagggaacccgtggagaagatgaagtacaactgggataagaagatcgtaggtgttttacgtttgaatttaagcaacaaatctgtcgagctgtttttctccacttcccccttaggctgggtcacgcgaggggaaagctccgaccgcccaggactccttagagtgaatcccatcccctcaagttcctctccagaatctccccctcctcccgcctttgccctgcaactcctccctctcactctgagtcgcacgcacccctgtcccctccctgcccgcaaaactactcttcaaaggcttccttccgggcaccgcgaagccagcgtgctcagcattcagggaggcagcggcgctcgccttcatccaggacaacaaaactgccatttccgaagagaaaggaaacggctcgcggtttctggggttcccaagcgcgcgcctgcgagggaggccgcgagccgagtcgccacgcccagaaccccgagcccgcccccgcgccacccagcccggccccgccgccccggctgcgcacgcgacgccccctccaggccccgctcctgcgccctatttggtcattcggggggcaagcggcgggaggggaaacgtgcgcggccgaaggggaagcggagccggcgccggctgcgcagaggagccgctctcgccgccgccacctcggctgggagcccacgaggctgccgcatcctgccctcggaacaatgggactcggcgcgcgaggtgcttgggccgcgctgctcctggggacgctgcaggtgctagcgctgctgggggccgcccatgaaagcgcagccatggcgggtaagtggctgcgggggtcgtcagccccgttcgtgggaggcagcgcgctgccgaggcttgggttcccaagttgggctctggtacagaaagttccgcgtgtgtctggccgaacgctcggggcggacccagaggtgaccgggcggggtgggggaaactgaggtttggaccagtcacccgctggccccggggccgcctgctgaggaaattgcctggtgcttcccctctcgctttttggatgcggcggtcgcaggccgggacgggtgcgcataacctgttgagttaccgcaagttggtttttacagcctttccctgaagttaatgtttgccgaggttagagtttctaaggcttccgtttgtaaacaagattagctgagttgaaaaatatgtctacctaggcccgcggaaacgtctcccagttagtcggggagcttttcaagcgtcccccaggcatttcagcgtctaatattatgcagtattatccagatgaattacaatctttaggtccccctgacgctcgaagttagacttcggggctcttggagctagttgggagcttttggggagcgcgccccgccctcgcggtagttgaggcggccgcccccatggcggggcgctctccacccctcgtgtgccataaacacccggccgaggcgcgcggcagctgcgcagcgttaagggcacagctgcacggtcgccggtggcccttgtcgtcgctagtaaggtcgtaacaggatgatgttgactttgcttttctgtgtagggcggaatttgtttcgttttaggcccttggccctttggagacttcaaacagccctttttggatgaaaccaggaagttgggatttgttgtgtaaatactgttttcctttgtcaactgtt

SEQ ID NO: 5212 - DNA, 6000 bp, Homo sapiens
tgtccctttctttttatttttttgagatggagtgttgctatgtcacccaggctggagttcagtggtgcaatctcagctcactgaaacctctgcctcccaggttcaagcaattctcctgcctcagcctccccagtagctgggactactggcacatgccaccacacccggctaatttttgttttagtagagatggggtttcatcatgttgggcaggctggtcttgaactcctgaccttaagtgttccacccgccttggcctctcaaagtgctgggattacaggcgtgagacactgcggccagctgcccctttttaaaaaaaaaattcaaattttattgtaaattgacaattggtggttgtagatatttataggctaccaaatgtggaataattaaatcaagctaattgacatatccattacatcaaatacttatcatttttcatggtgagaacaatggaatttactgttagcggttttgaaatgtacaatacaccgttattaactatattcaccatcctgtgcaataggcctaaaatatatttgttcttcctgagaccttgtatcctttgaccatcatctccccattcaccccattccccagcctctgtaaccaccattctactctgcttctatgagtttgattgtttcagattccgcatataagtaagaacatgcagtatttgtcgtgtctggcttatttcccttagcatcatgttctccaatattttccttcttttttaaggctgaatagtattccattgtgtatatagatgacattttctttatccattcatctgttgatggactgcaaatagtgtctacttttcttaatcttcttcttttggggggcagtagccctactctgtgtcattattatttcttgtgtgactagaacaatgctgtgtatttagtagtgttcacttgataccagttgaacaattgcagaagtaatggcaaaggtgatgacttggccttctgatgtacatcccctcggctctgtagtggcagtacctgggcagcatctgagagacacacaggtggcaggagagagacagagtcaaggaggccaagctttcttcaactccatgccctccattcactgcctgggctcaagtcagtccttatattagtgcatgtttcacaggatttttacacgaagtgacactcagcccattctcctttggtcataaatgaaaagagaagctttgtacttgtccaagagaaaggagttcctccttgtcatttatttatttacttttaatgattaggattgaaaaaaacctcaaacaactagcatggtttaacttatgaccaggcaggctctatgcttggctttacacacatcggtgtagtaccaaatcttagtgatggaaaggaacaagttgattttacgtacattatcaattggatcttgatcacagatctttgagggttattagtattcccatattatagatggggacactgaggcccagaaaggatagatgatcatttttttaatgttactcagtaagtggaaaatttagaatacgaacacaggcctttgtcacttcaaggtccatttgctttccactttcccgcagatggcttgggctaaagtgtttgaattagcagtattgtgtcgacctgccagtggccacttaagtttcttcatgacttttacatgggctttccccgtggccagaaaggcagggcttatttgatgactgtggcaatagtgacgtggagaaaacttcaagaagtagggttttcatttctctctgggcatgcgctcactcatgtgtttgggaaagtgagggagaatagcagaaagctgttgctctctttctcccagctccatgaccagctggatgtgaagatggcaaagtgagaaggccactgagacgatcatgctcgatactgtgaagtgctgagagcttatcaccttcatcaaggccttggtgacttctctcatcatgttgcagacttgcagaattctaggactgacataggtcttcacttttcagttctcagggtaaaaaggcgggtggacgaggggagtacatgaaacgagctagtttagcaaccgatcaggcacaagagctcagcactgattctcaaaggatgtcattttcacacctgagaatgtatatggtgatggtggtggggagataccaattagagattcagtgccagcgtcaatgtgaatgttgttttcttaacatttttggccgttggctaagttctagattagtaggcagagaaataatttcaaagtttatttagaatgtcgtcctgccaatgggcagagaagtaccttgaaagaaagttgatatgaaatgaatgctgctaagtcatggcaattgctctcaggaaggaaagtattagcagagttaagtaacgttaattgcaaaggatgaatttgctttggtactaaggtctgaaatgttggaattctcaacttcttaaatgagaaaaaataatgttgattttgtaaaataatgttgagtttatttttattttattttggctccttgcaggaaacaagattttttttttttttttaagcaaacctgcagatcctgagggttaaaccctccttatgcctttgagtagttgtcaggtgatttggggcggcttgcatgtgtttctggagagggtaaagctaaactagtgataactacattccaagtgtaatcccaatctcttgacattacagaagaaaccactaattttcagaagcgtctgaagtctgggaatttgtcaatgcactgggcacagtagtccttggtgcagcttagacatgcttaaatgaggcaaaccagactaacccatcaattcggtcaaataagaagtagaatttttcttctaagttactttgaaattgaccaattcaacaaaatgacaacattggagagctcttttggtgatacgttaacatttcgctattgtatttaacattttaaatattgtagagctaattcataatctgagatgtacaaaataaatgcttatcccataaacctaatatcaacacatgatatactacaaataatttgattccaaatgaattaagaaaaaaggttttcaagtttcagattcttttaccaaaaatatcctgggaatttgagattgtgcctatgcagcctcaaacggatgaataaaaagtaatgtaggccgggcacccggtggctcacacctataatcctagcactttgggaggctgaggcggttggatcacctgaggtcagaagctcaaggccagcctggccaacatggtgaagccccatctctactaaaaatacaaaaattagccaggcatagtggtgcatgcctgtaatcccagctacccaggaggctgaggcaggagaatcgctcgaacccgggaggcggaggttgcagtgagctgagatcacgccactgcactccagcctgggtgacaagagcaaaactccatctcaaaagaaaaaaaaagtaaagtaaagttttgtttttttcccctttgggtggtgagattaaaagtaatttaaaagttttaaatactttaatatattttcacatgtcctacaataaatatataacttttttaatttgacaaaaaataattttgagtggttacaaaaagggacaggtgtggcttggtaactagaaaaacattcccagcctgggaaacaatctagtgagagcttggaggcagaagacagaactctgattacattcaaggagtttgccagatggcaacagataactgccaatgttcggttgcactataattattatacactctctgtcacttcagcaagcgctcttttcacaagacaagtggtgacagaatgttgtattaagattacccgttgctaagcttatgttaaaatgaggaaatgaaatggaaagtcttgttttggtaatgtctctggggtatgaggaatggagggaaaggtttgactatgagcataactgcatagagaattttgtttgtttatgccttttgggaatgcattattttgattgaccctaattgggaattcagagggggagatttcctctattatctataaagaaaggatctgctgagcaaacacaattgctagggtcatgtttaaagtacttaattgatctgctttcaagtctaatttaacacttcaggggctccaaacatgtgatacattggttacaaactcatcttagtctaattttagttagtgttcatattagaaagttatataatacttttctttctttcagatatattctataattcacatttttcactaattttacccagttctccttccactcccaatctatccaaataactgagttgaactgtgtgagtttactgctctattaatttattgccagagatatacaaaccatgacttcctcggctgtttcagatgaaactgtagatccacgtgtaaacttgcaatgcacagcttagctggaaagttacgtggagcaggtgacggaggggatagctttcactgcttggactaaagtcagttttgaaagagctaaagatgcctattgaattctggagtgtgtgtgtgtgtgtatgggtgtgcatatgtgtgggtgtaaggcagcaaactcttcacatttcaaataactaaagatatgggtggtaaaatgaagtcacatttttacacctcacaggctgactagggagagcagtcaaatgcagcatcgattggttaaaattagtctatcattcttggtttatgatgttttaaagacatgttaaagttattcatgaagatgtaaaagacacatttaaaacccacatcaattgcactaaaagtcaactggaaacagaaggtttttaaatcctggtggtggcaaattggcagccaaaggaacaaagtcttagtcaacatatttccatgtcccccgaacacaaatagcctcgaaccttcggagggtgttcctttgagatgtttcatcagtgacatcacagtgattgccagcttccacggactactttaggcgctgcccagagtccaggagtccagacagcctgggaggggagaaggagttggagctcaagttggagacagcgaggagaaacctgccatagccagggtgtgtctttgatcctcttcaggtaactgcaggatttttatgcttagcatacggtgtgtgtgtgtgtacaagctgcaaatgagaaaggcagaggaatgtttgcatttcttaatgaaataggcaatgccccttggatacagcatgccttaagatataaagtgagtactattgctttctgttttcctttttttttctcctaagggtatgcattttctcccttcctagtaaaaaaaaattttttttctttcttgtattatggaagatggtcttttttctatcttctctaagtctccattcaaagaaagccaatgtcaaacttcctgcacaatttattcagagctttttgggttttagttcatccatttgcaatcactggatcatatggcatgaccttgacttcagggaatgtttaaaatgaaacccaaagtgtctttattggttaaaagcagaaaaatggaacttggctgatctgaatttctgcctaactggttcattcttcctaaagtgtataaatgtgtgtgaaaggaatgttcacaccacaccttacagttagcatatgtgttgattgaattgaattcactagaaattctcaccttaactcttcatgttttattcatctaaaatcacataaaacaacaaatattcaaggtcaccattaaagtgcaagaagtagtaagaggtaaatcccaagaaagaaagaagtgtgatgggtagcctgctaattcagaaatgactgaaaaaaaaaaagttaagagtgcataaacatacacagtttaaacaataactgaaaggcaacacttctataattatcatccaggtcaagaaacagatcattgccagcacccagaagcccattcttgatcaacccccattctgccccaagatgttgggatcctcttgtccctgttattctttataatttgaccatctatgtctgcat

SEQ ID NO: 5213 - DNA, 6000 bp, Homo sapiens
cagcctggcctccttaagcatctctagaattataaatggtcacattttctgatatattgtagggatggtggctgtcagagttctgaaatacacgtctgtttctccttatggtagatgatttctttgtttcctttcaagatcaatttaaagataattcttttctgtccagctatttgtatttttaattctagctacattataattatttactatcttaagttagaaaagttatttttgtgtgtgtttaaacaggggtttcctggaagcaccttcatgtcatcctatcaaaaccataaatgagaaactcattgctgaattaggcaaagttttcccgctaaaaaggctgaagtgttcctaccctttgctgccacaggaaggtaccagtgttcttcctttctggaattgtgactttctgtcagctgctttttggattagtctccatgaagataactcaaattctgagtccctgactggtgggacatcacaagatgtggaagactttctagtgtcattttcagaacttagccttctcaagaatcctggaagagatggtaaagaagaagcttgtgaaggaacctgtggccaggccaagatctgccttagaccttctctcctagtgcatgttcaggatgtcatcgaagtaccagacttcctctcaggttctctgcacatcctcagtggacctgtctttcagaagtgccacattttgcctttcacaatgccagcatttcatgaaactttatttatccttggggttaatcaaaatctgaaggatggctgtcttcaatcactgctggatcatctgaagggcattctagatagcctgctgacccagacattgccggagagctctaagctgagcagtttagtcaaatttgtccttcagtcaaatggaaaggattatatgattcgtgtgaagactcataattttagcccagattgtactgaggatctaattattgggtctgttatcacatctgccactagtgttatacataaagaccagtgttttgtgtttgtgtctatgaacttggacttattagccatgcttgtctggtgtatctctgactggagaatgttgtggacgtttgataaccgtttcctgaaaaattttgtccctggcaaaatagaaccctttaaaagtcattctctgtatcctccatgttatgtgcatgatgttagtttttggatagatcagaagaaaggatttgatgaactagagtttcacactgtggcccgagcagtgtctcaggacactattatatccatacagtttcttagccgtttccagcatccaaagactcaacaggtcagtctctgctatagattgacctaccagacctgtgacaaggccctcacccagcagcaagtagcatcaatgcagtcccagtttaggaaggagattcaacaacacctatatgttatacctcggtagtttggtaaatccttttctgcagtgtgatccttcattgcgggggatgtggaggaaaattaccaacttgcaaccagtagtcctttctggatttttgtttttgtaaaatcttttactttgtgaccatagctactgttcgttgatctttttttttttttttttttgagacggagtcttgctctgccgcccaggcgggagtgcagtggcagtggcatgatatcagctcactataagctccacctcccaggttcatgccattctcctgcctcagcctcccgagtagctgggactacaggcacctgccaccacgcctggctaatttttttttttgtatttttagtagagacgaggtttcaccgtgttagccaggatggtctcaatctcccggcctcgtgatctgcctgcgtcggcctcccaaagtgctgggattatagatgtgagccaccgcgcccggcctactgttagttgatcttaaagataccttgactctattactgaaacttatagattataatgtgattggtgacatttggagttgtgtaatattttggtcccgagaagtgactaaaacaataaacaaaacagcatcttgtactttagatgctctattgttgaacaggcagtagaacttaagtgtctcatcaaatataaatatgttttccacactgtcaattactcttcccttaactttgttgtatcatttcattaaatcaccttatgagagtagtttttggcatcagactaacatttattagcttgggaaattgcaaatattccacattaattttggtattattattataatcatcaccattttaattctgtggttgaaagtcatggaacgaataaagtgtcagatttagggttaacatttgggtctgtttgactctaaagcccatgttctttctgctactttctgttacttcttccctagtctttaacagtaatcgttcaactgtgattaaactttgcctctctggattttggggccttctgttgtaagtatctctaagggacactggaaaattagcttaggattctgcagaatgcggtactctaatgtgaagtaatgtatgctcctgttaatagttaggctccacatttgggattatattctgtgagagacatgactgtcttatttattcttagagaaaagcacttgggaaggcaagaatggaagtacagagacaaattaggaggttattgcagtaatgcaaatgagataatgacctggaccaaggtggtaaaatgttgggttggataatatttggaaggacttgctgatgaattaaacatttgtgtgtgggtgagagaggtgtggggttagagaaataaaggaattaagcaagactactaggtttttgacctgaatacctagaagattggaagtgtcattaacttggatggaaacactgccatacgagtaagtttggggagtgggataaagaatcaagggatctcttacagacacatctattgctgagctctccacattgactattttgctaactgatggcaggtaatgtgatttatccctttcttctatcctcagtagtgcttggtacatgtataaggtagcgtttgaaagctggatcttaaaacaagggcaggaatgtgaagggagaattgttaggcaagtagggtgtgcattttgggcagaggacatccataaacagagatatagataagggagcatttgggggcactttctaggctagttagctgggatgtaaagtgtgcataggaaagtagtgggagataagattggaacggtaagttggggctggagttcatgaataccaaatgctagaataaggagtttgtactttatttggtaggcaataggaaaacatccggtggttttttattaaggaagtgccccagagtagtgctttggaaaattaactggttaatgttgcacaggatgaatttgagatgagtgatccctgtggagatgctattgtgttagtcctacgtagacagggagggacctgcattagacttaaatgaaaaggaggagatgggtatatgagatacagttaggctgggtgtagtggctcacgcctataatcccagcattctgggaggctgaggtaagtggatcacttgaggccaggagttccagaccagcctggccaacatgacgaaacctaatctctactaaaaatacaaaaattagccagtgtggtggcaatagtccctgctactagggaggctgaggcaagacaatctcttgaacctagggggcagaggttgcagtaagctgagattgtgccactgcactctagcctgggtgagcaaggaagactcttgtctcaaaaaaaaaaaaaaaaaaagaagaaaaagaaaagaaaaaaagagttaagctggatatttgaacttggtaactaatgactgcatgtgagaattgagcaatatgatcaatctccattttcaatacttgggaatttttagtaggaaatcacaaccttctgagaccttgtcaagagattagcattccctctataaacttgtcccagttactggcatggagctcgacagggtaggatatagctctgtgattagaggagtggatagagtgtcaggattagatgaatgacccccaagatatgggggtcacaggtatgatatcatcaatgtgccagtataaaaatgattgtaggaaatgaagacctttcaccagatctggtgggaagagagagcatgggctttccggtaagatagtcctgggctggaacatagctccaccatttactagctccaagtttatttagtttcctggtaaataaaacaaggttgttgtattaagtttaaaaaggataaaatatgtaaaatgcctaccacaatgccgtagtagcgatgacagtgatggacatctggttcaatttgccgcacagaatttcatcagtctacactctgccattaccggtttgtctctctgaagcagtttttagctacaggctgcctctgtcactcttaccaaaatacagagaaggcaaggtgttaaaaatgacattttaaggaccttttagtagatagctgtgctgtgatatttaactgaatacttcacatctcactatgtagatttctttaatcactttctatttgttttttcatttaaataggggagctgagaggtggttttttttttttttgagaatggagaatgctgaaaagtgacggaaaagagggttggagggaggtaggaatggctagagttagaagcaggtggatgggacagccctgatgaagaaactcctcaggttctatttcttcgctactcggggatctgccccaattggcccagtaacgctataatttagtattttctgcgcatgtcaaggtcttttgtccctcggcggacaccgtttgccagccaaagctatgtctgcgcgctcaccgacttcatagggtgccgaattcttttttccccaggcttgccatggctagtcgaggggctcggcagcgcctgaagggcagcggggccagcagtggggatacgcgccccggctgcggacaagctgcgggagctgctgggcagccgagaggcgggcggcgcggagcaccggaccgagtacgtgtgcggcgcggcaggggcgtggccggccggcggggcggttcggggctgcccccgggagggtcttagctgtggcgcgcggggctcagtccggcctggcctcaccgcgggaggcccgagctccctcttcagctaggtcctattggtcttcctgggcgggtcagcattcagtcttcgcccaccttagatccctccactgcgctgtaaaactgccttggagtgcggatctgtgatgctcctgggccaggcctagagtgggcacagcctctgtgggagatgtagacaggatcaaagagtataccttttacggctgttcctcacagctccttttattctccctcaagtcccgaccctttactgggcccatccaacccgccatcacctcttcccaaaccctggaggctgcaggttagaactgcattaagggagctgtcaacatatggaattggagtaggctatgtaccttgcacctaggcttctatctgaacataagggggaatgaataaagccatcaaaagcaatgaccttgttaagaaaagaaagaaaaggagaatgacagctttgtggccttcaagtgagtgattagttggcttgggataaatggagtgacataaatgcattgagctaaagtgtatgagttaatttatgccttaaaagcaggaagtggaaggagtgattgagtgattaaagtcaattcttcagaaggctgaggcaggaggattacttgagcctaggagtttaagtccagcctgggcaacatagcaagaccctatctcataaaaattttttcttaaaaatctgaatttttattaattttactgagaaaaaacaactagctattcacctttttaggtgaataacttaagtgctttgatgtcccttgccctttttgtcctttctatctagatttaggtcttctgattagcaggtccttcctgacatgcttttttttttttttttttttttgcttttgaacaggttatctgggaac

SEQ ID NO: 5214 - DNA, 6000 bp, Homo sapiens
acattcatattgttgtgtaagcatcaccaccactccactttagaacattcttcatgttctcataccgaaaccccatacccatcaaatatgtccccatttgtccctgcctccagcctctggccaccaccaattcactctctgtctctgtagattgactctagatacctcatataagtggcattgtacagtatatgtccttttgtaactggcttatttcacttggcacaatgtcttcgagattccatgaggtagcaggtgtgagaatttctctcctttgttaagacctaataatattcctttgcatgtaaataccacatcttgtttatccatgttgatggacacatggcttgtttccaccttttggctattgtgcatagtgctgctatgaacataggtgtggaaatgaggtgtatatttttatgacctcttcccatcaagcaattaaatttctaatatgaataattgcactctgagttatctgttctgtaactctgaagaactgtgtaacagaatttcttaaagtgagtcatccctgtattctctttactctttcaaaataggaggcagcaaagaacaaatgtccatttcacacccaggtggaaaggcccattagagtctaccagtgaggaaatcattttctaagggtgattacacacgcagatgtcaaaaccctcaggtaactctctgctctcctgccttggttggacagtgccctgaacttctgtccttctcagaagattctccccttgcccacccttctctggggtctaccatctcgactaccttcagtcccttccctagattatcctacatggggctgtagatccctcaataacaacaatatccaagaattccacacctctctaaggttttctgcatttgagggatgtaataaagtacaaaagagatgatttttttttgccccatacttcctttgacccagatagattgatgttctactgctccccaagtcatttgcaaatggcacaagaactaagacaaaagaagaggatgagaaaagagaaattccaagagcttggaaatgggggctcagtttttatctacaaagtgggttaagaaatggagaactgtaacaccatatagaagatgtctatatttcctgcgtcacttctccagttgaagttttctgtaaggggggaagacccatggaatatcaatatgtgtgggctgtcgttcccacttattcttcatgatagcactgcaatgtggctctccatccccatttcacaatccagaaaactgagccccggagccattcagaatttcccaaggttgtggagtttagatgggaacaaacttctgtgtgactccagtgttgctactgacatgaccccgctctgccttccccacctttcagatgagagcatttcccttgttttctgtgagatgatttttagaaggggactgtgacagtctgttctctctgggggtacatcagagtttgaaggagatcagcaagggtcccccctctttctaagctgcagcgagcagttcttggagctcgggaggaagttctagctctcccttattctctgttggctttctcctttgtttctcttacaatgggccaacaaaacccccatctgtccctaactcatttcctagccctgcctgaatgtctttgctccccccaattcatatgttgaaatcctaagccccaggattataaaattagaaagtgagcctgtaatcccagcactttgagaggccaaggcaggcggatcacctgaggtcaggagttcgagaccagcctgagcaaaatggagaaaccccatctctactgaaaatacaaaattagctgggtatggtggcgcatacttgtaatcccagctactcgggaggctgaggcagaagaatcacttgaacccgggaggcggaggttgcggtgagccaagatagcaccactgcactctagcctaggcaacaagagcaaaactctgtaaaaacaaaacaaaacaaaacaaaacacaaaacaaaacaaagggaaagtgaggcctttgggcagtgaggaggtcatgaggacagaagaagacacagccctcataaataggatggatgagtccccttgtaaaagaggcccaagagcactcatccaccccttccaccatgtgtgaacacagtgagaaagtaccatctatgaaacagaaagctggctctcaccagacgccaactctgccagcaccttaatattggacttcccagcctccagaactgtgagaaataaattctgtttgtaaaccacacagtttacagtattttgttatattaatagcatcccagatggactaagacaacccctaatacccactactacttatttccttacaactttcaacaatgaaaagggtagaaataaatgaaagatttaggaggtacatcaggtggaacttcctgactccaaggaggtaaagaattcaaagaggctgttgtagatcctttttcaggaaagctataaggcaaagggacaccctgcccccaccccgcccacttggactgggcacactcctgcctagaggcagggggaggcaccaaacgacctccagagggccctgctagcccaggaagctgggagcctctggtgcagccgctgcttggccgcagatgttccctgtcatcaatcacacagtgcatctgtttgctgtgccgcttgtttaaagagtgaggcgtttgctaattgaaaactaaaagatccatccgtctcactcacagccagcatgaaatccactcagccatgtaagattggggtaaaaaaggcagcgcagagctacagtgtccttgggtgggtgcaccttatggagctcatcttcttcctgcttctgcctcctgatgaacagggctcccctccccaccccagagcagccagagatggcccatattaccattgtctaacatgtcctcatctatttttctcagtaaagctcagagatcgttatttttagtccccacttaaaaatggagaaactgagacttcgcgagatcaagcaatttaggcaagcccacacaacaggtaggtgaccaaggcgggacaccaatccaggtgctctggctagtctgacccatccctgaacctatgtagaggtgctgagttgggaggtaccaaatatctccttatgtggattaaacctaggaaagaatggtccaagggtatacaagggaaacactgggatgtcaaccatatctgtaatggctgatcccttaaaggcaattatggcaacattctaggactcctattggtgtaatatctccctatagagcctgcaggcaaatggaggccagtccagatcagcaagatccaggggcaggagctgggaagagtcatggtggggtgaggtggggagcccacagcttcctctgctcccgtgcctccagagatggctgcatttgagagaggtgctgttttgtgcctctggagagggggacggttcagtgctggactctgtgggatttgcaaggacactccatctctctgggactcagttctcccttctgaggtgaggcggaattggatgaatgttaaggtcctttccagccctcactttctataattgtgtgtgtcattggaggaaatgctgagatgaagttaatccttgtggcccagagaggctggattccagccatgcagggccgactccctgctctgcagagtcagtcctctgcccctgctcttccctctccctggagtgttgtgccaccttctccccttgggaactggtgttgctccttcaatgcccggttcctgtaaagtctcgcttttttgtgcttcacagcacctgtttaagcctcagttatttccctgggggtcccctctctggattgccagggtgcgggatcaggggcctggttttctttctgtgtgtgacttctgaatctgacacagaatctggcaaactgaggacagttggtaactaattgctgcagaagaaagaaaagaaagagaaagaaagaaaaagaaaggaaggaagaaagaaagaaagaaaggaaagaaagaaagagaaagaaagaaagaaagaaagaaagaaagaaagaaagaaagaaagaaagaaagaaaagaaaagaaaagaaagaaaaggagagaggaagaaaaggggagaagaacgaggttcctctgcagcccaaatgacagtgggcagggtagcagcggaacacccttcaccactctatctctttctccctctccccactccctgcctcacacacctcagtttggagtcaagggtgagctggaacccctgaggcctccttttgcatttccatgtcaggtcaactccaaacaggctttttcctttggatgagtccagcaatagaactgactacatagattccaagacctgaagtcagaaaacggatgcggacctcttccaacacctcctctccttgcctgacttgctggatgggtggtgcctcccgcaacccttggcttctgagtcctcaaaggagaagactggcgagcagacggtgaggacccagcctgcaatcacagcttattactctgggtgtgggtgggagcgcagtgggcggtcgagggttgcgttcccgcctcaaaacaagggatggcggaatcccccaacccctcctacccgttcaggccggggatcgccgaggaggtacagctcctttggtggggggcgggggcggggcctgtctcaggggcggggaccggggcacctccctcccgcgctccccgcgctcgggcgccgcagagctgtccagcttcagtgccgaaccggcagcctcacgcgcgcaccgcgccgcctccgccccgtccccgcgctccctcctgcccgcccgccccgcgcccggccccgccccgccccgccccgccgcggcccgtccactgctccccgcgggccagagccggccgagctgctgcccgccggggctctgaacggcgcggcggggccgggagccagggaccggccgaggagagtggcggccccggacggctgccggaggggcggccgcgcgtggatgcggcgggagctggaagcctcaagcagccggcgccgtctctgcccccgggcgccctatggcttgaaggtaagcaccggccggatggagcggcgggcgactcagtgtcacggggagaggaggagggacctccaaggggagcgaggccaggaccagaagtttgtgcggccactcctggccgcctgctcgggagcgcccgcctgggatccggctctgcatgggctccccgtcgggcgggggcagagggcgtctggagcccgcggctgctatcccctctccctccttctcagtagcctcctcgccacttagaagggaatcctctccccgagcacgagcgggcgcagctggggcagcctccccgcggggcgcccagggcagcacggcggagccgcggcatcggagggcgggagggaggccgctccccacaatctcgggagggcacttcccccagcacccaagcgcgagacccggggctcgcggccagagtttccgacttcttccggaggaagaagggctgtttttggcaactctgtgttggtgcgacctgacccttttcagtttctaaggcagaagctaaggatgggggagaggcagattctggctggattctcccgctcccacggttgccgctgtccttggtcctgaactttcgttctccttcgccttctcttgggttgacacctagtcggggagggaggcttgggtgccagacccgtttctacccggcagtgcaggcgacggtggcggcagtagcggagggtgaccgcccggctctcggcccggctctatgatggaccgagagcccctctagggtggtatgcggagacaagagacacctctaagcaccagacagagcgcttccctatccctgtctgaggcgggcagcccttgagtgcttcctcttgaagagcagaggtaagagggtgcgtgtgcgtctacataacaggcttcaccatggacacaagtcacagcagtgcagctccgtggggacaggcgcttgctctcagccac

SEQ ID NO: 5215 - DNA, 6000 bp, Homo sapiens
ttaaaactaaaatatgtctcttatatatagtatatagcttgatcatggctttaaaaattcattctgccaatttctaccttttaattgaagagtttcatccatttacacttagtgtaactactgataaggtaggatttatgtctattatattgctatttgttttttatatgtcttatgtgtttttgtttcatttctgccttgtgttaaacagttattttctagtgttccattttaactcctctgtcatttcttttactatatacattttaagttattttcttagtagcctgataatttcaattaacattttaaattataacaatccattcagattaataccaatttaattttaatagtataaaaatctttgctcttattacttccattcttttcttactttgtgctgtattgtcatacaaattatatatttttgcaccatatacccatcaatacagatttataattatggctttatgcaattgtctttaaagtcagatgagagaacaaaaagaattacaaacaaaaaaatgcatttatactgtcttttatgtttacctatatactttcctttactagcattttttatttcttaatgtggattcaagttactgtcttatatctttttatttcagcctaaaggactccctttagtatagtcatgcatcacttaatgaaggagatacattctgagaactgtgttgttaggcgattttgtcattgtgtgaaatagagtgtacttacacaaacctagatggtatagcctactacacacctaggctatgtggcatagtctactgctctgaggctacaaacctggatagcatattaccatactgagtactgaaggcaactgtaacacaatactaagtatttatgtatctaaacataggaaagatacattaaaaatacagtataaaagcttcattataatcttgtgggaccactgttgaatatgtggtacattgttgactgtcatgtggcacatgactgtatttcttgtaggacaggtttgctagcaatgcattctcttagtttttgtctatctgagattatctaaattactatttcacttttgaagggtagttttgctagatacagaattttggttgacaatctttttctttaaggaattgaatatgccattctggcttccatggtttctgatgagaagccaactcttaactgttaaactgttgattgaagatcccttcgtatgtgataagttgctttcctcatgctgcttccaagaatctttcttgtctttggccttaaacaatttgattatgatgtgtttacgtgtggatctctttgatgtatcctatttgaagtttattgagtttttttgcatgtgcagattaatatttttcatcaaatttgtaaagtttttggtcattattttttcaaatattatttctgcttcctctctcttctctttcttggattctcattacacacacgtacacacacacacacacacacacacacacacacactacatatttttgatgttatctcaaatgtctctgaacctttgttcatttttctccattcttttttcctttctatcccttagactgtataatatcaatttacatatctttaattcacagattctttcttctgcctgctcagatctgctgttgagcccttctagtaaatttttcatttcagctatcatactactcaactccagaatttatatttggttcttgaaaaaaatatataatttctatctccttgttgatattcattacctgataagatattattctcatacctttttctagttctttggatatggttttctttacttctttgaatgtatatagaatagctgatttaaagttttcatcttataagttcaatatatgggcttcagggacagtttttatcaattattttttcccccggtgtatgtgccttactttcttgtttctttgtgtgcctcataatttcttattgaaaactgcattttaaataacataatataatacagcaactttggaaataaccttctctcccttcctcagggtttgttgttgttgatgttgcttctttgtgtgtttagtgacttttctgagctaattctgcaaagtctgtgttttttgtcatgtgtggccactgaaatctctctctgcttagtgttcagctagtaattagacagagagtttcttgatgcttgagaccaataagtcaccttgtttttgcagagtggctctgtgtgtatgttgggacatgccttcaactctcagacaggacattgacaactccaccttagccttcctgcttgtgcagagccttaagcttagcccagggtgagagctcaggaccttccttagtttttcctgcacatgtgcacagccctgggcatgtgcaccctcctgtgcgtacatatggctttctatattccttgggatatttcagagcctttcaaggccctttatagatattttattcccccacattttctttttaagctttttgtttagccctttttttttttttgcctcaactgttatccattgttttaggcagccacaaagtccaacaattgtctctagttgttttcaacaaatacccttaaggaaaaagctgttcactccaggcaagctttgagacaggtgaaataaagacagtcttgcaaatggtatcttccagggaaccactagacaggtcaaataattacaactctctgggaatgaggctttgaaggaactccaaggctgttctaccccttcttgtagctgccaggctgctggtttccatgatgattgtggtttgttggttttcaaagctactgcagagttggggtgagggggatggaattggagcaagttaaaatgccacaaggctcactcttctttctataattatgtcattttttttcttgaacgaagacttcccagattgctataaacttttgattaatttccagagttctgaaaaaattgattctcaccattttttgccatttttctcattgcttttaggggggaggaaattttcagaggattttactcctaccattttcattgacattacgtgcaatatattttaattacccttctttgtgattgctttgtcacttctcaaaactcagttcaaatgtctcctccattgcaaagccctcttctttgtatcctcagggcagctattcctctattctcctatacctctgggtttatgtctttgttatttcacttttcataataacagttacttacatctgtttctatccctttttccagtctgtaagcacccagtctgtgacttgttcatcctccatgcccaggctagtttctgacacacggtagatattcaggtttgtagtctgaagagtattgtcctaggagacctcagagcctagccaagggcttctgagttccagccaccatttctctccttcttctataattcacagctgacctctatctcttcattgtcttatgtgtgctctggtgtgatgagagtaagttcagaattgacacactgagtgtatgatatggtttggatctgtgtcccaacccaaatctcatgtcaaattataatcctcaatgttaaaagtggactctgatgggaggtgatttgatcatgggagtggatccttcatgatcaagaaaccttcatgattcatcatccacttggtgctattctcgtgatagagttctcatgagatctggttgtttaaaagtgtgtggcacctcccccttctctctcttgctcttgctcctgccatgttagaggccttgctccccctttttctttcaccatgattggaagcttcctgaggcctccccagaagcagaagtcactgtgcttcctgtacagcctgtggaacagtgagaacttcttttctcttgaaattgtccagtcttaggtatttatttatagcagtgcaagaattgactaatacagtgtatgaggaaaatagggagcaaaaagttaaatcctgtgtgggtgacattcagcaacaacaacaacaacaacaacaacaataataatagcagctactgtttgctgaatacagtctgtgctagacaccaggctatgggctttataggcaatatctcaatgaattctgacatcaaccctatgaggcatgtactattatcctcattttacaggtgaggctgagtaagggaagtgggagaactgaggttggatgaaggcctgactctaaagcctatattcttaactgtcccttctgaggggtttttgagcagccagttggaggaaaggaagccccacctgtgtttgccttccccaggacctattctgcctccttgtctaaagagatgtgcctgctcccaggtgtgtttagccccgtgtgggctcacttgggtcaccttgtgctttgaaacaagatagcactgagggctcctgctgcaactggctcccagggcagacaggggtagaggccccacttccctggcattggggagacagatgtggccctcgggcaagaggtgacaaagatcttccatcatcaccccaacaattccaacatggtgacagccccagactgctagaaaagccaacccacatggaggcgagataaaatccagagggctcagaaacatttcaacaaatgctaatatcggtctctccaatacagctctgtcagcaggaagggagaattctgccagcatgcatgcatggggcacactttttggcacaagggaccttgttgctaagcaacagtagttggcctcccctcctccccataaccttttcctctgtttctgagtttccagttagcagatgggaggggctggggttgcctagcccagcccagcccttgtccccctttcctgcaacaaggggcctattcatgggtcctcagcagagttcattgtctctgtggcgcgtgtctgtgtgagtgttggagtagggatacagggaggggccatgtgcgaaccagggagacctcatcttccaaccaagcttgctgggctagctttaatcaatgctggcctgagaacaggagcggaacattgcctagtagaccctgaggctttacaacagtgccactgacccctatggtaaggttacgtctctgtgccatccctgctgtggcctctctctctttctttctctctccctcctctgcccttgggattctaggctggtggaaagagcctcctgaggcagctctggtacaggggctggatcctagcaggggccctgtgtggccaatttcctgtttcctccccagggactgccctttattatcctctttcatccctcttagatctatcaagtgctttgcacatatgtggtgctcaacaaatcgttattacgttgaacttccactcaaaaagaggagcaaggagtcctgtaattttaaaggccatttttttttctaggctagcacatgagcttgggcagttgaattttgaggtggagcagtacatgaggtgaggccagtttattcagaggctgggtttaaagccaagcttccttggtactgaggcagaagaaaagactggccatgccctggaattctctctagatcaggcctgcctctccactcagagggacatcagctcaagagcaatcacacaaccccagagaagaaatccaaacctcaccttctgttgctgcttctctactatcttatgggtgcttgactggctctcccaagcctgctgtcctgcagcctcactgcctgtgtcctgtgagtctcatctgtaggcacaagaaagaatgtgtgtggtttgatacaaaccatgacctctgtttctcctggaaaagcaaggcctgcagctcttgggaggtccagtcctataggtcctgggctgtggctggtgtagggaatagggaggtggggctggtacctctttctataggcaagatgttggggctgctgcgctgtctgtgagctgaactggcatgggtgctctgggtccagtggaatgattttcggggcaatttggaggtgactgacctaggtgagtctgacaaagtctttccttcctcctgctggagggttaggaagac

SEQ ID NO: 5216 - DNA, 6000 bp, Homo sapiens
ctgctgggagttaactgtgagcgggtgcttaattaaaaattcaggcatatacagtacctgagtttgaatcctgactccgcccaccatttacaagctgtttgactctcggcaagttacctcatttgtaaaacagaaataatactatccacctaacaagactgttgtgaggattacatgagataatgcacataaagtactcagtacagtgcctggcacatagtaaacattcaataaaccttagctgccattattactagtgtatgaagttgattttatttatcaaaactctgactccaacatagcttggaaaccttgggcaaattactaacctctctgtgtctcagtttcctcaccggtaaatgcgaataatattatcactacctcctgggactgttgtgaagattaaatgtgttaccacgtatggaactgtagttaagtgttagctactgtattaggggacccaggtacactggaaaagagttgagggacggccaggtgcggtggctcatgcctgtaatcccaacactttgggaggctgaggcgggcggatcacaaggtcggaagatcgagaccatcctggacaacatggtgaaactctgcctctactaaaatacaaaaaattagccgggtgtggtggcgggcgcctgttgtcccagctactcaggaggcttaggcaggagaatcgcttgaactcgggaggcagaggttgcagtgagcggaaatcgcgccactgcactccagcctgggtgacggagcaagatgccatctcaagaacaaaaaaaaaacaaaaaaattgacggagctaggtgcagtggctcatccctgtaattccagcactttgggaggccaagacggacagatcacttgaggtcaggagttcaagaccagtctggtcaacatggtgaaacccggtctccactaaaaatacaaaaattagccgggctaccaagcaggtgcctataatcccagctactagggaggctgaggcaggagaatcacttgaacccgggaggcagaggtcgcagtgagccaagatcgcaccactgcactccagtctgggggacagggcaagagtctctctcaaaaaaaaaacagagttgaggaagaatacacagtcagcctctttatgtagaatgtggtccacattcatggactcaaccaaccatggactgaaaatattcaaaaggataaacgtttgtgatgatggacatgctaattaccctgatctgatcactatacatcacatacaccacaacatcactatgtacccccatgaatacgtacaattatcgtgtccattttttaaaatataaaaataaatcactgaaaagtaaaatacccagtctggccaacgtggcaaaaccccgtttctactcaaatacaaaaattagccaggcgtggtgctgggcggctgtaatcctagctacttgggaggctgaggtaagggaatccaggagacgtttgaacccaggagacggaggttgcagtgagctgggttcacgccattgcactccagtctgggcgacagagcgagactccatctcaaaaaaaaaaaaaaaaaaaaaggctgggcgtggtgactcacgcctgtaatcccagcactttgggaggccgaggcaggcggatcacgaggtcaggagatcgagaccatcctggctaacacagtgaaaccccgtttctactaaaaatacaaaaaattagccgggcgtagtggcgggcgcctgtagtcccagctactggggaggctgaggcaggagaacggcataaacccgggaggcagagcttgcagtgagccgagatcgcgccactgcactccagcctgggccaacagagtgagactccatctcaaaaaaagaaaagtgaaatagatttgaaaccattaaaaaaattttcagaaaaaaattggatggttgcatctgtactgaacatgtacaaacttttttacctgtcattattccttaaacaacacaactatttacataacatttacattgtattagttgttgtaaataacctattgtttaaagtatatgggaggacatgcataggttatatgcaaatactacaccactttatttattttttatctttttaatagctttaagtagggtgggcatatgcctatcccagataaaatactacaccattttatgtaagggacttgagcatttatagattttggtatcctcagtaggggtcctggaaccaatctccagcatatactgtgggatgactatatagctaatttagttcaacactgtacataacaatgtatcatattagctactatgagatataagtttgggtaattgtgtatctgtatgtatacatatttagatatccatgtacacatactgatataacatttctcatatataacatataaacatatggttaaatgaacatacagtccacgtaggaaagggctggaaaatgtttgcattttttaatgagtttgaccccatgtattctattctatttattccccaaacatttagcatgcctgctgagtatcaggtgctgtgttggataccagaaatacaaagatagatcagacagtcctgtacctttaaaaagctagtgcagtgccatcagagccaaaaagaaagaccagctacacaagaccatctcaaaaaccctttacccaaatgaatcttcccagtcaggagtccacacattaccttagaccatctgggagaccttcgtctgatttggaagcacataaactagaagattccggaggactgggggcattggccacaacaccagcaacctcagacgctgccattatgctctgtacattcagaaacaaattacaggctacaagtttccaaagtttaaaacaaatgtatctctcccccctcagaatgtccacacaacagagctgtcgcagtaaagaaacacaaaaacctgggctccgggagaaaatacttaagagtactaaaagagacattgtatgcaaagtcctagtgtcctagtgggcagcaatcctcaggagtcactgtatttacataaatatctaggagtctgtgcaaagatcttattttcacttttggcagaaatgtagtcatttcaaacaatacatcttagtctgccaggatcttccaagtggtcccaggcctaccttgtctgctatcatttttaataaaagacgtacttttcggcctagtatcaatcagatctcatgtttttaaatcactttatggctgttacattcaaagcattctccattaatttaagggaagtttttggaggtgtctgcctgtaagtcaacaagtaatgcaatactgggcaatccagggtgcatattttactgtcagcgtgctccccacagatgggaaaggcctgatacccactaactgagcaaagaacagactcttcagagtgactagtggtgcaaaaaagaatcctgggttctctagcgtgaaaaagtcaaggtaaaaaacatggtaacacaagtaagggaactgggacggacgccttttttaaaaatcaaaaggtcatcttttatgccgcagagcaaacttatgaccttatgaggagaaaagaaaatcaaaatacttgggaggtggggatgaacatcgggttagtttgcattcttgcttttattttaacagcatcacacgtattcccccccggaacactgaagagcgcatagggcagataggtagatggggctgtgtcaacacctcagtcacagcccacagaccctctgtgcctcagtttccctcattatacaaagctcctgggagaaaatgggcccaaaccgccattgctgctccctcaggtgcaaacatcccgtctccaacatagcccagggctggggggtcctctgcgcccggtgaacgaaaccccaggacaagggccatgcatgcaactccgtggctagagagcccgtggcgcgggtaggaacagctggctggagggtcgagtgtaccaaaaagaactccgcaacccggggcgaccaccagcgaagcaggggcgccggagccacgggtcctcgggcgagaacaggggacagacgggaaggggacaatggggggaagcggcgctgggtggccttggccaccccccacaggggactgctaggctggccgctggctcggaccagacccccctccaccccttcccctcggtccccccaccccgctgccagccacccccccgtcccacttctaggccgggacccccgcctcggttctcacagcaccctccacgccccccacccgacccccatgcccggccctcgccccgcaacccccacccacgctcgccccgcacacacctcccgcgccgcgcccccgggaggaaagtgggggagggacgggacgcacctgagcgggcggagcggggggagggggcggccgagccacggggggaggggtcgagcgccggcccgcgcgcggcacctcccacttccggcggcacgagcggagggggcgaggctccggccgcgagaggagaggccgcggtggcgccgcgccgcccccgacggcgccctctggcggcgacagctggcgccgccggggcacggggatgctgcgggagacccctgagatacaagtggactctcccggggcgcggggaagaagggagagccgactgcgagaaggaaggcgacctgggtgggcaggatcccctctgggaagattacagggacagtcggggccatggcggtcagaaggagaagagcaacgagtggcttttaaaggtcggaaccgaaatgccctttacagaggacgccatgaaggagagccttctgaagagggaccatgtggaagatgccccgaggactcggggaggcggagcccgcgggttcagcccccagcgcccgcacggcccctgcctgcgtaggccgcccgcgggagccggaccccgggcgccggttgctgtggcccgcgggggtcgccgggccgcaggcgccgcgctgattggctgcgccgcgggcggaagtgatgctgctgtcactgctcctccggctcccgggaagccgcgagtttccgcagggaggcggcggcagctgcggcggggccggtgagttgggaactaggtgtggggctggacctgggtggtcagggggccccagaagtgggggaagccggcgtctgaggatgagggagctgcacagagggtgcctgaggtcctggcgtgggggaccaaggagatggggccccagggcccagaattcctggataatgtgggtgctaatgaggagaggggcacattgcacggagcgatcgaggccgacggagggagaatcgggaaactgacccggtacccaagctggcttctaggagccgggtgtggaacagcgaggacagtagcttgggagcaggatcttggactccaggctgcccattctcttcttccttgtcaattaagagctgtaaagggaggcctagccgttgggagaggttgagacctgctttcagaaggcatttaaggttcctttcccagaagcctgggggataaaaatgctgctttgccactagtagacagaaggagctcctgcttctctttcttcctgacatctgtggtgggatctactgagtctgaaggagtctgcctagcggggccactgtctggctaacaagggttttgtttgttagtttgtttacttagtagagtatgcagactggggaagacacctaaatatcttgggagaattgaggctcccgggggcagggagggattgagagggaatatgcctggaaacctaagagaaaacgagaggaagaaatgtagtatgaagatttttagaggtaaaggagaggtggcataagttctcctttccaggaagcctttcagtaaaattcccatttttctggaatgctttgaggtagagccgcttgggtgtgtatctgagtactaagccctgccccagggtggacccagtggagagcaaaggcttttaaaggagcccagccaccataggtacacacatgtcctgccaccccatttgtctgtcccccagttctaacttggctctttttttttttt

SEQ ID NO: 5217 - DNA, 6000 bp, Homo sapiens
tcagcctcccgagtaactgggattccaggcatccgccaccacgcccagctaatttttgtatttttagtagagacagggtttcaccatcttggccaggttggccctgaactcctgattcacgcgccttggcctcccaaagtgctgggattccaggtgtgagccaccacgtcaggcccctgacatgctttctttaacttgtcataaacaggccgggcgcggtggctcacacctgtaatcccagcactttgggaggccgaggcaggtggatcacgaggtcaggagttcgagaccagtctggccaacgtggtgaaaccccatctctactaaaaacacaaaaattagccaggctggccaacatggcaaaaccccatctctactaaaaatacaaaaattagccagacatggtggcacacgcctgtaatcccagctactcaggaggctgaggcagagaattgcccaacgtggtgaaaccccatctctactaaaaacacaaaaattagccaggctggccaacatggcaaaaccccatctctactaaaaatacaaaaattagccagacatggtggcacacgcctgtaatcccagctactcaggaggctgaggcagagaattgcttgaacctgggaggtggaggttttagtgagccaagactgtgccactgcactccagcctggaaggccagtttataagaagctatcccattgtttttaatggttacttaggatttcattgaacaaatgtcttgttccctatttaattttttttttttttttgagaccgattctcactgtcacccgactggagggcagtggcgcaatctcggctcactgcaacctctatctcccaggttcaagcgattctcctgcctcaacctcccaagtagctgggattacaggcatgtgccatcacacctagctaaatttttttttttgagacagtcttgctctgtcacccaggctggagtgcagtggtgcaatctcggctcactgcaacctccacctcccgggttcaagcgattctcctgcctcagcctcccaagtagctgtgattatgggcacccaccaccatgcctggctaatttttttgtatttttagtagagacaggatttcaccatgttggccaggctggtctcaaactcctgacctcaggtgatccacccacctcggcctcccaaagtgctaggattacaggcttgatgattatttttggttttgcttaaagagatggggtcttgctctgtctccaggctggtcttgaactcctggccacaagcgatcctcccacctcagactcccaagtggcttggattacaggcgtgaactatcacacccagcttcatttgttttgaatccaaggttttgccatagtacacactgctgaaatattgttgtttttgttggaaagggtcctagaaatgccattgcccaaagagtttgcatttttaacatattaataggcattgcaaattactctccaaaaatggaataatttacagtccaaacaataccttcaccaataccaaatgttaccaatctgagaggagacgaaagaaagaaaaaggaacaaagaatctactgttttactttgtgttctttcaactattaacgaagttaagcttttttcaaggttttttatgtttatcatccatttgaatttcctctgtgaattaactgttcacattctttgttcatttttctttttcttttcttttttgtgttttgttgttgtttttcctcactctttccccttaccctttgttcatttttctatcaggttgtttgggatttatattgatttgtagaagctctttgcacattataaacattagccctttgtctctattgtgtgataaatgttgtttcttaatctgtgactgatcttttaactttgtaaatgtcagttttctcagtagttgcaacagtaataatcctaatagctgacctttattgagcacttacaatatgctggacaccattctaaatgctttacatggattgtctcatcgaattcttaccttttgaggtttgaactattaatatcattatctccattttacaaatgataaaatcaagtctcaaaaaggggccaggcaagttggctcacgcctgtaatctcatcactttgggaggctgaggcaggcagataacttgaggtaaggagttagagaccagcctggctaacatggtgaattcccgtctccactaaaaatacaaaaattagctgggcgtgctggcgcgtgcccgtagtcccagctacttgggaggctgaggcaggagaatcgcttgaggaggcagaggtttcagtgagctgagatcatgccactgcattccagcctgggtgacagagggagactccgtctcaaaaaaaaaaaaaattagccaggcatggtggtgtgcgcttgtaatcccagctactcaggaggctgaggcacaagaatcgcttgaacccaggaggaggaggttgcagtgagctgagatgaagccactgcactccagcctgggtgataaagtgagactgtttcaaaaaaaaaaaaaaggactcaaaaagtaagtaaccagagtgggctctcccagttactaattgaaccagaattagaacactggtggtattggaatacttctgattctacagaagttttaaatatttaagtcatcaaatccatccagtttttgggtttgtttaccttctagggtttgttagggaggtcttcttcaatataagatcatgaaaatattctatttttcctgtagttttattttaatgttaaattctttaatctatctggagtttattttcagaggaatgaaattggatttggttttttttccttccaaatgggctgccagacgtcccaacaacagtttttgaataatgcgtccattttcctctaatacgaatgccatctctatcatatctacaattcccatagatacatttctctattttgatttcgatttttttaacttgtgtctaatcatcttattgattagggttttctatccatatcatataatctgcaactaatgattcctttgctttccaacatatataacactttttccattttcttgtcttttgagtcaatcagaccggtctgaaccgtgtaggataagagtagagataatgatcggccgggcgcggtggctcacgcctgtaatcccagcactttgggaggccgaggcgggaggatcacgaggtcaggagatcgagaccatcttggctaacacggtgaaaccccgtctctactaaaaatacaaaaaattagcggggcgtggttgcaggcgcctgtagtcccagctattcgggaggctgaggcaggagaatagcctgaacccgggaggcagagcttgcagtgagctgagatcccaccactgcactccagcctgggcgacaaagcgagacgccttctcaaaaaaaaaaaaaaaaagagtagagataatgatctttcctttccaaagcctgcctttaatgggagtaacgtagcctgttattactacatttgttgttgttgtcgttatcttgtttaaaaagtttcctggctgggtacagtggtccatgcctataatcccagcattttgggaggccgacgtgggcggatcacttgaggccaggagttcgagaccagcctggccaacatggtgaaatcccatctctactaaaaatacaaaaattagctgggtatggtggcgcatgcttgtaatcccagctactcagaggctgaggcatgagaactgcttgaacccgggaggcggaggttgcagacttgagaccatgccactgcactccagcctgggtgacagagcaagtctccttttcaaaagaaaaatgaagattccctttcattttttaaaaaaattaaatcagagtaactgctgaattttatcaatggctttccacatttgataaacaatatattgttaaaaccataccggcttttctcctttaagctattagaactctaacgcttttggttcaaggctttaagctcttaccagttaatatagagatacttttcggagtgttaacactttaaagctatcaacagccatttctcctcagtctggctgatggtgcagaaaatcagaggagccataaggattcaagtagagcctcaagggcacaaacaggttcagatgggagaagacccactggctcttacctgcccgcagatcgcaggcgcaggagaaaataagacaactgcactttccccttttggaccctgctccgctggtttgcagcctggaaaaactcttcctcccctttcatcctgctccctcaatctctgctcgtgaaaatcctacccatttttaaacgctcaaattaaataccaccttctcccactgagtcttcccagatcccctagatgtccctccaaatccctactccttaatgccacatcgtatagtgtgaaaccccaccgcggcaggaatcacttaactgtcccgtgtagaatcaccgtttatttctctctgtatctccagcgcctggcagtgtgcctggcatacagtgggtgctccttccatgctgaaagaaagactgacagacgggaggtgtgcccctctccatccgtctggcccttcccgccagggccttgcagggcggactccacctcggcagagggcatcccagacccctctccagccccggaagccggattgcctgccatgggaagactacacttcccagcgatcccagggaaaagcgaaaaccttttggctttgacagccgccgccacaagtctttccgcctccccagcccgcccgggagctgcgagccgcgagctggattatggtggcctgagcagccaacgcagccgcaggagcccggagcccttgcccctgcccgcgccgccgcccgccggggggaccagggaagccgccaccggcccgccatgcccgcccctcccagccccgccgggagcccgcgcccgctgcccaggctggccgccgccgtgccgatgtagcgggctccggatcccagcctctcccctgctcccgtgctctgcggatctcccctgaccgctctccacagcccggacccgggggctggcccagggccctgcaggccctggcgtcctgatgcccccaagctccctctcctgagaagccaccagcaccacccagacttgggggcaggcgccagggacggacgtgggccagtgcgagcccagagggcccgaaggccggggcccaccatggcccaagccctgccctggctcctgctgtggatgggcgcgggagtgctgcctgcccacggcacccagcacggcatccggctgcccctgcgcagcggcctggggggcgcccccctggggctgcggctgccccgggagaccgacgaagagcccgaggagcccggccggaggggcagctttgtggagatggtggacaacctgaggggcaagtcggggcagggctactacgtggagatgaccgtgggcagccccccgcagacggtaaggtggtcaggccagcccttagccctccgcctgcatgagcagaggggagacaggatggggatgcctcaagctagcccctgctcaaatgggctggtggggacagcaggagggacccctccccagccattccccgggggtcacgtggttgttggcagaagtgttcccaagctccccattccctcctcgtctcccctggctgcctagttccccttgctcctcatctgacacatacgccgtctggaaggatttgaggcaagacagacacatcagctggggaccctgacctggaggaagggtccgccacaggggcactataacaggtgtcagccccctctgacagtggcccagtccgagtctcccaaatcccaccactctagaggttggccacccaaccttgtcccctcctctgattcccaccattgttcccagtacctccaggaccaaggaatcctggcagcagttgaataagcaccttgctcccaccatctgggctgccactggtacggcaaagtgaggttgtcgaggcccccctgactgcact

SEQ ID NO: 5218 - DNA, 6000 bp, Homo sapiens
ccagaagaaatgccggaagacttgggaagccagcaagtttagctctgctcattgcactttcttttttttcctatctctcttagtttccataccttccaccccactgctccccagagagaaatgtgacaatgagcttcagctctgtcgaatccggactacatggaacctctctgggttggcttctcaaccgatttcagagttgtgagctgagaaagaacagcaggagagaggccacagttattcaggggactcctgccttgctgggggcttccgcagcccctgaccaaccatcctggtgtcactgctgagacagcagcctgaacaagggcaatgggaccccagagactgcatctgtacaggcggagccccagggctttagaccctttgctccagtgatcttagagccataatattatcatccaaaatgatgagagagtaagtggcaagcatacctagacatcttctgagcccagcagacagaattttggtttaaggagaacctgggtagtataatgacacataatatttttttatatataggcatcacagtctatgaattgtactgattcatctcatctcaagaagatggtattttagatgtatgtgtatatatttgaagccaaaactgtttattttgtgtaattttttgtgcctattagtttctgaatatctgtgcataaaagcttctgtttctctgcctgcacacatttgtgggtacacactatacacctatgtggggtaggaggggggaatgggcatatttgtttgcatttaccttgtgtttggtcctaggaagggatcttggtgatcattccagcccagctctttcacctcaatggtgaagaaactgaggtccagaaaggcaaggtgacttgtcacaggtaacacagctggctatggagacagaggtgacacaagaacctaggatttctgatttgtagatgagaactctttctataatattaaaatcaattataaattttggggagggaagcagggagatccttgttttttcctcccccaactgataagtaagtactaagaaggtcaatcttgaattagctatataataccaaaagttaagtttttcacacagacctggttcagtattgattccttttatgaaaaccctgtttatactcaagttgtcaaagaattccagagggcatatgaagccattgttaaaataattttatgcctttgtttttgaagaaaagtatccaaaatatataagcttattgtttgagttaaacaataaaaacatctgctgtttctcaggatggctctagtcttaatataacatggcaaaataataccccctaaatatccatgattaacctgaattggagagggctcagctcccagtgacttcatatagctgcttcaactggcattgtttaaaaaaaacaaaaacaaaagcacaaaagccaaaatacagacagatcatcacccagcattctgatgcaagaaaatattaaaactgatcactgcttttaaatgggtagtgtgtccctactagaaaggaatcccacaaatttgaggcttaaaaaaatggagcatatgcataggtgccaatgcagaatttctggattgggttcaaatcacattgaagcacaggtgtgcctgtcattaggtgtttatgtttacctgtacacatgaatgtttgcctgggcaactgtgtttgttctcactctggcatgaatatatttgtgtgtgggtgtgaagttttccatataattttgggaactgtcccttctatcaaaatatagcccctctaaaatgtcagctggggaggggactgtcagggtttaaggtgggcgtggggtagaacacgccgcctgactctcttccccggcgtttcatttttcccttgggatttcctggcatgctggcttgcccaccccaatacaactcctgtcgaagaggagacttctaaatacatctgagccaacctgtcattttcaaagacatttccctagatactaaggaagaacaaaatcaatgggaaacacaaaaagcatgaggcctgacctgcctgtttttcaggtccttcttttgttagccatctctccaggctcttccgcctcagtgtgcaccttccgtgtttctgcagcccctttcctggattcccagctccttggctctggctttgtcacagcatggaaggcacaatatcgtcccagcattcccccagtggagctgttccctcctcccagttcccacaggtcaaggtccttgtgagcaaagctgttcccattcatggtagttacctgtgctcactatgcgtcagccatggggcttgtcttatttaatcctcgctacgactttccaaggcagatgctggggatgtccccattccactggtaaggaaactgcagcttggcacacatacatttcccaggcacacagctggcaagtggcagagctgggctgaggactcatctcctgctgtttccaaagccaggctcttaaccatgacattagaaagcttccttttgccagagggggtccccaggtctgctctccccaactgaccacccgtttatttccacgtatatgtctcctcccgggacagccagactgcagtcaccggcacaatgaatgacctcgcccttcgggtaacacacatgttgtggttctttaaagccccctgtgtataactagcataaagcctcctacactcaggttgtaggaggtacttggggtggatgcaaagaagagggtccaccgctacttccagcgtgtgaggcacggagcagctgtgccgctaccccaggcccactcagatcccctcccagcagacagcagcccctttcatcctgtctgccttagcggtttattttaggcatgacctgaccaggtgctctgggtcaataggcttagttttaaataactggattcctctcaatgaccgttccctttagaagggagggggcatggtagaagaataagccagcaggctgagggcggtgagagatgggagctaagacagaagactggaaacgtgagggctctgtcactccctgcgtgacctcggggaaggctcatggcttccccactctgggcctcagtttccttatctgtaaagcaaaagatcggtctgggtcatctcaaacaccccctgcagtctgtccccccgtctctgttctatgcctgtgtttccagatgacaaaacacctcctgcaaattgtttcagggtggtgattttgcatgaagagctgagccaccgagggatgctgcagcttatagagcaagctctgctctggagtcgggaggcctgggttctagtcttgcttctgatacaaccttggtggccttgaacaagttaagccccgattttctcacccgtttaaaggacgaaccttgaaaacattatgctgagtgaagtaagccaagcacaaaaggatacatactttatgatctcacttatgaggtacctagaataagcaacttcatagagacaaagtagaatagtggttgccaggagctgggggaggggaggggaagggggagttattatttaatgggtgcaggattctgtttgggatgatgaaaaagttttggaaatggtaagtgatgatggttgcacatcgtgaatgtatttaatgccacagaatagtacacttcaaatggttgaaatggtaaattttatgttatgtacattttaacatattaaaaaacacacttttcaaaatttagttaaaatttctagggatattttggcaaaacctgggagtgaggagtcccaattctcccatgtgaacttaggccgcacatttcgaggaagtaaattttcttcctctggcaaatgcagctagccagtggaccccttctctccctccaaacttcgcactccacaccttagagtctgcccaggtacagcccaattgtcagggcatactcaaagcagcttccatgaccctgcaaagggagctacagtcctggctcataggccattctcagggatacctggatcccttctctgggttctatgtatcctcttattttggaattaagacgaaaggagggctttccaaccatattgaccttttacagcagacctggctcagccatgcctgagtccccagtgcctgagccagtgcctgacacagcaggtgctcaacattcatttggtcactgagaagacgccctcactccagtcctattctatgccaacttcataaagatgagtgtaaggaataagccaatttctgtcaggcaggaaagctataggggtgggtaggtgaagacaaaggaggaagataacacaggtagcgtagacattaaactgctcattgtgaataaccgtttaaatagtcacaatgtgccaagtgctgaggaaaattcgaacagcgtgccagggggtggctggactcatctggggttctccggagggcaggcttgcggaagtcacgaggggttggaagggcagctatgaactttggggtggggagtagcaccagacagcactgaaaagcctgggattctacccagagcgtccatgctcctcctggggagggtgggggggccgggtaagctgagtccgaaagaggcaggaagctcgtgtcccaggtgacttaggccagtagaaaccgggcgtccttggctgaagcatggcaggctgttggcacatggatgacacatgcctgtctgcgaccacaggctccaagccggtgggtgacagggacccctcgcctctcagacagcggagccgggtcggggcggtctggcccgggccgccgctcctgttcctgggcttgtggggctggggtccgtctgggctccgggctcgcgcggcgctcaccacccggggtgccgcgggggggcggggagagcggccgcctagcccagccccgcggatgacaggagccggggagccgaggagggaggagccgccgccgcagccgagcgctgggctgaggagcagagagagcggggcgccgagtgcgggcggctgggagcgcgctgagcgggggagaggcgctgccgcacggccggccacaggaccacctccccggagaatagggcctctttatggcatgtggctggtaactttcctcctgctcctggactctttacacaaaggtgagacctgcgcgggcggctgggcggcggaggcggcggggccagggtggcgcggctggcggcgaggcggggtgcccggcgggctccaggtgcgtgggggaaccgaccggggtgcaaggccccgggtggggcgcagcggggaggggcaggcaccctgacaggggccgagtgagagtcagcccccgaccgctccgccagccacccgcgtctgccgttttggggcgcgcccgtaggggtggtggcaaaggagcccctcatctccctgctccctgcacggcggcagttctgccctggacccctcccccagccccttgccctcttcctgcggcttggtggcactgggaccccggagtgccctccgagtcgaggggtcctcaggccgtgactcttgacctaggagtccttgcttattcaggcctcggactcggcggctgattcctccgctatgtccgtgcgtccctctcccgccgcggaccccagccctggcgcgaatgttggcgcaccgcatggcgcttatccgcgcattggctggaggcagggtggggatagtgagagtcccgagagctggaggtccctcggatagcaagtttgttctccaaacccagaggtcaccctcccccggccctaccccacccctctgccccggctttagccccggcttggtgcgccaccgtggccacctcgggcagcgcgccccaagatgcgagattctccgcttccgcgcctggccagttggacctggggacaagtcttcaggctggggggcgtgtccctcttcccggagagagggggttgctaggggtgggtccaggtgtccggcatgtccagacctgcggctggggcgctgcgtacctgatccgcgaggcagccgggatcgggaggttggaagagggcagacatttccgactgaagcca

SEQ ID NO: 5219 - DNA, 6000 bp, Homo sapiens
tgattgactgattgattgtagagagtgtctcactttgtccaggctggtctcaaactcctggcttcaagcgatcctcctagttcaacttcccaaagtaatgggattatagccgtgagccactgcacccagcctttaatcatggggtgtggatcatgcaatgacaggaatgccgattatcagaagaagagcagggatttgtcccactctgccccctgttgccctgaacaagacacaaaggggcagtaaactccatgactaagagaaaccctggggcccctgcgtttaagatcctagactgtctgaaccacaggcctactggggagtcatcaggtggtcttttggtttcctgcccacacttatcttctggcctccccttcgggtgtcccagtcctttctccctcctctttcctctttatccaggggagaagcccagtatctgctggaaatagggaaccttagagttgccccaccagcagagtcccctgagagcctcccttagagctgctgagaggctagctggggaccagggactcggtatggactcatgggctgttttctcttggcttgaaaaaaaaatctctccacatgatctggcctcctcttatcatatctggatgacctagcacctgatgtgagtcctgaggcagtggcgcggctgggctgcgctcagggttcagcattaaatcttaggggagatttagatgagattccagaaaagggaaaattaacctctagtgacaggaagcagatcagtgattgtctggggctgggatggggtggagaattgactgcaagaggtgggaggaaactttttggggtgatggggatgttctagattttgattgtcataatggttacacaggtgtgcacatttgtcagccttcatttaattgttaacttattattgatgcattgttaatttaaaaaaacaaatcttagaacagattggtagcaagtgccatgttcaacaaatggtcaggcaggcaccagtttgcttaattctgaggactcctgttcagccacaacaaagaacatgtaagccatgcagattcatggaagaccaaaaatgaagtaatacggcacaaaaaagaaggaactcagggtggaaattcacagtgaagacaacagctctctagggctcaggtctgctctgtgcagagagggagctcaccccctgggaagaggccttccttgctcttggttggcctggatgttttgagcagctgggacaatatcctgcagaaagtagaaggaataatcacgaggggaaatggggccctgctaacatgtgagtaataaaagggggagacaaaatccagatggaaagctgatcctgtctttacttaaaattctgatattttattcaccttggacttttcccgttaatgcagattttaaaaatatttcattaaaacatgatttatcttgattatttgggcacgctcttaaattgtgcagcctgggcaagtgcctcacttgatcactgatgtccagccccaagggaaaagcaggaagagagaaccagcctctagtccacagaactcaatggcgatcaacctctgcaggcctggagtggggagaggcacggctaggaccacagcctggagggacccaggacggccctggaaggctaagtgggggcggaagagacctgcctggggctgcagctgggaagactgctgggcttggggggtggggcagtacagaccataggagcgttaggtgtgctgggcccaggggtggctcctggtgactcacccccttgagggtggacccagtgtctcccctctgccacactgagtctttaagtatgtagttggtttcctggctgccctcaggcctggagggaaacccacctattgtgccaagagtggtggagaagctcagaagcggggtgcaaagtggggaagggtaggcaagggctccaagcagggagttgggaggtgattcaggggtgaagctgctgataggctcaggagggaggaacatgggcccgaggtgggaactccaaggaagataacaaggctgggaatagaaggcccagagctctgtttcccaggctggagcctcaggaaggagttcccaaggcactggggtagtggtagctagaacagccatggaagcagagagctaggagtttagtctcaaaacagtagtgagattttctcacacctcactctcctggacagctgccaggagatgtgtgcttgtttgcatggctgacatttttctgtaaaactcccttcactccacatggaaatgacccaggtaggaaatgaccagggtacaaatgggcctgatggctggcctacactctccctggggcgttgagggagcagaaggtgggtcccaggtgctgccaatagcctctgggtgtggagtagccagaggtgggcaggtgtctttccagaaggcaaccagggagctgaagggagaaagccagggaccaaggccagagagaaggaggcaaaggaaagggtgggagtcagagagagcctgggattgtacagtcaggaggacagcaaaggaggccgggaggagggggaaggaaagggccaggccagggtcagtggggaagtcaaaagcggtgcaggcctctaagtccagctctgtgggggaagcatccaggtcttgtgctgccgcagcgccttcactctgaaaataggaaaaccaccagctaggaatttcattcctcagtgtccccccgccacccgccccaacacatcaactgtgtgttctcccagggcagggcccctgcctttctgttctttgcccaccactctcactccccagcagccaccgtgggcctggtgctgagcagtcaatccttgctgaactgaactgcccttggtggggatgtcacacgggtcagactgctttgtcagcgaggactctgggacaggccaacttgtgtctctgatgcaaaccaaggaaaagagcaagaggtgaaactgatgttccttcccagccttcccagtgccctgtgccccgtgccaggcacttcctctggttctatgtgttctcattttcccgatggtgaacctgtcaggccttgcgagttcccctcagagttagggttctcattcccccgaactcgcccagacccccaagcctgagctctttccctaggttggtgggaccttcagggaaggaggctgagggtgcccttcggagaccagtggcctgcctgggggatgaagtggaggccctcggatctggcctgggcgtgccagggctcagtggcagccagagaggggctgggctcctccctgggagagagggaagaggagcagctgaggacaggaggtgggtatcttctcaggaggatggatgggaggggcccctttgtcatggtgggctggtggatggggcaggaaggggatgtggcctgtggctgaattctgctctctttgaaagccagggaagtggctcccacaataagccaagatgagagaactctagggtccctgcctgggccctccagagttctctcctccagcctcttgcctctgggttagatttccctcaagacaccctaagctggggcacagtttccactgtgagctagaagtttccgttttcttgaatgtaaatggggggcgatagtagtcacttcctttcagtttttgctcaaatatgtcaccacagagagccctctctgaccatcctgttcccaactgccaggactctgcctcccctaccttctggatcctttcgctgctttgtttttgtgaacggcacttttcactttctaggaggctgtgtaactgatttattgatttttgtctgctttttccccccaacccgcaaatactagagccacagggcaggaggctttgcctattttgttcctgtgtccccagcacctaaagcaatgccaggcactcaatacatatttgttgaatgaacacgtgaaggatgcgtgtgaagtgtttcgcaggattcttggcatcttaagattattgctgctgctgttgtttgctgtgtgacttgagcacattccttagcctctctggccctctgtctcgcagtctgtaaaatgaaaagagtgaaccactaaagatccatgagcttctttcaaactctaaaaatcttggtgcctctgaatgctcaagaaagttcttcccaaacctcaacaggaactcctttttcttttttttttttttgcagttctcagcagcagctcagctggaacttagccggaggtgctaaggactccttttgcaatagcccttcctttacttcttttgactctgaggatcagaatagggtataggtttgggatcacgagtcagcccaatgtttcttggaacagtttccattcagatagttatgttttatttcattgactttgatgtgttgcttctggcactttattgttttcaatagagggcaattcatgatgtgcataattaaaggtcatttgattttcatttctttgttaagagtttcataaaaacaaacagagttcaggagaaagcaattgccagaccatgcgcccagagaccatgtgccctgatttgggatttggacacctggtccttggagatgaaggttcccactgtcctgccataggtggggctctgcccctggcctggaacgtcccctgtggggatagggtcatccctcagaaggctctggagcatctgtttcaggggctcaggtcaacaggaccaagaccatcctctcaaggctctgccctttctctcagggcccctctgaagaagtagctcagaacactcctctgcttctgtgggggcagtttcatgagtaaaggcagcttcaggttcccggtatttggaatttggtattcgctgagtaactgggatggcctcgatgaggggcagaggaacaggtctggctagttctgtgttgtttatactggggattacttcacacgtcccaaccggcttccccgccccatttggtgggggctggcccttggccctccaactcctttaccctacatgcctgagaagccagggaccaagatggatcttctcctcgacatcagctaagcctggaggactcttcccctcagagaccatggagagggacagccacggggtgagtgtgacctcaggcctcgggccagattctcccagcgctgaggaagcagggctgaggctgggagacaggtgggacagctacctctgtgtttcaggtttgggggaaactggctgtgcctcttctagtttgaagctacttacgatcaagatctcttggtctccttttaacgtggttctagaaaaagcccctgggaggagaagctgctgggatttggggtctggctggtgagcaccccagggctatgtggctgagtcgtgggtttcctgctctgtggtctgtgagcactcctgccgggcatccatagtgttacagcaccaactttgccgattgggaatccaggctaatctactttaatctcatttttgctggttggaaaatcaaaagcattctaactgcaattcaggggcatcttgtctaaacccctcactacactcctaaaccttcccagaaaactgtgactttctgggtgcattcaagattttcaaggggatgtttcaacctccgttggtcacttctttttggacttaataactttcatgcttgggaagtgcttcttgatgtttaaccacaagtcctgctaccactcaacttcctttcttctgctgctcttggggtaggagaaagcagctggcctgtcctctgtgggaaagccagtcatacacacatgaaggcttccaaagatcttgttctgctgtgcctccactttcttttcctccaggaaatcccttttgtgctctcatttctcctttaggtcttgttttctgccccctccaaattctctgtaccttaccgacatggtagagcctgggactctgggaagaatgggctagcactgggtttgggaaagatcagctcatcctatgttttggcttatagttggcttgtggtccattctgcacccccaatgtgtttctgcaaactttaccatca

SEQ ID NO: 5220 - DNA, 6000 bp, Homo sapiens
agccaggccaggagggcatctgactattcagctgacaaggcagtcctgtgagcggcaggctgcaatgaatgacaaaccttcccaaagcctccagttcccagccctcctgagccaccatcctcccttgatgggcaggcagggggccatggtgatccatgaagcagagagagaaatatagctctggggtgctgggtagggtggttgacaccctgtccgggggcttcaaaccccaccccaatgtggcctatagtaaagagatgtccaggactcaccccatctcggagctactgcaagggcagcacataccttctcccggaagtgggcacacaccctctccagctcgggactggccggtgagcatccctctggtcaggatatttcggctccctcctccctctgccctcctccttccaatgagctcatctgtctggggctccctacccatctcagcctgaaaggatgtttggacagaacctggcagaaaacagaaacagaggaagggagggattgaggaggtggctgcctacctgcctctgcccagagcccctagaaagcagagaggagtgagaagaagcgatcgactctccttgggagaaggattcagaaagagtttatctttactccaactcgctggtgtgaggtggactctgtgcggtgttccttgctggaccgctaagccgcgtgcctgcgggttggtttggtacatgctgtcctgttaaccccctcggcacctgccaaacttcagtggacgctgagactctggctaggggcaagccagtgctctgagctggaggaagggagtggtgagtagggaggggtagagagaagacctcagtgcagcaggaggaagctcctaaaagtttgtccaggtagcgtccactcaatccctacccaagtggcagaagggtttgtggacatttaactttaagttagtgcaagtagagaatctcctgcctgcagtttccccatcctgagaccggggctctggttaccaccagggggtagctcggggaaggcgagatgcacctcttggtgttgttctggggaggagctgtgaggtgggtgtgtgtggggggaggcgggctccctgcagagcccgttgtcctccagctccaagagccgagtcagcgctgcgctgagctccctctgttacctgcagtgccccagcaggagcgcgagggtttatgggggaagaggagggagagggaggcaggcggggaagggcaacaggggagccagagtgggaggaggctccctgccaggctcttgttacttaggaggaactcctctcaaaatagcgctggagacctccttggagctctctattgcccttcctcctctgcacagggtctcgatgccttcctgagaactgacaggggaggaagcattccatgtacccactctgatcatctgtacaaggtgatcctgctccagggggtgaatgccttccagtgtaagagcggctctggaggctggcagctggagctcagcccattcctgcccatccgacttcccctggggcatgctgattcctctctaggctggcccctgctggaaagcaggcacccaccctccttcctagctcagatccagctccctaggagggcaggggagaaggagaccaactgagtcagttgcttggtccctggggatttttgttgggctgactgcttcaaagaaccctacacgaatccccaaggaaacaatctccttccccttaaatctaggccttgtctcctgcagcctgagagcgggcagttctctgacaactctgtggcacagggcccaatcggcctctgcatctttgaaaactggctcttcaatgtatttctgagctaggccacccaagagctgcgtgtgcattaccccatcaccaggaatcgggcttgtccgaccgtggctggggactgtgtacccagataccacccctgccctcccccaagggacttccagcagaagggacaggagccaaggtgtggtgtctgtttcttcctgtccctatccagtgtgactggggactcttgagctgggtgaagaggtgctaaatcagggagggcccctggaaaagatagttttgaaaaggtaagagagaaggagctctgaccttttgacaccctctcccctggcatcctcagtagcagcctctgagttagatcgatgggctagggttttgagaatttttgaggaaagtgctctataaatgtaaaatcctctagcccttaagctaatgcatttcccaagcactctttctgcccagctgcggagccctcctggagttctttagaggaaagctgggggtgtggattggggaaatcaagtaatgggggaggttctaacgctgactttaacagtaactgtgtagctgacctcgggttacacattctacctctctgagcctctttcttcatccctaaggcatgagggtttcctatggacccttcaaactctatgaactggtgaggtagcagtgaggtagcagggaaggtggggagaggacactgaggacgttggccatcttttcctgtcaccaggatctaaagatatccctgcagctctgtccctctcctccccctgctctgggcaggggtcactttccttccctttggctcacctcctctctcacctcagtctagggttctgagaaacatgacccctgctgtaaaaataaagtggtcagtttgtatgcctggccctgcggatctagtgcaaggacctcctggggaaggacagggtaagcctgcggacctggagacagatggggaggcttagcctcagggcccacagacctctttaagttcaaatgtactgagtgtttatcctgtgcctagctgtctgctgagcacttttacatgcaataatatctcattccctctttacagctaggtccacttttgatgttgcaagtcctggagcaaaggtacaaatggaaattatacatatgtctaaatattaatcaggataacaaagtgttaagattgatgttttatcctctgcctttaattacttttccttcatgataacctggaaaaccatgtccaaaatgaaattttcaggccattctctggtacacactcttctctggtcctgtagtgagaggggctcttgtgcatgcctagggtgtgtgtcaagttacatgcactccccatcacctgcatacagctgtcccttgcccactgctctagcccttgagtgcacacctgatatggccagcccttgaaaggacagatctggggaatagggaattccagagttcctgatacctggagtacagtctagaaggggaggaggtgcatgcccccacctgccctgcccccttggtcccatggactcattctccagtgaggggcatggccagaggagggccagaatgagggcctttaaaaccagaaatcagggctgaggcttctgttgcccaggtccaggggtaacatcgctcttaataagcctaggaggcaaatatcattgcattcaccattttataggtgaggagcagaggctcccccagaagaccatgtaacttgctcaaagccatacagtcataaatggtggcgctgccagagcctctgtgccactatagggaaggcagcgaccctctctcctgaaaaagcaaacagacattcagcactttgcctgcaacctcaaggggtccgtgatcacgccgaagtccacccagagacccctcgttaagaaggcggtgcgttggtgtgcctgcagcagaagtcagaccatgaagtgggagcgggcttcccagtccggaccagtcctagacagtaaagagggcctgtgatgcagggagggtcttggatggttggaaaggtgctgaggaggagatcgactcatttacagaaccaccagcccaagtagcaccgctcaggtgaaactctttcacttgggcctgtctgggaaaaggcttactcgttcacagcctcgcctcagccctctgacctggttgtcaccctggactcctccacccctaccccaaaagggaggccgagggagtctgccgttccgaagaaaacaggagagttggaggagggcgaaaaggcagcatctgagggggacggcctaggtaggaaaaatgagaagcaggggtgcagcgggagggtgaaatggggcgcaggacacagaccaggcgcggaccaacctgctccctaacctggagcgtggtgatttccaaggggtccatggagaaatgtggggcggggtggcgtgggggtgggggaagggagggccggggcagtttgcaatgggaaagctctgttccgggcttcctaaaacaaccgccggagttgctgagcgatggggcagaaggtggcgggagcgggtcccgaggctgcacgcgcgccatgtcgcacgccaccgaggaggcgcaagctgcagtgggcaagcccgcacacgcccacccgttgcggcagcgtccgctgcggactttaaagcggtcccttggcggtcctgggagagggagccgctaaccttcccgtgttcccccaagcaaagcaaaacagtcttccagcaaccgaaaagctccacctctactccccccgaactatgctcctaattggcagctcagcgcatgggatgatgcgggtggctgcaggccggccctgcagtgccagccgcagcagcccagccccactggagagggagttgggggcacggcgtggtcccggggctccgggaccgcgaggcggggtgcggcaggcagggtgcgcagcgggcgggggctccccggcctacgcggcggccaccgcccctcctgcggctggagcgcttccagagcagaggcgcagcctcgctcgccgctgcgctcgctccgtcttcctcccgctcctgctccggctcctcctactccttccctcccgccgttgctccagcagccggctcccagcagcgggcgagcgcgcctccccctccgctccctccctccccctcctctcgctctctgcccgctaactttcccgagccccgaccggcggcgcagagctccggggtagctttgtggccgaacgccgacctcgggcggagagcgcggctgtgcccagtatcccatccccgcgacccccgcgcgctccggagagaacaggactatgcccggggctggggacggaggcaaagccccggcgagatggctgggcactgggcttttgggtaaggcagccccagcttggtctcttctcttgcctccccccacccccaaagaaggggacactcgagaaggaagatgccttggatggggtgggctttggagtgcggcacggaatgaggatggtggccgccggcttcctgcctggttcctgcctggttcataggctgtgctccctggggaccgtgtgcgtccctctctaccccatcagcccgccagtctcaggattagtttttttgctgtccttggcaccttcggctccaggtatttggagctggatcttggggctgcagcgcgggtctccagagttcagaggttcaggatgctggaggaggggggtccgtgccttgagtgcaggggataccaggtgggttgcacgtgtgactgttggaatggtggtttccatcccggcccagagccgtttgcttgtttcccaggcaccaggcatgcaccagttgggggtgggggagtccccttcttcctgggcccttttcctgctttgctcctctgccctgtacctccctcaggagccactgccttccctacagcagcacctgaaagctggaaggggctggaggggcttgcgggatcattcaaggccctttaggaacggccttgtctctcttcctacaaagagattccgtagggaagacctgtttgacctgctcctggctcttcatttttgaagtgaatatggagacagagaagacatgtccagaggacacggaggaagaagcattattaatatctattaatatgcacatgagagttttgagtgtcaaactccaagagattagggaatgatatttattcatccaggatgtaatctcctcataaatcatagccagactttaatg

SEQ ID NO: 5221 - DNA, 6000 bp, Homo sapiens
ccactgtgctccagcctgggcgacagagtgagactccgtctcaaacaaaaaccaaaaagaaaaaaaaaaaaaatgcagatttggattccttgggactggggtggggcctgtagcactgcctttctcacagactcccaggtgacacccatgatgctggcctggggaccacactttgaaaagtgaggctgtaaggtaaataactagggaggctctctatagcctcaacgaggcattccaaaggtaaaaggaaactaccttcctttgaattatctgtaacactgcttctcccagcagggtaggtaattgagagctgtctaataaaaccttcactgataaataaccctgggcacaaatgccaaaaccacagggcttcactcctaaaaaagcacatctttgacactggtgtcttcattcggcaaaacacctcttagagctgctgcttcccagactttcactggctcctggggaaggcttactctttcggagcagatgggtgtctggaggcccaagtgggttgtggggaagttccggggtagctctccccctctcttgccttggctctgcctgctactgcccctcacccttgatctagctcctcctgacccttggtcctggggggctgagttggatgaagactgttctaagtctggatacgtagtttctctttgctgaattctggatagaaacagatcttctggatccacttcttgcctcagatgcccccaaaataggagcttctggacctaatgtgagaccaagtgagacaggcaagcagcttccttcagtttctgggcctcacgggcaccctctgctgcattaagaaaaaaagaggaggccggctacgtcaaaccaaaaatctctggcaacggggcagagctgacatgtgtctgcggcagcatggatggctgtgctgcagagtgggacttggcagtgcacgcctaagcgggagctgaggcccggcttgtgccagtccacccctccgggcacagctgtgagctgctgacagcggggtagacctcagggccggagggcactggggatggggccaggcatggccactgaaggagacttttcttccaggctgccccacctctccttccctgcaattctgccctgtgggccctgtgttttgtgaatgggccagccagagccagaccctagggatgggacagaggcacttggggacagaatctgtgtgtgatctgggcagggacaaccacaaagggctcttagactacccacccttctgccttctggcaactctgcctcaaatccctggcccccttgctcctccccagcccagaacagcttgagaggccttggaaggatttcatttcctccgcagtgtctactttcctcccttagctctccagattcattaattcactcaggtgtgcccctgtacagtcattcaccgtctgctgacgaagtttctgccctgagccaggcactgtgctggattctcactgtttctccatagcctgcctcttagcccttgcttttatgtcacctgcaggggctaattgcttcatgtgtcttgttggtcttctcttccctgtgcctttctagacaacctggaggtagctccatttatccttcccttggtgctaagcaatgtggaatgctggagacacccagagtttcacgaagaccttggtttgaatcctgactctgcccttaaactctcatatgtaaacttgggtgggttgagccccatgaacctctgtttcctcatttgccactagaaaaagaataggccgggcgcagtggcatatgcctgtaatcctagcaccttcggaggccaaggtgggcagagcacctgaggtcaggagttcgagaccagcctggacaacatggtgaaaccccgtctctactaaaaatacaaaacttagccaggcatgatgatgggtgcctgtaatcccagctacttaagaggctgagaagggaaaattgcttgaacctgggagacgctggttgcagtgagccgagatcacaccactgcacctcagcctaagcagctgagtgagactccgtcttaaaaaaaaaaaaaaaaaaaaaaaaaaaaaaaaaaaagaataaaggccaggtgcagcgactcatgcctataatcccagcactttgggaggccaacgcgggaagatcacttgaatccaggagttcgagaccagcttggccaacatagtgaaaccctgtctgcactaaaaatacaaaaattagctgggcgtggtggcaggagcctgtaatcccagctacttaggaggctgaggcaggagaatcacgtgaacttgggaggtggaggttgcagtgagccaagattgtgccactgcactccagcctgggccacagagtaagcctctgtctgaacaacaacaacaaaagaataaagagaaaaagaaaaagaaaaaagaaattatggtggcgggaacctgtaaacccaactactcaggaggctgaggcaggagaatcacttgaacccgggaagcggaggttgcagtgagccaagatcatgccactgcacttcagcctgggccacagagtgagattccatcgcaaaaaaaaaaaaaaaaaaaaaaaaaaaaaaataataataataataataataataaaataaataaattaaaaaaaaagaaaaaggaaaaagaaatcacctatcccagggttaagattaaactgacagggtgggggcgcggtggctcacacctgtaatcccagcactttgggaggctaaggtcggtggatcacgaggtcaggagttcaagactagcatggacaagatggtgaaactctgtctgtactaaaaatacaaaaattagccaagcatggtggcaggcatctgtaatcccagctacttgggaggctgaggcaggagaattgcttgaacctgggaggtggaggttgcagtgagccaagatcgcgccactgcactccagcctgggagagagagcgggactccatctcacacacaaaaaaagaaaagattaaactgagataccacaggctgagcatggtggctcacgcttgtactcccagcactttgggaggctgatgcaggtggaacacttgaggtcaggagttcgagaccagcctggccaacatggtgaaaccctgcctctactaaaaatacaaaaaaattagctgggggtggtggcacgtgcatgtagttccagctactcttgaggctgagacacaggaattgcttgaacccagaaggcagagattgcagtgagctgagattgcaccactgcactgcagcctgggtgacagagcgagaccctgtctaaaaaaaaataataaaataaaaaaataaaaaattgagatatcacatgtaaagtgcttggcacagagtttatgctcaaaaatattagttgctccctgtttggtacacaaagggcccatcacaaatgcaggtgactgctgcatgcgaatctctgccctacttaaccatctccccaggagtatgggggtcacctctgcttaggaccaccttggactccacccaccaagttctcctacttatgacgttagcttattttttcttccttcttcaaaagaaaagttttaaacatacacaaaagaagagagaactatatgacaaaccctttacacccatcaccagctagtttcaattatcaagcaaaacaactagtctcgtgtcacctattctcccatctctttttttcgttgaatatatatatatgtatttttgagatggagtctcactctgtggcccaggctgggatgtagcggagtgatctcgactcactgcaacctccgcctcccaggttcaagcaattctcctgcctcagtccccccaagtagctgggattacaggcacacgccaccacacccggctaacttttgtatttttagtagagacagggtttcaccatgttagggaggctggtctcgaactcctgacctcaggtgatctgcctgcctcggcctcccaaagtgctgggattacaggtgtgagccaccccgcccggccacccatgtgtgtctttaacagatagagatgttaaaggacaaaaccacattttatcagacccaacaaaattaagaatgattcattaatacaatctactatgtagttcatatttaacttttcccaattgtctcaaaaacttttctttcctgttgatttgtttgaatcaggtttatccaaaggcctgtgttacattcaattgtaagatctcttgggtatttttctatcagcctgcttcaacatgttctgttttcagaggaaacgctagaatgaggaaagcattaccccttgaaagtctctccaactcactttcctgaacccttttcaataacacaaaaacaagcatctcctttttttttttaggttttttttttttttttccctctggaggcagggcccaggctggagtgcggtgcagtagctgggacaagaggcatgcgacattatgcctggctaaattttgtatttttagtagagatgggttttgccatgttgcccaggctggtcttgaactcctggactcaagcaatccatccggcctcccaaagtgctggaattacaggtgtgagccactgcgtcagcctgggggtgtttttaaatgataaaaggtgtttccctttccagaatctttaaaataaatggattcctctaatagctttcaaaatccaacaatcatcccagtgaagtcaaaaagcagggtttgtattatttcttgttttagagggtaaaaatttctgggattttgttcttttcaaaatgacttttttatgccctcccacctgctttttgaaatccaccaaccacaatatttaccccatcccccttttctctcccccccatctctctctctctcctttacacactccctctctctctctttttagcagcaacatacaagccggccatattagagagatggaaataaagcttccttaatgttgtatatgtctttgaagtacatccgtgcatttttttttagcatccaaccattcctcccttgtagttctcgccccctcaaatcaccctctcccgtagcccacccgactaacatctcagtctctgaaaatgcacagagatgcctggctacctcgccctgccttcagcctcacggggctcagtctctttttctctttgggtaagttagacacatctgcatgctcccgagggttcagaagtgtagccgcaatgtgaagaggatgggggcaggggataggaaagaagacattgctagcgctttccctctgtgtccttgggaggggaggtgctggggactggaagggacgttgctggggagtgcagaaccctgggactacttagtcacagaaatgttgggtcaggggatctgagtgttgctgggggctgacaattgtcaagggaggtgaatcttctctggatttcccctaagtggacctacgtggcggtggggcagagagtggattgacctgcagtctcttcagggattattttttggagttgctgcaaatgcggggtcctgggacttaatgctcccttaaggggcttcttttcagaagcttgatcctggtggatttagggtattaggagagtgtgcaggggagctggtggcagaaagttgagtctgggtctggcttcttggcactcggtctcactgatctgttggaacgtgtgtgggagtaggtgggaagcgggcttggggaatgatgtctgggttgggaggagacctgctgaggcacgcactgatggagaaggcacctttggcttgggccggatggaatggaggaagggccaggtgtagagattcaggaaaaaaatggaacccacaggctgagcgaggttgcagccctttaaatccagcctcagaactgcccagcccagtcttgcagactgtcctgtcaagtgtttgtatttgaccactcagagacttcctggtggggaagtgggctagaaagttatttgcaagcctgctttgtagagtttcattcttgctcctaaacttacttattgctggagcagcaactgagagtcaagtccaagga

SEQ ID NO: 5222 - DNA, 6000 bp, Homo sapiens
ccctttggtaggctgaagtgggtggatcacctgaggtggggagtttgagaccagcctggccaacatggtgaaaccctgtctctactaaaagtacaaaattagccaggcatggtggctcatgcctgtaatcccagctactcaggaggccgaggcaggagaatcacttgaacccgagaggcggaggttgcggtgagctgagatcgtgccattgcactccagcctgggcaacaagactgaaactccatctcaaaataaaaaaaaagacatgtggcttggggacctgtcctgggatgagtggttgaagagaggtttcccgaggaaatgatatttaacttgagatgtgagcgaggagcaggtgttaactgggtgaaggcctgagcaaggtggattggtagaccattcagtcaggaggaacagattaatcttgtttagacaaataaacttcagaaaagctttgctctaaaatattgattactttctcaaatgtggaggaagagcatagtgtggcaaagacacaggctcggatccaggatggctgggtttgaatcctcgctctgccacttgctctgtgttcttaggcaagtcacattgtcattctctgcctcatttcctcatctgtaaaacctcatggggttgttgtgaggattaaatgagttactgtgtaaagcacccagggcctggcattaaccttctctgctttattacacatcaactactgatttctagtgtgctgctatattaagaaaaaggtctgatcttttaatattgaaaacaaggcccggtgattttcccaaagatcaaagagttggttaaaggaagatctgagcccagaagagcatttaaaaaaaacttttagtaatttttccgctaaaatcattgcttctgtcttcacggagttctagaggtgcatccgagtatgtaggactgacaatgagcgttttccattcatgatactcatgtttcttagcatttgtttgaagatggtttggatgtggctctgagttactcggctttagtgccaagattcagaatctttttagagtcgctggcttcctcttagaatagagtggagcggggactgctgcaagatgcctttaagttgatttcaacttaatggtcacattgtcagctatgagcatttatccagtatatgccaggcattttgccggtgctgccccacggtaacaggacacacatctaaataaggcacgtatggtgctgccttttagagtctgcagacttgagttggtggcagacatataaattagtcattactcctccatgcggttggtgagctgcagggggaatgtcccactgctaagtgctgttttctgggcagaggagggagcacaaccaactccctggggaaggcaacagatgtcccagatgtgatgaacttatgttaggacacaccataaaggaagccccttatgaccttcatccatgtatgtatggggcaaggtgggtggcacggagcaggaatggggttttgcttatgttgagagaggtctgtgttttcactagaggttcttttgtttaggggaatctatgtgactcctgatatatctggctcagtgtaattattatccccattgttacaacaaggttcaaaaatggaaacttaagtttcctgttcattctgattcatcatttgccattcttagaaaggtagaagctcagaacctgaaatctcccctaaagctacaaactctgtttctgactcttatctatataaagaatcttccatggtaatgcttcctattttcaaagcactgttatctacgttatactattagatcctttcattatcaatcccttttaaaggcaaggaaacaggttcagcaagatcagctgacttctctgtgtaagtgggacctgaggtaggaacctccttgaatagcttgactctgattttccaggtagaggattttgttgattggagaatacgattaaggaatgtcttaagtaatcaatttttttttttttttttgagacagagtctcgctctgtcgcccaggctggagtgcagtggcgtgatctcggctcactgcaagctccgcctaccaggttcacgccattctcctgtctcagcctcccgtagctgggattacaggcggccgccaccatgcccggctaattttttgtatttttagtagagatggggtttcaccgtgttagccaggatggtctcgatctcctgacctcgttatccgcccgccttggtctcccaaagtgctgggattacaggtgtgagccaccaggcccggccaagtaatcaatgtttattaattaaaatggctaccgtatgtgccagatgtcctagcagagctgggtggggtaccttgctgttaatgcaaaaaacatatctttcctcttagcagattctgaggtggaatctccccagcggcagggtggccaggggtaaagaccacggctgaggccaggagcagtagcaggtgggaactcaagactggttgcactgtaactcctgagagtcagggttcttctgtttagctaagaaaatttgggggtgtttggtagaacagtgaatccttttccaggggctggtaaatgcaatgaaatgaatactacagagataacatgcatatcaaacacatacttttgtccaatgcacagcccaactctcattctagccacactgccctgcctttaaaaagttaaaaagaaaaataagataaaaagtgcaccatgggccaggtgcagtggcccacgcctgtaatcccaacactttgagaggctgaggtggaggatcactggagcccaggagtttgagaccagcttgggcaacacagtgagacctctctactacttaaaaaaaaaaaatagcaagtgtggtgtagcatgcctgtagtctcggctactcaggaggctgagacaggaaggttgcttgagccctggagatcacgtcactgcaccccagcctgggcaacagagtgagaatctgttccctcccccaacctcttcctcccaaaaaagtagtaattctaatttaggtggagagatggggaaaaatttcaggctggatatcctataattttttgtttgtgtgaaacatacaggtagtggaaaatctagggttgtcatctcaagggcatcctgcaatcatttgctttttttctcttgaaaagcaactttcatctaatcttcccttatggccaatctaaagcagcccccaagtgactcttcaaacactactctgttttgtttcatcatagcacttattgacatctggtattttcttattcattcattcatttatttgcttcttttttctccacctcccgctgcatacaaactgcaaatgagctgggacctcgtctgtttttcttgttcaatgctgcataccagtgtctcaaacagaggctgctccgtatagtccttcactattggttttttaaattaatgagcttctcttgacatgattttgtgatttttgttcttttatcttaagatttgaaagttgagagcagcatgttttgcccactgaaactcatcctgctgccagtgttactgggtaagtagaagctaagggactccgtggggtatttgatttctcctgagttctgtgcattattaaaagccaattttacatattttcgattcccttgggtttgttgaagatggaaaccctaatgtggaacttcacagttttgttgaagcagctgttgttgaagccaactagcttatggtttcttgggaagctgaagcttcctgtttccattagaaacagaatgcatttgggtcctaaagggtgttctgggaccctcttacgtgacaaagggaaagtttctctgtggcattcctgcactttaaattgttatctttaaaaccacagttcgccttgaatcaggaactgaaattaccaaagagagacccagagctgtttttcatactgtggccatgtcagccttcttgtggttcctcaaatggactgagctctttcccaatttatggtggtttcctttgcctggaaccttcctcccagcacttcaacctagcaagcccgcccgatgcttccttacccttcaggtttccccttatgctccacttccttctgaggagcctgacctggccatctcctcagaccagattggtctcctgtttatgcctccacctaagtgctgagcttctcgttgctcatctccactggtttctaggttttcatccttttcccccatgcctttttctttatcccatggatgtagttctggaaggagaagaaattaatcaggtgctttgctctcatagccttttctttttctctttattattattttttgaactttggacagtaatttaaaccctgactcagcaaagtatacaacaggattgcctttgctcctattccaggcaatccagagtgtgtacaaacatgcacacaggcacgcacaccaaaatggtgttcattagataatttttctcaaagaagcagggttataatgatctcagaaggtatttagacattttcctagaggtctgtggagcagcctgcaggtttttgccctccgatccagagagctaccagtccaacccctgtatgtggtgacttggtggcactgggggttttgtagttttttgtggagaggttttcctttcttgcagaaaatctcatcttcttcagctgtttctctaccaagattgcccttcaaacatcagtttctctttgctttggttgctgttgttgcttcctagcagtccttcatttaattctacacacagtgttcttaatattaaattcgcttattacactttcaatcacacatggagctgctcaattcttccttacaggaaaattccaaatatttgttggagctaattttgatttctttcaaaataattccctctgaagggtttagagtcgatgttttcttttgtgtcctccctgctgtgtgagcctactgttggggcaggaagttaactgtcttctctcagggaaacagcttggatgaaaagactggcacattttctgttcattcccatcacttggctcttctctgatatgaactgggcagcatctaaatgtatctttcttgattttgttgtctctttgcatagagcatatcttgtgaaaacagaaatatccatgtaatggttttttcttgtagtgaccgctcgaaattgcttgagcaacatagagataatgggcaggggtccctgtgtgaagcacctagaggctggaaagctgatggcaaagctggaggggtgaggcagggagaggataaacacagtggaaatgcaggaggaaagctgtgctctgtggtggcctaattacaaggacctgccctacagccagaatcagccagcaaatgcttttgtaaaggaactaaaagaaagggaaaagaggaagtaaacaaaaggtcccttttcagagagggaaccagtgggagatttaagagcaaggaacaacccatttcgtcgttatggtaagtggaggtgagtttctaaattgatgatcagaaaggagagacttctggggtttcccttatttctttagaaaggttgggaggaagaattccagaaaagtgtaaggggctggataggaggagggagccagatagcatttattgtagtatgaagattgcagaatccttctgatgagccatataggtaactagaggacagggatgccatgctgcctttgaacatgcctccgaggactttgtctatgttggatcatccagggagaggggtgtttagtactccatgattggaattgatttttgttgttgagagtatttgtctaaatgatgtgtcctcttgcctttgacttctatagattattccttgggcctgaatgacttgaatgtttccccgcctgagctaacagtccatgtgggtgattcagctctgatgggatgtgttttccagagcacagaagacaaatgtatattcaagatagactggactctgtcaccaggagagcacgccaaggtaacgcgggggaaacatcactatgtaatagaagcccctgactgctgg

SEQ ID NO: 5223 - DNA, 6000 bp, Homo sapiens
aaactttagtggtggcacatgcctgtggtcccagctactttggggggctgaggctggaggatcactggaacctgagaggcggagattgcagtgagccgagatagcaccactgcactccagcctgggcaacagagcaagaatctgtcttaaaaaaaaaaaaaaaaaaagaaaagaaaagaaagaaaagaaaaagaaaaaaaggaaaaaaaaagtgatggagaaatgagaactttcacaagccaacaaaaattgagagaatctgtagacctgtcttgcaagaagtatttaaaaaaaaaaaaacttcttcagagaaaagaaagatgatataagttagaaactttgaactacataaacaagggaagagctttagagaaggaataagtgaaggtaaaataaaagcttttacttttcttatccttagttaatctaacagataatggtttgttcaaaataaaacagggcatttatccaaaatgcttgataccaggagaattttggattttggattttttttttttgaattttgaaatatttgcaatatacttactggttcaaaatcccaaatctgatcatccaaaatctgaaatgcttcagtgagcatttcctttgatcattatgtctgtactcaacaagttttggattttggagcatttcagattttgggttatcagatttggggtgctcaatctgtaatagcaactgtgtattcaacgattctagtttatggataagggaactgaatgacagcaatgatagaagggacaggagggagaagttaagactactttgttatcataaggtacttgcactaccatgaaatgtagtgttatttgagtagacttggttagttgtaaacatataatactaaaaaaagaactgctggaggccgggcgtggtggctcatgccggtaatcccagaactttgggaggctgaggtgggtggatcatgaggtcaggagttcaagaacagcctggccaatatggtgaaaccccatctctactaaaaatacaaaaattagccgggtgtggtggtgggcgcctgtagtcccagttactcaggaggctgaggcaggagaatcactcgaatccaggaggcggaggttgcagtgagccaagatcatgccattgcactccagcctgggtgatagagcaagacttcgtctcaaaaaaaaaaaaaaaaaacactactggctgggcatggtggctcatacctgtaatcctagcactttgagaggccaaggtgggaggattgcttgagcccaggagtttgagaccagcctgcgcaatataatgaggtgttcccccagaacaaagccagtctgcataatgggcagaagatctgaatcactataaaccttgcttaaaagaagacatacaagtcgcaaacaggtatatgaaaaggtgcgctacataactgatcatcagagacatgcaaatcagaactacaatgagatattatctcactatggttaaaatggcttttatccaaaagacaggcaataacaaatgctggtgaggatgtggagaaaaggaaccctcatatactgttggtgagaatgtaagttagtacaatcactgtagagtcatgtgtttttttaaagaacattggctgggcacgttggctcatgcctgtaatcctagcactttgggaggccaaggcgggtggatcacctgaggccaggagttcgagaccagcctggctaacacggtgaaaacccatctctactaaaaatacaaaaagtagctgggtgtggtggtgggcgcctgtaatcccagctattcacgaggctgaggcaggagaatcgcttaaacctaggaggcagaggttgcagtgagccaagatcatgccactgcactccagcctgggcaacacagcgagactccatctcaaaaaaaaaaaaaaagatgtttaattttatgtgtcaacatggctaggcaaaggtatccagatagttggtcaagcattattctagatgtttctgtgaagatattttttagatgaaaataacatttaaatttgtagactttgagtaaagcaggttaccctccctaacttggatgggccttatccaatcagttgaagactttaatttgaaaaagactgacctccccagaagaagaaggaattctctcagcatgctgccttcagacttgaactgcagcttcttccctgtttctccagcctgccagcctaccctagagattttggacttgccagctacctctcaaactctctctctctacccccatcccccatatatgtattgtttctgcctaatacggtccaggaccagatggcttcattggtaaattctaccaaacatttaaagaattaacaatccttctcaaacacttccacaaatagaagaggggcatatttcctaactcatgctatgaggctaacattaccctgatattaaaaccagataaagacatcacaagagggctgggcatggtggctcacacttggggagaaacactttgggaggccaaggcgggaggatcacttgaggccaggagttcaagaccagcctgggcgacacagtcagatgtagtctctacaaaaaaatttaaaaattacccaggcgtggtggcatgcacctgtagtcctggctactcagaaggttgaggccagatgaccacttgagccccaggaagtcgaggttgtggtgagctgtgttcatgccactgtattccagcctgctgggtgatggagcaagactatgtgtccaaaaaaaaaaaaaaacaaaacaaaacaaggaaagaaaattacagtcaaatatgctctatacatattgatgcaaaattcctcaaaaaaatactcgcaagccaaaaccaacagtttattaaaaggattagacatcatgaccaagtgagatttatccaaagaatgcaagggtggttgcacagcattgtgaatgtaataaaaggaaattgaattgtacacttaaaaattgttgaccaggcatggtggctcacacctgtaatcccaatacattgggaggatgaggcaggaggattgcttgagctcaggagttccacaccagcctggacaacatagggagacccaatctctaaaaaaaaaaaaattatttttaatttaaaaattagttgggcgtggtggcatgtgcctgtggtcccagctgctcaggaggctgaggtgggagaatcccttaaacctgagagatcaaggctgcagtgagctgtgatggagccactgcatgccagcctgggcaacagagcgagaccctgtctcaaaaaacaaagcaaacaaaaaaaacaatgccagctgcccacattactgggtggagctatctgaacctttactagttcagagtggtgcctgattcatgagtcatttctttgcttgaataaatggttaaatttaatttgtctaaggtttttctttttaatagcagtaaacactgctcaggtgccacaactgacatccttaactgcaaacctaagtccttcaggagaggtcatgcctatcattaaactccatgtgccttgcccaccccctgtcccctgtcccttcagctcaccttccatatgttgaggggatgagcctcctaaagtaaccgaatctgcttttttttttttttttttttttttgagacagagacttactctgtcgcccaggctggagtgcagtggcatgatctcggctcactacaacctctgtctcccgagttcaagcgattctcccacctcagcctcctgaggagctgggattacaggtacccgccatcatgcccagctaatttttgtatttttgtagagacggggtttcaccatgttggccaggctggtcttgaactcctgacctcaggtgatccacccgcctcggcctcccaaagtggtgggattacaggcatgagccactgcacccagcctgaatctgcttcttaagctcacaaacttctctgctggttccactttggggaattacaaggaattacattccttggcttggcaaagaccatttccagactggtgccaacatgttcctccagtctatctcaaaacccttccctgcatgaacaccaagttctctgcagctaggctgaggggtttgctcttctcttcacatgctctgcatacattgtagtggtctccagcccatttcccttggcaaactcctatgcggtcatcaagactcattaggactggcgcagtggctcacgcctgtaatcccagcactttgggaggccaaggcgagcagatcatgaggtcaagagattgagaccatcctggccaacacagtgaaaccccgtctctactaaaaatacaaaaattagctgggcgtggtggcgggcacctgtagtcccagctattcaggatgctgaggcaggagaattgcttgaacccgggaggcggaggtggcagtgagctgagatcacgccactgcactccagcctagcgacagagtgagactcagtctcaaaaaaaaaaaaaaaaagactcattacaaatgacacactattgtgggtctcccttagtcctccccagacagaatggttctactgtcctgtgcttccgctgtatctcttgcagataacagtgagaggccctgaatttcacaccacaccagggacaggatcttgagccattccatttgaaatgttaagggaaatggtaactctctgaggttggtggtcttggggccacccaaggaacctggcatccaggttacaggtgtgtggcctcgactgtgtccctggcctttgggtgcccactccccacccccaccaccatgctctgagggaagggcctgagccattggcaccagctgagactgtgaaatagaagaggcaaagtagaagcaagggaggtggccactgtgccctgagagcaggaggggcaagcgggccacacacagaccaagcacacgtcccctcaggtggccacgcctcaaaggctggactttggccgacttggacaggcaggtgagccaggctgtgcccagcaagccgaaggtgcctgggcttgctcattcagtcacagtcacagccaccatgccagggaggacctgggagctgtgcctgctactgctgctggggctgggactggggtcccaggaggccctacccccaccctgtgagaggtaggggtgtggggaaggcagcaggggaggatggcaataagagggaggctgggatgagatctcaagctctggggtcggtacttcagagggaaaggaagagattataaaggaaggaaagagtagggaagagaagaaaatgagaattcctatgtagcaggctctgtgctgggcactgcacctgcagtccgttttttttgttgttgttgttagagtcttgctcggtcgtccagatggagtacagtggcaccatctccactcactgcagcctagacctcccgggttcgagagattctcgtgcctcagcctcctgagtagctggaatcacaggcatgcaccaccacgcccagcctgtcattgatttttaccaaaattttccaccgttggaagggacattaggcttggcgactgtgctgggaatacaagcgtgagccaccgccccctgtcgggacctgcagtcctgataccagacgcagctgccagagcctggcctgaggtccaagagcctgctggccagagcccgccctcccttcctctcctcctccaagctgccccttgaactgtgcaggcctcttctcaggattgttctagcaaactttctgctccagcttcctagtctgggtgtgagaggcagcctaagggcctgaagacagcacttgggcttgagccctgaccctcatattctctctgtgacccagggcaggtcaaggctctttcctgagcctgagtttccatcaccagggacagagatgagtgaccctgtcctgtctcctggactcaggcgatgtccacccttcgttccacatggatttatggagctgtggccacatcagccactttaccagctcctgcaagaacaataataatagaagaaaaacagctgggcacggtggctc

SEQ ID NO: 5224 - DNA, 6000 bp, Homo sapiens
cagctcctgcctatggagcacgtgtagagggggtggtaatgacaagggagctggcaatgtagcactggactatcaatagattcagccacaagaccttgccactctaagtatgtgatatcccaacaagctcccaagaaatggtgctgtaggtacactgcccaacctctggcctcagaagccatcttttcctagactcaaggagttgattcaacctctacaggactggggctcatcaatgcttgctgaggacaggggaaggaaatacctgcaaaaggattcaaaggaatcctgggggaattcacattctcccaagagccccttcttcatacatgtgggaaggtctttggcacacagtccctttcttaaagaggtaggatggaaaggtgttaagtatctttctcccaaacccaagtagttgtctgaggaatgagcacatgagaataagagaataaacaatgccttctgaagtgtgggatggcagggctagacagaaactgacaggtcagcaacaggtttgtctgagccagaggaggtggtggggtagcctgggcctccctagatttccctgtaaggaatgatggggagaggtgggggtgaatgaggtaacctcctgtggccctgcccatgcattgtcactggactgccaaatcagtggagattcctagagtctgggtttctaatctcaaagggaggagaagacatgaaatcaagggaggagagaactcagggccagaaccagggatgcaggaggaagctgtcagtgggaagagcagctagggtttaggggagcaggttatgcaggaagttgtccaggtagaagctttccctatgaagaccctcttcccccaagaatccttcaggaaccctcagaccccctagtgatctccattctctgacttctttgatttattccctcaacttctccactgagtgcttggtcctatgctgccagatactgcttcacaattcagtatctgaactgtgagtctacctagttacatgagtctccctagttagtcctccctctttttttttttttttttctcttttcttgagacagaaagtcactgttgcccaggctggggtgcagtagcgagatcttggctcactgcaacctccacctcccaggtttgagtgattctcctgcctcagcctaccaagtagttgggactataggcatgcgccatcatgcctggctaatttttgttatttttagtagagacagggtttcaccatgttggccaggctgatctcgaactcctgacctcaggtgatcctcccgcctcggcctcccaaagtgctgggattacaggtgagagccactgtgcccagcctagtcctccttctttcttccattacttagacctctagcacttacattctgccttagagtctagctgattgtttatatgtctgctttttccatgcatcaggaagctgcctaggggtgggaaccatgtcttagtcatctcttttccctcaaattcaaccaagatgctccaaatatgctgaagtagactccctgggggcaagcaactgcaattatattagtttgtatcctccacagtactgaagagcttcctatgcacatagtagggattaacaaactttgtaattttaagaagtctaacagaaaatactcaagtatgctttgagaatttctatgccatttctgtcttttgaaatatcattcatgccataccagtggaatgggaaatcctggggcttgcttttaattaacaacttttttctagactaagaggggagaggtgggaggaaaaggaaaaagagtgattcagctgactggacagagccacagatagagtcctgcaagtatcacagccccagactatccagaggggtctcattgtctttgtggcactatgaaacatttttgggacaggctttgtctagcaatcacattcagtggattggccttgctcattgggagccactcaaggctacttagaagaggtgtgcatctcaaacactgtctgctcagtccagggccactgacaagtcaactggtctgtgaatcctagggccggcttcagcattcaggaaaacgctttgaacttttaccagggaaggcacacaatttcaagtgaagccaaaagtcatgtgtttgtttctccttctgattagtctgatcatcaactgggactttatcatcatgggaacaaaaatactcagattatctgacaagtatcttagtaaccattttctgatagtaacatgtatatgtggatgatgaatccttagtctctcttgtctttgattacatccttccaccctccccaggagggtggtggtagggagggctaatgatctctggagaagaaagagataaagcttcccaataccaggctgggaaggaagatttattaggattggcctcctaataaaaaaggaaatagatacagactggctctcagacctccagggagtctcagtatactcgtcatcaacaagataactgaatgctgcctcctctgggatcccacaagctcctcctttccaccagcttctggtgtctcactgtcgctgcctgtgaaaggtccttctactcttataatctactgaaatgatacttctcttcctcaagaccacttactctggtcacaactaattgctccctccatatgcacctattgccctcagtcctcctttcagcctcagcctcattatgtgtgatgatgccttccttgtacacagatgtctgtgttcctagccccatggggacaccctgtggaagagaaaacacttgcctcccgggagtttctagtttaaaaggggcacacgtgcatacacacaacacacacagaaaaataatagcagtgggataagtactgaaaatctggtggaatactagcaagtaaattacgaaaatttatgtattttatacatatctgggtttttgttgttgttaattagagccattttcaagtagaaaagccatttcacatctgatttagtttgtttgtttgtttgttttgagacagtttcccctctgttgcccaggctgggatgcagtggcatgatcgcggctcactgcaacctcctcatcccaggttcaagcgatcctcctgcctcagcctcctgagtagctgagattacaggcatgtgccaccacacccggctaatttttgtattttcagtagagacggggtttcaccgtgttggccaggctggtctcgaactcctgacctcaagtgagccacccaccttcgcctaccaaagtgctgggattacagacgttagccactgcgcccggcctcacatctgattttgagggaaagaagaaactatcttcggcttaaaaacggtcaacatgaccctgactcctggaacatgccatagagggaagagtggacaaagcgctaggctattggagtcctttccctaactcactggtggtgacttcctctctgacaaatggaaatcatttgccgcctaagagcctgtcggggaatgaaaggtaataaagatgctggtgaactggctgggcgtggtggctcacgcctgtactcccagcattttgggaggccaaggcgggcagatcacctgaggtcgggagtcccaaaccagcctgaccaacatagggaaatcccgtctctactaaaaatacaaaattagccgggcgtggtggcgcatgcctgtaattccagctactgcctgtaatcccagctactcgggaggctgaggcaggagaatctcttgaacctgggaggtggaggtttcggtgagccgagatcgcgccattgcactccagcctgggcaacaagagcgaaactctgtctcaaaaaaaaaaaaaaaaaaaaaaaaaaaaagctggtgaattgttgtttgcaggggaacaggccaagcaaaatgcacagcaacctgcaggaggccaagcaaaatgcacagtgacctacaggaagaaacctgactgggagttcctcagactcacaggaaatcagttgtgggtctgattcctctccctcctcagctctttccagagcctcagcctggaaatctccatctcctccttgtgggagctaggtacaatgcagtgatccacggccaagctgaagtctcgagttaaatccaagacctgagggtactcccaatccctcagtgaagtgctgcgctgggttgccgggcaactaactgctacagctggggcagaaggtgggtgggatgctgagaaaaaaataccagaatcgaggacaagaaaaacagagtgggaggggcttttcaaggatctacgctttagaatttacaccatccttccaaatcgtagctttgtttccgggaactgagttgtgtttaccttggcttccgactatgttggcaacaggtttcctgcaagaaacaggcgcgtctccacaccctcgtccctcctccccaccccctgcctttcaatagccatcttcctggagccggaggcatcccagattaagggagaggtacgggccctttaagcttgacctatggaggcggacggagctaaaactgacgtggaaccggaatgtgagcggtgtcagacacgtggtacaaggaggcattcatcttggaaccgggcaattggcatttccgctctgggtagtacatctttaacataatgttagggaagtatccgttcttggctgcctttctttaattgcgtttccagtactctctcggtgattctactcttgaacataggatgaaatttggaatcacacttctcttccacttccatccccaccctctaatgcccatattaaaaatggcggccgccgccttccgcagtaatggttgttcagcgaacaagatccgggcggaaacagtagataggcgggtgcagcggggcagaacataggttgccttagagaggttccccggtgtcccgacggcggctcaagtcagagttgctgggttttgctcagattggtgtgggaagagcctgcctgtggggagcggccactccatactgctgaggcctcaggactgctgctcagcttgcccgttacctgaagaggcggcggagccgggcccctgaccggtcaccatgtgggccttctcggaattgcccatgccgctgctgatcaatttgatcgtctcgctgctgggatttgtggccacagtcaccctcatcccggccttccggggccacttcattgctgcgcgcctctgtggtcaggacctcaacaaaaccagccgacagcagatgtgagcagcggcacacgggtccgggcagggggcaagggctaaggaaggagtggctagggcaggggcgggaaccggggtgcttgaccacacgtgaagactcagaactaacccaggcagcctggaactcggagaggtgatgagcagaacttactcgcattggggaaaggatgggtagggacccttgggtatatctgggactctggcagtggtgctttcctccctccgcccccctcaccacttaccagaataaaaaaccgggaatgagaagaccactttgggttactgtaacacctgcactagtgagtgaccacgccccctttcctcttccccctcgcccccttgctgctgggccacagcccagaatcccagggagtgatcagcggtgctgttttccttatcatcctcttctgcttcatccctttccccttcctgaactgctttgtgaaggagcagtgtaaggcattcccccaccatgaagtaagtgggttcgtgggggtgattgcctgtggctgggacctgggaggtacctgagagaactggggttatttgggcttgtggggaggggctaagaaattatcagaaaagacaggaattcttaaaaggtggaatgggagcaggcttgagtcatggacctgcccgagcctcccccagtttgtggccctgataggtgccctccttgccatctgctgcatgatcttcctgggctttgcggatgatgtactgaatctgcgctggcgccataagctgctgctacctacagctgcctcactacctctcctcatggtctatttcaccaactttggc

SEQ ID NO: 5225 - DNA, 6000 bp, Homo sapiens
ctgcctcagcctcccgagtagctgggactacaggcgcgcgcgaccacgcccagctaatttttgtatttttagtagagatggggtttcaccatgttggccaggatggtctcgatttcttgacctcgtgatccgcccgcctcggcctcccagagtgctgggattacaggcataaaccaccgcgcccagcctctttcctcccctctctactcccggctccaagatcagccctggcagcagcagtgagggtcccaggcatcgccgggatgggatggaacaaggctccccttctccagggctacccctgggatgctggcagccccgtgtggcagggaagaggaactgcaggagcgtccttcagggaggagaggggccagaagacctcaacatggcgcccccaggtttcccacaggccccctcctgtagaccagccggccttcccctcagtgacgactcaaagtcagatttgaagagctctctggggacattcctctccctggatggtggtattctggggagcggatgtgaacttccctgaaggggagaggtgtaaactcccagcatcctgctaccaccctccgcccccatcacccttcattccccaggtgcaggctgggggcagaggagagggaaggggattaggtgctggggccggggaaccgagacccagggtgtcaccgctgacagcagcggggcccgcagagctgcagggagacagagccgcctccccgcggcgccgacgctgccatctagctagagggccccactctttctttaaccagaggtcacagcctcattgcctacccaggaggcagccccgagacgccccctgcggcctgggttttctccaccctgtccccgcgcccaccccagctctgccatccccggctgcaccgctttgtaaaggggacggctggtcagaccgaatcactgcgcgggctcgcgctgggtcgggcctggagactggatctggggcttccggagagccccaggctccccgcgcgcccatccacccgcagccgcctgagcatttatggtaatgtttgggttggggcgagcggccggatccccgccccctgcctccgccgggcgggacctcgaggccggctcctggggagcttagcgccggcgccttcccgccgcggccgggtcccctgggtggaggccctgggtgccggaggcctgaggtccggcaggtgggctggcccccgtgcggaggctcctaagaccggggggtacgagagggacagtcccagtcggtcggaggaggggtccgcggggttggggactccgatcccgctcaacctaccctaaccacccactgctgcccacccaacccccgcctctggcttaagagtccatcatccccaggaggagtcccgatgcatccacatcctctttctccttctctccccccaccccctggcagggaaggggctgagggaagaggccagcagctctcaggggagtcgtcggaatgctgggagcctgggaacagaccctgcggtccctgggaaagccaggctgtgggaatcccaccgtcagccccctccccaggatgggccaccggatgtcagagaccccagttccccaacggggatctttgtgagggtgggccctgccccccagttcaagccccagcctggctcgaccccagagttcagtaggccatctgtgacgaagacagcccctcccccgctctccgccctccacccccctgcctgctccaacataatcctcgccattgtgcccgtcgccccctccccccgctccccctctctagacccctgtacaatggggcctttgcagcctccagaatggagatgaactcacggtttttccaagtttaaaaatagcccctcccatcccgcagaaggccaccctccctctctcccatggtggtgtggggtgcacctccatcccggctgtgcctccttcctcctgccctgggtcaggtgcgaaggacatgggtgagacagcatccggcgggagcagggctgcttcccccgattcaatctcttcccccacatcttccatccaccccccagtacagtatccggtttcctgccccctacccttttccaccctgttttcactccttcagtataatcttctcctactcacacccacattctggaaaaattctccaacttccgcaccccctccaaagacccaggccggatcctattatctggcctggccagggggttccccagtctcggtaactgccaagattgttgggactcccaccccatgtcctcacagcagctgcaaacacctctttatcagcttccttcctcgagctacttctgacccacccttctcatatcctcacatcctggtcaaggcccctggatccagaagggtgggtcagaagtcgctaagttccctttgctggagctgagagaggacacttgggttccagtcttgccccttcatggcctctggggacaggtccatccttgtctttttacctccaactccccagggttccacttctccttacaatgagctgaaagctccacccatccaggagactgtggctgaggagcccaaccaggacccccaccccacctggcctcagtttctccacctgtggtcagacctataccagagacacgcagagggcattatgcgcaggagggtcccctcatgtgtgaggggcccaggtccaccatggggctggaggaaagcagccttcttgcctgcaacccaacgagggaaaaaagaagaattaggactctgcccccagggcctcttctggccctggcctacatctgagccaggctcttccaacccagtccaggtgctgggtccctgcagggtagacggccgtggcctcctcctccaactcccttctgctggctgtcactcctgtcctgctggaagtcccgcagccaccttctctcccctggggctgccggagcactagcctctggcctctaagaagagctgagggctgatccccttcaccttccgctccctccaccctgctccctgcctccactcctgcgtcctttccgaggtcctgacccgtctttagtttggaatcccaaagtgcccacctcatgaaaccatcccaaagctatctgtcccctgaggctatgacccacttccgagcagcctagacagccccaggctactggcttccttaaaggacagtcttctgtgcttgtttggtggggcaatgcgaagggacgtcaccctgggctctaggctctgacctcatttccctttcaccgcagagacaaatcctccacccccacctggcttcactctcctccagcggaagaagaattcagaactgactgtccttggtggttagctggctttgttttcaggccagagaggcgaatgattagttaatggtgttaagtgaaggaagggggttgggcagggaagccagctccatgcccagccgggcctgccagggcaaacggcatccttcagccattcccactccagcccagcagacaaaacattctcatctagtcagctctgggcctggggccagtccatacattcactctggagggcgagccagcgtcctcctcttgttctccctgcaggctccaggctccaggcccctggcccggtgggcctgggctctgcacagcctctggctggagactaatggcattggaggaggggtcgagaaggctctgaaagacaagcctggtgtggttttccagtcatctctgcgtcatcaaaacgccaccccggagcatgctctcaagtcacctggccatctccagggtttgctggctcaccctccacctcccccagcgagcaaaggggtggccccgctgggcaacagacctctacccaaatccaggcccctatttggcactccctggtggaggcgcgccagcagatgtggaccccttttctgaggccaggctgctggggtcagagtgaggcaagagcacctccccctccctagagccttagttcaagaggccagaagacccagggagaagccggcgttttgggagaaggggagctgcagagctccccacccaagcaggtctgatttgattcttccctcagctatggacccacaatcaatagggctggggaagacatggggtgggggaagatcagcgctgccgggatcctttcaatcatcaggaacagcaacaggtttgcagggtcaggctggggaccctcgcccattaactctttcttctccctgtttctttctcttaggtgaggggaaactgagttccagggtaggctccagagtgaagagggaagaaacatgattctcaaggcccaggtctggacaagtgtgaacaccttgggcctgcgaattcagccccctccttcctttctctggtcaaaggctagacttgcaggagcttgcgtttgaagggacagcccagaaggcatcgtctgcactccccatacaggtacttctgggtctgtgggactggcgcagggttcttctcccaaagctgccagcactgaggctgaggcagtgtcaggccggcggcagcggcagtggtgcaatcgttctgggaagcgatagaggccggcctgaattctctgtggcaagggaggggagcccaagtgggaggccccttggggacaccgaggaccaggtccgctactgctcctcccccaggaggtcccctaggggctacattggctggcaggggctgagcagcggtgagcctggctggcttcgacccggggcgactccgggcatccgggacagcttctcctcgctgccacctcggccagtcagaccccgagacacctgtcactaccccctcagccttcccaagccaggagcctgggagtccggctctggcctacctccggcagcgctcctaggcgcagctcccgggctggcggcgccggggcccgccccctagggctgcggcgcgcggggcgggggctgggggctgcgcggggcggggcgggcccgggcgctccgggccccctcccccgcccccctgacgtcagcccccggcagcctcgagctgctcacttggctctcgccctccggccgggaagcatggggcttcccaggctggtctgcgccttcttgctcgccgcctgctgctgctgtcctcgcgtcgcgggtgagttcgctcgcaggggggccgcgccccggctaggggtctgcggtggagcgtgccagggagcagagccagcggcgcggcggggtcggggcgttgcgtctgggaggacgagcctcctccctgggtccccgatccccgggcgccttgcgcgcgagcaactcttctttgcagccagtttgcagccgggattctagagtatcccgggagcagcactcggaaggcggggaggaggctgcttctgggaacgagaaggggtggagctcagcctttcggggtgctggggggtgggtggtccctgaggtgctcactctgggggcccgcaattgaagccgggcaggaggcgcagctggggcgcatcctcaaagcctgaattccgcgcccgcctgttgctggaaaaggcagcttccttcgctggagggggtgcgccgacccaccccttcccccttctgcctgggcatcacgccaggctggaggtgagcgagagcgggaggttcggcggctcccgcccgagctgggcgttggcaggggttgcggggcggtgtgggtcgcctcgcgcctccccgagtgatgggatcataggggacagagatgagggatggaggattcccatactggaagcgcccgctggcttattttggggaccacattcaggtgggaagtgcgcccgggcacctcggagcgtttctccggatccgcctggtagcagggcgctctcgggtccacgctgcccttgtatggcccgcagcggtgtcgcgtgtttctcttggctcccattccgccgtcccagccgctgtccggctggggaaggggagggctaggcaatacccagctcgctggcctcatgcccagtgccaaccatgtccctggggtattccaggctactgcctcccaggctgactttatttctggggaa

SEQ ID NO: 5226 - DNA, 6000 bp, Homo sapiens
aaaaggagaaaataagcctcttggtctgtcttgctaaccctctccgagcttctcatccaccttgctcattccgtccgccaccaaacttctcaaaagcagagaggatacctgctgcctctgctttttcaccttccagttgctcctcctcccactttgatctgggttcagcccctgcctagtcaccaacatccctctctcaaaggtcactggtggttttgccactgcttccaaagaccccttctgatccccacctgctttctgcagcatcagacactgttagcaacctcctccacctcctctattaaatcctcttctcacttggcttccatgacaaccctctctcctcactcccctcctccttcactgaccaatcatcatctgtccatcctacccacgttgttgccagattcatctcctgaagcatagctctgacagttcccaataagtgcttctctgttcagaaactttccatggctccccactgcctgcaaaaataaataaataaataatggagttgtaaaatcatgcaactatatgtaattcataatatacaataatctgtcacgttttcaaacctttttaagcagcagaatcttcaaaatccattaagagatatctttctcaaaagcccaattttcaagcacatgaaaacacatgctctttaaatgtggctcctgttgagcccaggaaattctagggtttccaaaacacaactggaaaaccagtgaacaaattaaactcctcagtctgcagatgagaaaactgaggtccagagaggggaagtgattggcagaaagtggcacaggatgtgagttaatcaacacattttcattacaagcctatcaggtaccaggcatgttctaggtgccagagatatagcagagaacaacagcaacatgatccctgccctggaggagctgacagtctaatggggagtgaatcaggcactataaaccatcacgaaagtggtcccaagtatgcaaagtctatagcaggggatgattggaaatcccagtggctcctccttgaagcctcagagcagggtgagatgaggctgcagaagcaggcatgggccccttaggccttgttgaggacttgacactggtctaagagtctggcaggccaagaaattgttcctgggcattgcaacttgaccatctgcatttgaaaataatccactactaaatgtaatgttgtatcctggattaaattgtggaacaaaaaatagacattagtgggaaaaaacctggggaaatctgaataaattctgtagttcagttaatagtattatactaacactaatttcttagttttgatagatgtaccatggttctataagatgttaacattcagggaagatgaatgaagggcatatgaaaactctgtaccattttcacaactctattgcaaatccaaaattatttcaaaataaagcttgtaaaatatatataaaccattttcaggaaggggaaaactggatgtggagagacagatgacaataataatgatgactaatacttagacagtttttactgtacaccaggcattgttccatgcacttcacatgtttggctcaaggctcatttaatcctcacaacttcaagaggtaggtgctcttatttctccctgttttacagagaaggtacctgagcacagagaagttaagtcacttgcccaaggacacatagctattgggtgtcagagctggagtttaagaattccaatccaggcagattagctctccagagttccatgtgctggactgttacattttactccccatctcagtgcagactggctatactgtcagaaagtattgtaaagaccaggtagaaatcatgagtgcatggactagattaataacaggagaaatggagcaatgtcactagactttatatatatatatataaagaatatatatatataaaggatatatatatataaaggatatatatatatatctcaggggcatatcaggggcatatcaatgtcactagactatatatatatatataaaggatatatatatatatatatatctcaggggcagaatcaacaaaattggaacatggtggttcaggaagaggtaagaagcaagagtgactcctgggctcacagcttaagagcaggaaccaaagcctgctttcctgctgcttgatcctgtgtttcttccctgtcactaaaggaaaccttctggtccttttgccttctgtttgcgcctacctgtccctttctcttatacatctctaaaacgcaaaacaaactggaatgcctactgtcctaacacaggtggcacctctcccacctccacgcacctccatgttcttgtacaagctgttccttccacttaggagtctctctcctgcctcttttggtccaaatctgatctgtccttcagggtctcagttaaatgtcccctcccccagcaaccttccctgcttgtttaaagatgatgagtgaacaaccatactatatcacttacttgcttccatcttctccacccaaccaatccccaggcagccacatcttccctgctggccgcaccctctttggaagctcatttaagatcagaggatcaaagaagcctgacctaaagatggagagagtgcagccgggtacagtggctcatgcctgtaatcccagcactttgggacaccaaggagggcaggtcacctgaggtcaggagttccagaccagcctggccaacatggagaaaccccgtctctactaaaaatacaaaaattagccgggcgtggtggcacacacctgtaattccagctactcgggaggctgagacaggagaaacacttgaacctgggagacagaggttgcagtgaggtgagatggcgccactgcactccagcctgggcaacagagcaagactctgtctcaatgaaataaaataaaataaaattaaattaaattaaaataaaataaaataaaataaaataaataaaataaaataaaataaaataaaataaagatggagaggatgggagggtaagagcagggaacaagaagacattggtacatctgggattgccccttcaaaccatgccttcagctcctgcagtgtgcctggcacagagctaaaggccatcacaatgaattcaattcaaccctggcccttaaagcactcagcagccagatgggagattcccagctgccacaaactaaatctgatagcgtgttccccagtttaaaaccctcctagcagctaccgggcatgattcacgaatctgcagacctctcctttcctcaagtcttaggctcaggctaaaccagtcaaccctttgtgggccccctactcacctgactattgcttaccttcattcctttgctcgtgctgaccctctaccttaaatccagtctcttttatgtctctgccctccagcacttaccttggtctgatagatgactcaccgagaccctgtgttcgcttccctgaagcctttacaccaaccccaccccgggctaaactgggcactttttctgtgacccaccaaacccacacaatcccatattaaatatttgtttacgacatccgtttctatgtctgtcttcccccacccttcaactagattgagttccttcaggacaatgatgatgtctctgtatccccaagccaggcactgtgttttgacacaaagaaagcccaggttacatttgttaaatgtaaaagaccatacagtgagtgggtgagtgttcatgacaatgccagatctgactacttccgcgagaaaccgagacactccagggccggattccagacagtgggaatatggcgctgtctttgccccttctccagtgaggaaccagaatttacgtgttatcagaaacagccacttcccctctgctcctgcccgcctagagggctgggcaaagggtagagggagcagtgtccggccagggtctggggagaattcggctctccttagtgggaaactctgtctgtcttcctcccccagggggaggggatggggataggaggaccagagtaaggggaagagggaaggcccggagggcgcagtcgccttggcagaaatcctaccacacccggatgtagtgggtggtgaacgggatggggcggagagtccctgccctgccagggacactgactggacgatccactttcgcgggaatcccacaaatctctcaaaactaaggtcctggaaactggaggagagctcgttttcaggctatgtttgggcaagggcggggcgcggggtgcttcaatttttggaaaaggaacccccgaagggagcagggattagaaaagaaactctaccagaaacctcagtgggcccgtctcacccactcatgcccaccactgacttctctggcagctccccgtcgccccgcgcaccgctgcctctccgtggaacgtccaagtggtgcagaggagagggatctccggagactgggttctgttgcgagctatgccacgttccgtcccgggcggaactcttctttgggcctttgtttcctcgtctgtgaaatggggccagggtgggagcagagggcttgcagaagccctgccagctcccacgctgctagccgggattctccatcccgccctctcctccaccgccgcccccggcccggtcctaactccacccccacccgccgcgcctcggcgccgccggccgctaggggtcactgcctgcctttgtcagcggaggaggagggcagcccgcgctccagccggctccccagctggaaggcggccgaggggtagctcccgagcgagggtcctgagccggaccccgcagcccgcgctcgcgatccgcctctgcttcggtcgggaaggcgcgtgcgctcgggctccgaccgggccccggcgggcgcgcatcgaggccaggagggggttaacgctaacccctcccctctggctgacatcacgggcgagcgggtgagaggctggagctcggcgagtgagagaaagagagcgagagcagcgagcgcggctccacattgttgcggatcgccggcacccggcagagcggcggcggctgggacgcgcggcgcctccgacccgttctcctcgcgcccggccgcgcagccagagccacccgggccgccgaccgccgagccccgcgcccgccgcctgggccccgagccttctgcgccgcccgggtgcgtcccgccaccctcggaggacggccggccatggacgcctgcaagttggagccgagcgggagggtgtgagcgggccggggccaggagcccgcgccgcgcaaccgggcagccgggcgcgccgggggtgggtccctctccccagccccgctctgcgtggaagaagagggcggggaccggcgccgggaggagagcggaggaggcgaaggggcatgactcgtgcaacttgcggcgggcatctgccgagcctctgagccggcggcggcccggggcccggactgcggccgcgcggatcccacccagcccaccccgccccggccgacggctgcagctgacctggatccttcgagcgcccgccgaccgccagcgatcttccctcatcttccgggctggtttctgctgcgcgaggagcgctgccctcgccgcccctctcgccggacccccggcccccgatggctcggatggggcttgcgggcgccgctggacgctggtggggactcgctctcggcttgaccgcattcttcctcccaggtaagagcgctcacctctgctgtccccacccccatccaatgcctccccggggctgggagccggatggcgggcacgactggattgtggggagtgaaaggagccagaaaagttgggtcacggcttgggtaaagggggtgggaggtggcacggcggagaaagaggttgagaagccgaaccgcctgccctgcagggaagcagtcagatgcacgtctctatgtagcatgaaagcactttctccgctcagttctttacaaaaaataataatatgtaatagcgttctgtttatttaataaccagctctctgctcgggaagcagtttggaaacactgcgtg

SEQ ID NO: 5227 - DNA, 6000 bp, Homo sapiens
gactttcctaggttgggctctgatttttgcatcttgactgagttcaggtacatgttgatcttgaaaagcttttcttgacatttttctatgctttaagaaggtgccctcagttattcagactgtctcccttgtcctgggttctcctgtacctccctaccacctacactcaatggaaaatgtggcttcctactttaccaagatcattgtgtgtctcttaaggtcccacaccttatctttacttacaatgtcacttccactgctcctgtctctaattcctccccagtagtctcagtgaatgtgtttcattccacaagaaaactaacatctccctgaatagctcccattcaattctttcttcagcagagtcatgtcattccctccacctcaagatccctgaatatctaggctctgtactccatcctcttcctcaatctctgagcataattagctaaagtcccctcaaaggagaagtgtccttaagtctaaagaccctcttttccctggcctgccatggcattgcaccttgctgggtctcttcctatttctctgactcttggttttctgttcccctattgattctggcctcagctcttcactgtttccacactattctcactcccttgtgtattcattcacttgtgtcctctgtgaagaggacctaatatctgcttggcactgatctaggtgcaggacggcagcagtagacagaacaaacaaggctgctatctatcaccaaggagaaccagcctgatgggaggaacagaaaataagcaagtacatatattaaaaataagataattttggatagtgagagaagatatgaagaacaagaaacagggtgatgagatagagagtagcttcaggtgaggaaggtagcaggaaacaagcttagagtgaccagggaatgtcactctagggtgaagtcatttgaggcaagaccaaaatgacaagaaaccagccatagaatgaagaatgttccaggaagaggggacatcaaatgctaaggctataataataatgatgggaaatattaatagtggggaagagtttgataactatgaggtacatttctttaaaattaagtgtaattggaacatggtggacaagacagagagtggtagaaatgagtgtggagagatagccagggcacaaggccaacattaggccatggtgacaagtctagattttatttcagtgtagtgagatgccatggaagggctttaagcaagagaagttcccatcttttagaatacaaagactgttctgtctactctttggagaatagagcatatggtttcacccattaactgtgaagggagaatgattattaaattgggaggccaagtcaacaacaatgagaaaggattgaagccaaaatggcagaaaagaggaagggagagcttaatttaaatgattttaaaactctcagaacaaggccaagagtacttcagggaacttaaggtacttgcaaaagtgactgagagtgacagccaaaaatcaagggaaacagcaggagaatgaaaagactaaatgctcctattttcaatacaggagagggaagaagtggtatatgaaaaatagaggtgaaatcctgacagtgactatttacaatggggttgataaacaattagaaaacaacattatgaatattagcaattcacatgaatagacataagaaaaattttgtaaagctgagccaattcctgctgtggtagttgataaaattatcagactgaaaatatttcagtctgtctgtgtatttcagtcttggtaaggctttcaataaagtcatagaacctcaaagacgataggaactttaacataatctattccaaatttctaacctttacaggttttccttcctaaacatcccagcagttgtttggataacaactgcttggatgtaacgaaaggtaatttgtcctactttggaaaggtttgaaatgtattgctgaaaatctgtttttgtgttagtgtaagccattgatcctatttctttcctgtggatgactagatgtctaattcctctcacagattccttttattctaaattttcagaatgtctcatgctgtacatataaaaaatagggagctatgtttgggttttatgattgagcaactgttctaaagaattttaattaggccaggtgcagtggctcatgcctgtaatcccagtgctttgggaggccaaggcgggcagatcacctgaggtcaggagtttgagatcagcctggccaacacggtgaaaccccctctctactaaaaattcaaaaattagctgggtgtggtagtgggcacctgtaatcccagctacttgggaggctgaggcggaatgattgcttgaacctgggaggtggaggtttcagcgagccgaggtcacactactgcactccagcgtgggcaacaagagtgaaactccgtctcaaaaaacaaacaaacaaacaaaaatgttaattagtagctcattgtcaaggtagaatgaggtctttagaagcaggccataggactatctcttctttttttctattggttctttttttaaatatccatgtgtggatcatgtgattgtcaagcctagagatgaaacaagggtaaagaagagagatatattgggtgattgaatctgaattcaataaaagtattaacacagtgtgataactggttgaaactaataaattttaacagcaataagtgcaaagtttcataataaaatttccaaaattgcctgtacaagacacaatgactctgcaacaagtcaagtgaagaatactcagggattttaattgaacataagctgattatgactaagatgtggctgtaaatgtatttaactagttatatccttcaaagcaaatgtagccataattccactggatttatgctggtcagaccacacagggaccatcagttcctgttctggacgtcacttggagaatcatgctgagaaactgaaagtccttctgaaaaagcagccagggtggtacaggattggaaactactagaaaatacattggaagaaactaaggaagagtagccacaaacaaaaatgtcttagggcggatgtgaggaagcatagctcttttaaagagaaaacagcattagggccacttaatggagtttggagggggaggaggagtgtacggaattcaactgaacataaagaacttccttaagcatcagaagaggtgaacttgtgatgtagaaagttctcatcactaaaaagatcaaggccaggcgcggtggctcatgcctgtaatcccagcactttgggaggccgaggcgggtggatctcctgaggttgtgagtttgagaccatcctgaccaacatggagaaaccccatctctactaaaaatacaaaattagccgggtgtagcagcgtatgcctgtaatcccagctactcaggaggctgagacaggagaatcacttgaacccgggggacggaggttgcggtgagccaagatcgcgccattgcactccagcctgggcaagaagagcaaaaccccgtctcaataaataaataaataaataaataaataaataaataaataaaatcaagtccattcgtccgaaatgttcttgggggaagtcacaaattggaaaagcggttgaattaggtcaactttaacttcccatccaaatttaacacagtatacatgcttcaaggcctagtcctccaaacagcacagagtttatggcctggtggctccctgcccaggaagatccgactggggacattctgttactctgtgagatgtcaggagggagcatttcctgcttctggtccactcaccgtcagctgttgctctgttattccattttggaatatcagcgttaagcttccccttttggaaagagcagaagaggagaaaaaggaagctgaagaagggctcttggattactcttttacttcagttccaggcgttcctaatctgttatgtcaatttgagtttatagttgaatgtaaagtttcaggtttcccttccagagatggggcgggggcactcaaacagctgctaggactagggagtggctaatagttggaagacgccaaacacaatctatctgctttattaaaaaggagtaattaaaggaaaagggagaactgcaaagaacctggggaagggaagaggagtcctcttgggcccccctccccttgcgctgacatttggatcacctcactgagtgatgaggtgaagacaggaacaggtgcgcctcatccctaccccatttgccctaaacagggattatcttgctgagtttgctgtgtccggggccaattaatcaaggctagacaaaggatagacagcgagaactggaaggcatggggtctgggaggcgaagccaggaaccgcgtacggcgcgccttgcagatgacatcattgcctgaaagagctctggcccttctcttcccggagctacacccggcaagtccgtgcgggagcggagtgggtttgcctggagggcgtgagccgagggcggcggtgcgcccgagctcgggggaggtgcggaggcgcgagagggagacctggagagaccagcgagcgcgcgagcaaagatatcccggctggaagtgtctgcgccgctcccggctccgcccccgctcggcgcggcgctgggcctgggaggggcacgcccatcagggggtggggagtgtgcactagggggagggtccggggcggtggtggtggcggagagccgcctgcgcatgtcagggctgacagcacacacggcctgggggcctagagaagggttgctgatcacctgccacccagggtcggggccccgcaccatccgggggcgagctcccgggaaggggctccgcctctacacccaccccccaacctctgacatcgccggccgaacgggagctgccgcttccttcccggccccgctgcacctccccagggagccgagggcgggcgtggacgggaccgacgtggaacgcattctgtagcccagacgggcggccccggcggcttcgggagtggggtcacgcccagctggagaagcagttagggcggacgaagcaggagccgcggggctgggaggattccagtcggaacgcaaccgatcctggggaggcgagaggtgaatcaacctggacccttccacagcctggctgctaggccagcagtgcgactcccttccgagctgagcttaccctgggcgcaaacgagcgaggcaggggcgcgagtggaagctggagttccggggtgggcggggaggcgactgtccgtggtgctgagcgccggcgagagcgggcgcggagcggctgatcggctccctcgaactggggaggtccagtggggtcgcttagggcccaaagcccccacccggctccaaaagctcccagggcctccccaggcaccggtgctcggcccttccttcggtcagaaagtcgccccctgggggcagttcgtcccaaagggtttcctcgaaagaatctgagagggcgcagtccttgaccgagggaatctctctgtgtagccttggaagccgccagccccagaagatgcctgccttcaatagattgtttcccctggcttctctcgtgcttatctactggggtaagtaccagcacctcgccatgccggatgcaggtaacagtaacaatgctaacaataataacacattgatgtcgttggtgacagaaaagagctctggctggcttgcctctgtgcgtatctgccagacatggagatggcaggggttccatgagagctgggattttgagatgggaaaggcgcctccccaccgcccttccccgctattctccaacctcctttggtggttcttccgcccttcctccagtttcctgatcattccaaagtattttttccctttccctttgctgaaaggaaatgcagtcacgttcacgaataaaaacctcctgtgtggttacattttatttctcatcaaggagtctatactcctggaaagcttactgggtcttcaaattcgtttctgtatattaaaaaaaaaaaaaaaccataaaagc

SEQ ID NO: 5228 - DNA, 6000 bp, Homo sapiens
ctcatttgatacttttaaaatacatttttaatatttttttcctccaagatgccttccccattgtgtaagtttcaggtcttacaaacctggatccaccccagcagtctgagttgcatatatacatacctcctatttacatgtccctcctcccactattatgtcacctttctaaacaccgcaattgggagatgagacaatgcgcaggaacgaagaactgttctggtgaagaggacccaggggcagtgagagggggctagggacaaaaggtgaatggggagctggttcaggttagaagaatgggtgcatgtgaggggcatttggagaatgcgagctgggggagggagagtggctgagcctgtaggcacagtagacacatgtagtaatgacggggatgtgttatgccccacaccaggtgttgtcctacatcaatggggtcacaacaagcaaacctggagtatccttggtctactccatgccctcccggaacctgtccctgcggctggagggtctccaggagaaagactctggcccctacagctgctccgtgaatgtgcaagacaaacaaggcaaatctaggggccacagcatcaaaaccttagaactcaatgtactgggtgagtgagaagcagatttccggacccctccccacctgcactgggaggtctggtgagtctctctcctaaatgacaaaagttggaggaggaacaaatgaagcgacagaagggtgcagggcagagggagaggatctgtgggtctcctgggtgtggttttaatctgtctccccctgcccagttcctccagctcctccatcctgccgtctccagggtgtgccccatgtgggggcaaacgtgaccctgagctgccagtctccaaggagtaagcccgctgtccaataccagtgggatcggcagcttccatccttccagactttctttgcaccagcattaggtgaggacactactggaaacagtggacactgtggctggggaaggggaaagatgagaggtaccacagggactggggtgaaaaggggagccaaggctgacaagcactggggaggaggaggaggatgtggggaggatgtggggcagagaaagatgccctgccaggggcaggtattgtgttaggtgcattcacatgtgtatactgttatgaaacaggctctacagctggagtgtctgtgttcaaattccagctcttctagtgactagctgtgtgactcggtgccttctttcctgaatttgtaaaatgcggattttacacatatcagcttgaactcattagtgtgacttgaacacaccagttataaaaaaaaattttagggataactgaaacatttttaatatgaagtattcgatgattttagatagttacgttattaatttcctaggcgtggcaatgctattgtggtcatatggaacgacgtactgcttttttggagatttatgctgatgtatttactttaaaatatctaagtaaaagaaagaaatcaaataaatatggcaaaaagttagcaactgttggatctaggttgtgggaatatggattttcattttgcctctttctacttttcacatgaccatttttataatagtagctttttctttttaaaaatactacttattacctcacaggtttgttgggaaattgtggtaagttcatacacatcaagaatctagagcagtctttggcacagagttagcagccaataaacattcactgttttatttatttatttatttatttttattttattattattatactttaagttttagggtacatgtgcacaatgtgcaggttagttacatatgtatacatgtgccatgctggtgtgctgtacccattaactcttcatttagcattagctatatctcctaatgctatccctcccccctaaacattcactgttataatgattagtccatatagtcctttcaacaccctcagggaggtcatattgtccccattttacagatgaagaaatggagaccctcagatatcaactaacttgcttaaagtcagtcacatggcctgttctggaacccacgtttaccagttcctaccccagtgttctttctctctcatcacactgtcttgccgaaataaaagtaaaatggtgttttggtttctctgtgcttcactttctctgtggcctcctgtcggatatccactgggggcactgactgaggagtgacaatggaggttattgcactagtcagtctgcagctgggagccaagcccagctgtcacacctctccccccatcagggaatagacaagccgtgactcccagagggtcaaaggggacattccagaggagggacaagatttttttttttttttaatgggaaagagggtccctggactgatggctaaattgtgtccacagatgtcatccgtgggtctttaagcctcaccaacctttcgtcttccatggctggagtctatgtctgcaaggcccacaatgaggtgggcactgcccaatgtaatgtgacgctggaagtgagcacaggtcagtgaggggtaagtgtggttaagaagagtggtcaatggtgggggaggggttgcaagtggggaggaggcctgtctgctgaggcctgtctctgtagcagggcacggagcttcccctgatcaaatgtttgtacaaatggttggtcagtgactggtcatttcctgctcaacagccacccctcttcttgacagggaaaaagagggaatgtgtatggtggcagatggggtggggagagtgggattggagaggggtgagaacccctcagctgggtgtcctcctctgacacgacgccttttccagggcctggagctgcagtggttgctggagctgttgtgggtaccctggttggactggggttgctggctgggctggtcctcttgtaccaccgccggggcaaggccctggaggagccagccaatgatatcaagtaagtgtccctggtgtctgctgcagcgggggctctcccagctctcctcacagaggctgggaattcaggcagctctcatctattgggatggggtcagtggctgaaacatcattcctatgggcaggttttaagggagagggaaaggagtactgaagtgtgcaggcagaggtggtatataagaccaagcaggtagaaactctctcctccttcccccacccacttctgacctcttgttatttctttgatgactagggaggatgccattgctccccggaccctgccctggcccaagagctcagacacaatctccaagaatgggaccctttcctctgtcacctccgcacgagccctccggccaccccatggccctcccaggcctggtgcattgacccccacgcccagtctctccagccaggccctgccctcaccaagactgcccacgacagatggggcccaccctcaaccaatatcccccatccctggtggggtttcttcctctggcttgagccgcatgggtgctgtgcctgtgatggtgcctgcccagagtcaagctggctctctggtatgatgaccccaccactcattggctaaaggatttggggtctctccttcctataagggtcacctctagcacagaggcctgagtcatgggaaagagtcacactcctgacccttagtactctgcccccacctctctttactgtgggaaaaccatctcagtaagacctaagtgtccaggagacagaaggagaagaggaagtggatctggaattgggaggagcctccacccacccctgactcctccttatgaagccagctgctgaaattagctactcaccaagagtgaggggcagagacttccagtcactgagtctcccaggcccccttgatctgtaccccacccctatctaacaccacccttggctcccactccagctccctgtattgatataacctgtcaggctggcttggttaggttttactggggcagaggatagggaatctcttattaaaactaacatgaaatatgtgttgttttcatttgcaaatttaaataaagatacataatgtttgtatgagataagaaacaagttgccttttcaaactaagaattcttgaaattgagcttcaggaggatgcaaagtggaccccttcccaagctgtgtacccaggagggcttccccccacaggcttagagcagctcttctagtgtttagaagggtccttgtttgtcacgtggagaaggggaggagactctaagctactctgaacagcagagggatggagttgatacgctttctgctggagcttgagtgctcccggctagggggtacgtgtacctcatctgcttcctcttcagggacaggggagaggaagctcacgtgggctcctctcccacaccacggaatccttaacaaaacactccttgcccatctggaagagatctctgttgttactgagggagagctgggcatagtatgaggtgcaggtctgtgtccaagttctgccatgttctttcctaccaagggtgaggtctcctttaggtctcagtttctctgcccctaaaatggagtggctctggaaatggagagatgctcatttctacagagactcctacctcagtaagtggtgaaatgaaaagcgctgtggacaggaagggtctgcggcctggggctcacactcacagtgaggctccgaggtggggactccccttgccagctctggggtatcaggacgccttccaaagtcagctttccttccgtctctgcagaaggcccaccccaagcccagcgcttttcccaaggccggacagcttcagaccttggggagaagaggaaggaaggaggaagaagggacagagggattgcagaatcggggctggaggagaggagggaggagcacttttttttttttttaacctgcggcgccggcctctcccctgtttgctctgagataccagtctcgctcctgcccagcccgggcggctgcccttgggtgctcccttccctgcccgacacccagaccgaccttgaccgcccacctggcaggagcaggacaggacggccggacgcggccatggccgagctcccggggccctttctctgcggggccctgctaggcttcctgtgcctgagtggtgaggaggggccgggcgggaccacggcgagggctggggggcataggcctggcttccccggctcctcggacccactctgtccccgccaggccagatgaggctgccgtgggcgccaggggccctaaggcgcctgaggtgaggccggagagggggtgtccaaggcccggagggcgtaggagagagacccccaagccggcgagcgagttgggcctctccgcggcacaggcctgaaccaccccaccgcagggctagtgttttcctttctctgctaaacacacacaccctcttacctggcccggttccggctcttttacccacaaagacccggcccctcccggaaacctcaggttttgggaagggaggggttggattgaggggagagggttgtgctctggggagggagcccccagcttccaatatagatgcccgggggtgggcccgaccctccagatcactggaatttgggttcccacctccctctggtccccggccccagggctggccgtggaggtgaaggtacccacagagccgctgagcacgcccctggggaagacagccgagctgacctgcacctacagcacgtcggtgggagacagcttcgccctggagtggagctttgtgcagcctgggaaacccatctctgagtcccatccagtgagctgagagcgactgcatgaagctgggttggcctggagggacaggagcccaggatgagggcatggggtcgggagggggagtttggggatcagtatgcttggatgaaaaggtaagtgggctctccctagatcttttcagagctgcagtctgcctgaccgtgtatcttcctttcctcttccatagctcctatttccaactcccctgccttagtgtatccattgacactaaggtgttgtgactgataccaagataatatgctgcctct

SEQ ID NO: 5229 - DNA, 6000 bp, Homo sapiens
catgcctggcagcatacatttattttcttacagtttctttgggtcaggagttcacgcacagcttagatagatctgctgctcagggtctcgcaccagacttcaattaaggtatcagctgtccaagttcctttctggagcctgggggggtcctcttccaaactcatatggttgttggaagaattcagttccttgtggttgtagcactgaggttcctttttctttttttttttttttttctttgctagctgttgactgacagttgctctcaactcctggaggaggccagcagttccttgccacaggggcctctcatgccatggtggtacactagacaatctctctctggtctgtgtcttccatattgtaacctaatcaagagagtgcctatcccatcacctttgccatattttattggctagaagcacacacacatactgcatttgagtgtagtaaaattttgaagaagttttcttcaagttgaagttttgaagaagacaaaggaggggaggtatacagtgtaacaatgcaagctgctcttaaattttcttcaattccccaccatcccctcttcctgtcttcatctctctccactttgcactttccttgcccccaaattcctgtttatttctaacgaggagcaatttatctttttgttccttgactcttaatgctcaaggtcttaccttctacttcatgtagcatatcaagatatctttcttgctaaagaaaattccctcactcacaggaattttggtgccattggttggaaggctttttctcattctgctaccaacaatgattcacaatttagtggaggagatggatatggctcaattaataacaggtagtgaatggaggggaggaggaggcatgctaaacataaaaatcaccactgatgggatattattagtaagggcgatttctaaacctctcttatagtattatcattattccctggagacagaggaacaggccaggtgggtggggacactcttacttctaatagtagaattatttaaaatggtacttattcacatgtcattcatgtgtgttattttttcttgcctttactattaagtaatttaattttttaaatgatttttgcttgtccatttgcttttaagtaacatcgggagtccagggtccatcagtagatagccatttacctttgggcaaattacttaaccccactactccttggtttcctcatctgaaaaaatggagaagtgagacaaaggttatcataagtgtctcttgctgcacagtgagtccactgctctgtgactgttacaagaccttcagttcttggaagacagagttcagttttacaacttcttagcctccttttttgtttgtttatttgttgttttggccagctctcacagaggtttgcatcgaatggtgattcggttaaaatcactaccttcctccttcctcccattctagagacagatacttctgagtttctgctggtggatgcatgtgtgttgaggcgctccatcctgagctgcaggagctctgtctgggtgctcagtgcagagttgtgagtaccagcagccagggctgccactgttgcaggggataggagtccagattccagagccccagaggggtttccaaataaggagtattctgaagtaactgtgtgcagtgaaggggccaagagaactgggctatgctgctccgaagaggacagtgccctcggaaatgaatctgtcagagtgctcagagaaggcagggtggtgggccttggctgagcaagggatgactgccatcagtcaagcagttcatgtcgacaccattgttggagcagcctcattatgcagagctcagaattgggccccatggggagatccagaggaatgaagaattacgttccctgctccagagaggcttgcaggctcatgaggaaatggccgcaataaccacactttctgatccaaaaattggacatgcggactaacaaatataaatatatttttgacattaaagaaatgtaacattaatagtcggaatatcccttaaaaaaaaaaaagccagcatcatcaacaatcatgagacagacacacccagaggaaaaaactcaaagaacacaaggaaggataacataaggcgagccaagacagctgagataaacactttgtgtcatgtgtgaggctgttactttatctttctgtaaatcaattgcctattggatcagtgtccccactcaaagtgagccccggttatttctgggaattcccaagggatgcctcatatgtgtccacaaactgtggcctcactcccttgcttgctcccccaacccccagttgtccagctgcttgagaagccctctaaaggaactaaggcaagggcttatccattcaatatttgccaactgcctattgagcacctactatgtgcctgccccgtattcggtactatagacagagagacaaataagacagctcttaaatcaaagagctctctgtttcttaggagagaaaggcacataagtagatgattataagtttctaaaggcctactcagtcgctggaagcaagattgcaaaattactcctcatacattccaacgtacaaaggaaagggaaggcctttatgtctttgtagttgctgtgatcttccacatgaacctctcaccgcccccagggtagcagaggaaaatatcactccatctcagtaagcccagtctgatccaaccattttcacactgtctttaggtagctcagtctctgcttggacagctcaggcaattgctcaagcagtctttccaatgtcctctcccaatcccagctcctctctaataagagttggggtaaatatacatggtgtggctgaagtaaccttgtggcaacagggggagacagtgtctgtggacctgtgtggtattctcaggtttcccaccagtctctactcagggtctacattttttcctggcctgatgagctacctgaggctcccaccacagcagtaggtggtcccagctgttgcctctggcctcagaatccccgtacatggcagtgcctttgctcaatcttctgtttcctgccagttctttaccctctcggcacttctgagtctcctaaagggcttctggacacctagaagcccttgcaaattctgtgcaggtataaagagccacctctggggcggggaagtggggatattgagaacttagatccttttagtctccctctagcacatttttctttccacagtgcttcaggataacaagggcagacttcgggctttctatttcccaaacactgcatcctccttttactcccatccataagcctcaaggcccagccatcacaggcaaagaggccatttatctacactccagaaggactctgtgatccagtccacaggctgatctatgatatgtcaaggggtagataaaagaaattagaatgctcttttgtcccttacaaagactggctaagcctttcatcttgctatggactttgaaatgctattttaaatgtcagaagctgaatattgactctttttgtgtacctgctataataacattacctcttccagtggaagaaaggtgccttgagttgtctagggaaaagtcataaacacagaaatgcaaaaggaaaaaagaatcccctttatatatttcagaatgttttcagagaggtctgtgaagttcagtgcttcccaactcttctccctctgccgaggctcagaagggctatgtaataatgcttcagttctagaaagttgacctactcaggctttctccagtatgtaaaaagaatatttagagagataattgctgcacttacaaaaccaagaccaggggttagggatgaccaagaaggaagttgtgaagtttggtctcccaaaaatataaagatcccagcatgaatgaaaaaagaaacaaggcaatttttaaaaagtttaaaacatcatctctgtaacaaaggatttgctaggtactcttctgtaccaaatctccatcaacgctcccaacaattcccctcaaggaagctcttcttttccccattttacagatgagaaattgaaggctcaaagaggttgcgagcccatcccaagatcacagttactaggcatccattcccttggccgccctcatgaaaaggtgtgaacacatgaatgggggtcagagtagagctagagtgtttctcctcttcacagcctcaaaacaggagggcacagctaggctgttaagctggtaacagaaccctaggatgctggctgttaggagatgaccttcattttgctcagacatgttctagaaaattgcctgaaagcaggggaatgaacagagtggcttctggaaagaggtgtccagcatctatgtgattctatgatagaagagaaaattccaagccacggaaagacaagtgtaacaataatagaattcaagctgttttccagtcttcttcctttgggatggaacaggggttttccatttcttcagcagttgtctggagtctttcacttcccagctttttaaaatctcttctccctcccttttcagagcttattggaggtctgtcctggcatgtaccctcctcctcagggagaaggagtgttaggtggagacagggtaggttgggacacaaagtccagttaagtgtgtgtcccagctcagtgctctgagcccagatcctcatctccctgggtagtgaggctcagcacagacaagcaaccaactgctgggctgccggtgccccccatgttggaacctgagttggagattatctcctaagcagatacctgcttccaaactggggatgtagggcttggaaactagaaaatgccaggtctgagggagaggaaagaacaagtccagcaatacacagagctctgtgtattcagagggaagttggcagggttgtgttcgggcagagaaactccgagtggtacaaaggggacgtgcccagagtggagaaatcatgctaattgtctgcactagagctggagaacgccacccaaaatgaagagagaaaggggagccctgtccagagcctccagggccctgcgccttgctccttttgtctaccttcttctgatccagacaggtaggaggccagagggtaagaaagggtctgaagaaaggacccggggcttttacagcagacggaggggagagtggagggcctgaatgcctttggggcaggagtgggggagagttcagctgccgtgggaaacatgtcagggaattcaggcattagcgttgaacgtatttctttattttgtgtgcctcccgcgcggcccctacccccttcccccaaaaggctgcatgactttggagctcccacggcattcagtacattagatggcgggcactgggccatttcgtatgggatgacttgttggcgtgggccagtctggcattctttccaagggattgtggtggggcttgatgggtaggggtaggggaaattttctttttatacctccccagcccccgactctggcttctctgtgtgtaaaagagtaaggcagatgaaagaagctttggagataatgagcctcctaatgtgggatagtcatacccacctatccataattcactccactccatagctgcttacctcctctaccgccccctaccaatcctttgagaagtgatcttatttaaatatacctatttatgagtacatacacatatacacacacacacacacacacaattacagagcacctaggaattcacaacttagtgaggcaaacagatgtggagatcattttactaaactgcaggaactatcataagtcaattatgcagagaatgcatagcaatcagagaaaggtcacctaccccatccaggaagctggtgctggtggagggggtgttggtagggtaggacacagggtgtgggaatatcagggggaggttttctggtagaaggaatgtgtgcactgaattttaaaagatggggaaaaaaggtaggagtataagtgggtgttagggttgggaaatgagcaaaggtcaacagcttgaaataacatcaagtgt

SEQ ID NO: 5230 - DNA, 6000 bp, Homo sapiens
tttccgcaggctctttagttgagtgcctggaaaaagccattggataccccttaaaatttaacaactgaatgtcatccttcataaggatttgggctcttagctccttcttctctactcacttcccattacccggaccacccctcatccagatgccgccgtcagactcttcatggaaaccctttcttcaattgggccagtacgacttctaaggaatcatagtagacttgggccagaaaaaacagacctcacctgaaaatgctcattttgagcaagcaagatatatagcgaacttgcatggtgggtcagctatttcttttttaaaaacagaaaaacaatttttaaatggattttagagccctaatataaacaaatgtaggtacattccatattggacaaaacttatactttgagtttcatatgaaattgaaaaattgtatttttttcacaatgtttcatttttacacatctctatgtctctatataagtaatatttacaaccctgaataaataagcaatagataatggcaagttaaatcttgattcacagttaaaaagactttttcaatatcacccttagctactattgtatataatttagattttcatttttttcaccagccaagtgttttgctatttccaatcagtattgcttgcaaagacctttgtttctgtgatgtaccaactttacagttgtgttgccatttaaacctttttttaaaaaaaaaaaattaaagtaattcctggccccttggcgtactagttgagctttttgtagcagagtgtggctgcactggcagtgggggctgcgctctgacttgactgctaagaatgaagagaacaaacagagcagggtatcttcacatcctttcattctctatacctcactgaccaatgtcattatttactgtcagagtaccaaaggtcactgaacatctcattttgtaattctttgaaaaatgactaaaaatgactaggataatccttttgaccctaagtacatcaatttgtaagagactcattcctcatcttttacactcagtactcaggggcagctctcaaggagtacaactggaaaactgatgtaatcttgctatctctcaaaaggaaggaagatccagtagaaattttttttttttttttttttttaagacagggtcttgctctgtcacccaggctggagtgcagtagtacaatcatagctcactgcagtctcgaactcctgggctcaagtaatcctcctgcctcaaagcttcctgagcagctgaaactacaggctcaagtgccaccacgccagcaatgtttttcacttttttttttctttttttggtagagacatggatggtgctatgtttccaccgagctggtctcaaactcttgtcctcaagcaatcctcccaccttggcttcccaaagtgccgagattacaggtgtgagccactggggccagcccaaaagtattcttttaggagagggaattgagaagtatgagtccagtaggaaggtaactgtcatgtttagatctttcagagatttctaatgggccaaccaccactccacttacaggttcgtactcttggctcagagtcgcttactaatagagtagtcaaggatcactttggtctcatggcaggaatttgttagattggttatttatctttatgatttcccagcatctcaggtgctctactttaagtgagccgcaaatccaggtaagaactctcgttcttctcatttttctgtactactgaagatatagttacatattaacaaaaagtgttcttttcctgcagcctgaatgtctcaaatcagtgattttctcattctgatgcctgttggttgattgatgcttatttatttttgtaataactagagagcttataatcagtgagatggcttttatttctgttatttgagtctggggttatggagttgggtactagttcagggaggatataaataaaatgagaatgttttgagtgtagcacctgttctccccaggcagcatctatagtcagaggcctgaggaaatcctcttgagtttgctcttctttggaacttagaattctgatcctaatggctgaggcagtcttgaccatcttttagccataatcccatagtattcattgctaaatgctgtaggaagaaggattattaccaggaattcttcatggcatctctaaaacgttgccactgacgagtcccaaaactaacattatgctccatgcattttttttctgcatcttcccattgttattagttgctcagctggagcagaacatttggggaacatttcgtgaggatgttttagacctaccaaacattaccgagaatgggacattgctagacccactatgagcagcatggagaagatagcaaaggctggatccaatagatgttttcatcatttgccttgggatgggtgggggtagaggacaaagatgagcattgggaaatggaggtttaccaagaaagtagcttgctgatactggatctccagtctctttggccagaacagtctagaaaagaagatagcaggatgtcagataactatgagcactgccgaaaataagaaatggaatatttagaccttaatgaagccttataactgattcaagggggacagagaaagtatattcaaatgtaaaggtaaatattaggaattactttcggaatctaacatgagatgtgattggaagaaacactaatgacctgcaagtctctaacatatgaaactatgaactagctcttgcacacgtttatgtaagcagttcccaggtcgcacatagatcatctgtgtcagcattcatgatttacaccagggtggagagcagtccaccctaaaatgcatcttggtgaaaactttcacaaagtaatggagctgctctgctaacttctacgacttgactgccctcagggtcagaagaaagaaatagctgaaataggagacaggagacagtgaggacaattctttacggtcaaagaatcttgaagagactgcccctgtgtcacatggagacattcactgactacaaatcattggttgcagctttacttcccatgtcacaagtcatttgggatctgaattctgaaggaaaagttagctacagggaatgaatgttgaggctacaccttatgtagcacttgatcaggataagcacagcctgtgtgattagatacttggtgtttctgggttagaaccaaaagactttgtacttcctctcttggaaggagttacttatttggggtgacttgtctggaaacaaaggaggggtgtttacaagagatggtttgcaatgcagactaaagccaagaaaaatttgagtgtgatggaataggaaaaccaaaccaacagcccccaaccccaccacacaatctgcttggccaagtccaagtttgtagctccctacacaagagtgtgagactggcaggtatctcttcctgttgtctgtgcctccactgagctgccaagtactagattctagggtttgcatgagcagttttgtgtttgcataggcatttctcaaagccactgcatggcaggtatttgaagaggagccaggcaggtcacactagaaagaagcagctgagagggcatatggggcactgtatagaaaaagatcttgtgtgaagtgtgggcccagggactacactctgttaaaacagcaaaactatgtgcagtaaatggaatcccgcaggcctggctgcttttcttcccagacagctctgcccgcagagcgggcagcgtcaggaattcgttgttatgctttcttccctcactgacctttgctgggtggttgagctgtgctgggatgtttgaagcattttttttttttttttttttttttttttttggctgttggacagaaaagcaagaacaggtgcgtgcctttctgtaagggagcggcggccgccagagggcgcagaggtgccttttgaccgaatggcgcgggaaggggggcgtaaaattcaattcacagcgaccaagatctagtctcgggaattaaaggatcagagcgcgcctgagcctttcgctgcggggatgggaggcactgaagatttgggggataaagaagaaacggagggactgtcctgtcttccttcccgcagccgcccctcctccccagtcagcatcaggcccgtacgccgctcatttcaggggctaagctgggagcagcacgcacgttgcctcagtttcctgctcagctcccgggactaccttgtgccaaccttccctgctcggagtatgaggcacaggccggggtaatcctccagcctgggctggggtctgctgaactcgcggagcgctttttcctgcccgcgggtgaagattccccgctggcgcgtcccggggcgccctgggctcccgcgcgacctctgccgtcgccctcgctgccgcgctccggtggccgcgcagcccccgcctccaggaaagccacagattcccgctgtgccagggagcccgcgcggccggcgctccggcctctccctgcagctggaaaacgctgctcccctcttcctccttcaggaagaccgccctgattgggccggggatgcggcacccccaagtttggagccagagcccaggagcgtttacatgtcaggtgttacgggtggttctgacttcggatagtccccaaatttcccacccttcctggtcacccttcctatcccaccccggcggaagggaaggttacggctcaggatagttctggagcctcctcttccccctctactcgtacctggctggctcgtggggcatcagagcttacctcacccctccctgcgtccagacctggaggaggccgcagggtcccgccgtccgcgcgctgggggcgcccccgggcggcggaccccgcgcgccccgcccgggaggacggcgacctctccgccccctcgaatgccccgccccgctgtcgccgtcggtccccaccccgccaccggcacacaggcgcgcagacttgggctggagccgccctgggtgtcagcggctcggctcccgcgcacgctccggccgtcgcgcagcctcggcacctgcaggtccgtgcgtcccgcggctggcgcccctgactccgtcccggccagggagggccatgatttccctcccggggcccctggtgaccaacttgctgcggtttttgttcctggggctgagtgccctcggtgagtgaaacccggacctggaggggacttgggatgcgggatggggtgagttcgaccctgagggagaactttggccactgctgcggaactgggtcccacgactcgccctcctcccctgacctcctaatcccactccagggcatcactggctggcgctgacttctcgctttgtcggggacagcccccagtttgggtgtgggggcggatggcggggggaggtaagggcatctctcggaagacctggatacctctggggtgagttatcggaaccattcctcaccctgtccactccccaccccccacccagcagagccggatgagctgagccgctagatgagacactggctaaagagcttaaggacttaactctagccccctctcatccccgaccccacatacaagctgatgaggaagatcccccggggaaatacccctggtccccaggcttgacacacgcacttcgtgtcaattccccagcgcagatgctctctcttgccccctcctgcttcctgccctgggaatcaagggaggtgccccaaaaggacgaccgtgaggtcatttgggacacaggaaatgggggaggggttcaaacgcacagagaaacagaattgtgaccaccccacccccccaaggcccaccacccttattggtttccagagccaaagggaagaggggaaattgggaggagggtggccaagggtcagagaggaagggaacctccttggagcaagtgtttgggaagtgttgtaggcctccaggggcgctggcttcagctgaagctggggtggctcagaactccatctgggagaggacccggcaggactaggcccttttaaactat

SEQ ID NO: 5231 - DNA, 6000 bp, Homo sapiens
agcaatgaatagggctgggataataggctaccatctgaaaaaaatatatccctacatcaagccatataaaataatcaattagcgatagttcaaaaattgtagtgtaaaatgtttaaacttttagaagaaaatatggaataatatatttactttagtgtagatgaagttttctttaaaagtagaaagaatacactaaacataaaaataaatattaataactttacagtaaaattaacaacttctgttatatcataaagaaataaaatatgagatcaaacttgtttttacaacatctttaatccacagagaattattacccagaatacataaaaactcctaagagttattgagaaaaagacaaataagcaatagaaaagtgggcaaaaggtagaagtagatatttcccagaagataaaacctaaactgtgagtaaacccttgaaaagatgctcagcttcattattttttaacgaggcaatgcaaattagacaactataaaatatcacttcttctagtaaagtcgcaaaaattaagaagtccaccaactgctctgaggacgtggctcaaggacattggtacaattgactcgggaaacatctgctaatttcatcaaaagtggaatatttgtacatctcaagacctaggtattctactcctaggtttattttctagagaaactcttaactggttatactaggggatatataaaatagagattcagagcagcactgtttataatagaaaaagaaccacttgatatactacatattcaagaaaaagacccacttgatatactacaaagacactcctctgcaaagaatcattgcatgtcctttcttcccaacagcacccaattttgagtgaagcctcacttccctggaccctccacgaaatcacccaatcaaagcccaaatcctagaataggttctttctaacatctctcttacttagacattccatagttctccatggcatgcactctctcaagctgcaagaagtaaatcaacttgttcaacaataggtatgttcctgatggtctttgactggagggcattgacagggtgaacacaaagcacagtaacagatctccccttcttcctggacatgtgagcaaatggttaaatattgatgtcagcagcccttgaaatctccaactgggcaatgtttaagctaggtgtgatccatagtcattggtgtcgagaaagttaagaaaatgtagggttgagagtattcgatgtgattttagattccaagcacctaaaatcacccatgatgttgatgggaccagaaactagggaatagatgctgtccagtgaagtggccttagggtgagttttccagccagctaagaggaggtttttactgtcttctctcttgactcaatttccctccagctgttggcatcttggaacaaacttgagaatttatagattgagaccaagcagactcaagcaaaaaaggggaaaaaacaagaaggcaaaaagtgtgagtctcaaatccaaaaagagtatcaaggggtagctgggactggctatggctgtgttggtcaggcatgctgatcccagaacactcaaaggacaactaacacatatctagtgttttcagagaactttcatgtccattgtctgtaaacctcatgcagacattttacaaatgagggcagtgggactcagagaggttatgtgacttactcaagatttctctgccaataagaagtggaagcaggatctcaaccccagtgtaactgactccaaatcccacctgagtttatccctttttctccaccagcttggccagcaggagtctcagattgcatcttcagagatcacagagcagaaagccaaagaagccaggagccagacattgaagagaaatttcctctggaggcttgctcagaagggcacctggtgcttcccctctcttctccctcttacaagcaacgaagggggagttagaaaacacaaaacaccagaactagggatgaaggaaggcactgcttaaactggtcaccaggacagcacatcaccagagccccagaacagagcttctctgaaatagcaattggggcggctcccaccaagccacatcatccccatgactcatgcagtcggctcttccttagtttgtggaaatgagacaatgaggatgcggatgcaccaggttgctggaaatgagccctgcagtctctgggagccatccagacataccctactgttgggaagtcccctcggccaccaccgcatgtcactctgagtgccctggagaaaaagttctagtgtcctgcaggaacaactgaggaatctgcccctccaatcaccttcaggtgttagcacctagctctccaaaacctgggagtagggtgaggctctgctgaaggtgatctccaggcacggggcatgtgactgtggggcaggggacattcctcgggctgcaggagcctctggggctctgtccctgcggtgcacacagaccgtttcacctctcctttctcaccctgctgaggacggggctagtgatggattggaattcctttgagatttgccttattttcccctgagggaaacctagcgtctttctggattgtggagactggagtaaaatccagttggcattaaaacattagcgagcacttaattagtgtccccaaaaccaatgtagaagcagaggagactaaaagcagactgctgacagtgacattcttgataagctgatagtcagggagtcagacagtcttggaggctttgtacctgggaaatcccaaattggcctcctgtgcagtaaatcctccaatcccaccacatcctttcctgtctcatcctcagctgacttcagtgtcacatgaatctccccttcatcactctggccccacagatccttgaccccataaactcgactccattctgcctgccccacaataaatacacgttagctcagctttacggatcactcataatgcatcaggcactggatgccagtggttttatgctttatgtatttcatcattactttatccctcaaggtaggaactactattactatttccattttacagagaactactattactatttccattttacagatttgcccaaggtctccacagaagctgatttcatccatctctgagctgaatatggacacatcctgtgggaatctcccagcttatcccagacgctctgagtccttcttgtctcccaccctactccacctagtggtccatctgcccctggggaaatggaccagggcgttacaatccacccctgctccacttcactcagcctctccagcctgcagccccactgccctctgtcctcagcttcttgctgtgtcctgagactcccggggttttcattcctctctagcaggtggtaaagggataaggattgggatccagggataagatttaaatagaggattaaggctctgattggagttatggttagtgtaaggatacacccacagaatttggggtaggaattggggccagagaacagaatttgggatttcagaattagaggtgccaagggtagtgacattctgttctctggccccaattcctatccttccagctctgccactccatgactttcactctgcctattctttagcctctgcaaactccccagtttgtagagaccatggtgtttccttgctccagttctgtctttgtcagtattggtctgagtttgagaggaaagaggaggagtgaaggagacttctacttggcaggctgttagtctgtggctggcaccgaagccaggatgggaagggggaggaagggagggcgtcagctgggttaggggccctgcagagaagctggccaggaacaattgggaacaaaggctggatactcttccgctgagccccagagcctggccttggccttccgggaacagctccaggaaatggctgagattccagatttggaaggaagaggccagtaaacatgagctgggatctgacaggggagtgtggcctctgtctaggttgtgggggaaaggaggcagcgggcaagagctgacattgtaggctcaaaacctgcaaggcctgtctgctacatatatggacacaggctcttgggactggaaagactcttaaaaggtcttttactccaaccacctttccagggcctgaaaaatactcctgccgaggatcctccaatagtttcagtgatgggatgggcctaaaaagaaatacacaatgttggctcagctttacggatcactcataatgagtcaggcactggatgccagtggttttatgctttatgtgtttcatcattactttatccctcaaggtaggaactactattattatttccattttacagagaaggaaactgacttgcccaagttctccacagaagcttatttcatccatctctgagctgaatatggacacaccctgtggtaatctcccagcttgtcccagatgctgagtccttcctgtctcccaccctacgccacctcctggtccatctggcactggggaaatggatgagggtgttacaatccacccctgctccacttcactcagcctccccagcctgcagccccactgccctctgtcttcagcttcttgctgtgtcctgagactcctggggttttcactcttctctagcaggtgtcaaagggataaggattgggatccagggataagatttaaatagaggattaaggctctgatcggagttttggttagtgtaaggataccctgtaagaaatccccgagtagatcatgagataaagcttagcgctgaagttagggtcgggggttatagctaaatggtcgaggtcagagagtttctcgcctctggtctcctcccagttctccaaggcactgagggccaggcaggaagcatcggtttcctcaaagccgcttccctcctggggcagagtctcggtcacaaacaaccaccaccggcccaccccgcccctccttccctcttcactgtgagctcagagcagcaggacaaagtgctcgggacaaggacatagggctgagagtagccatgggctctggaggagacagcctcctggggggcaggggttccctgcctctgctgctcctgctcatcatgggtgagttgctctccctctcctggcccatgctcctccatccaaggcctgctcagggcagaaggggcctgctgactgcctgcttcccttttgcagtggggggaccagagatgaggatgaggatgatgatgatgagtgtgtgtaagtgtatgtgtgtttgtgcatgtgcgcacacaccagagagagaaagaaggaaagagagactgagagagaaagaaagaaagagagaaagtaagagagagagagagagagagagagcgaacatgctatgcaagccctggcctggatgctgtgcatgctggccctctctcctcctagctggcttgttctttgggaggcaacctttagtagttcagattacaggttttctggcaaactcgcacacaagagaagacagatgaggggtgggccaggaatttggggtgttgctggtgatcagactgggctctgctccctttccctcccaggaggcatggctcaggactccccgccccagatcctagtccacccccaggaccagctgttccagggccctggccctgccaggatgagctgccaagcctcaggccagccacctcccaccatccgctggttgctgaatgggcagcccctgagcatggtgcccccagacccacaccacctcctgcctgatgggacccttctgctgctacagccccctgcccggggacatgcccacgatggccaggccctgtccacagacctgggtgtctacacatgtgaggccagcaaccggcttggcacggcagtcagcagaggcgctcggctgtctgtggctggtgaggcctgggaggggagcttcagggtggggcaaacctgggtggagacatctgagctgaatgttcaagggaacatctgagaggtcagtgggatacctgtgagcagaggcctgggctggaaggctt

SEQ ID NO: 5232 - DNA, 6000 bp, Homo sapiens
caccctgtgcaacccataatttctggtccatcaaaagaaaagggatcagaatcatctggttctgacctcatcctgtatgtctttgacagcatttcatttgtaaaatattcattgggttcaaagtgaaattctaagacaaaattcataggctggtcagcatctgagagcttcactttagtatctttcaagtgtttcagaataggttcatcatgttgttgaaccatatcactgaacaagtcaacattcttagaaacagttaaccaaaattcaggaatttctttggggtcttctttttcttcatcctttttctcatcttcgatcttggccttttctttcaactcctctgaaatctcatcttctttatctggttaccattcacattgttcttctgtgggttcataaatttcattaataatctcaaatcgcttatcaaatagaggctgatagagaacagcatattcctttcaagatcgtgaacttcctcatagaatttggtttctatctgtgcacatttaatttaacttgcaggtttttgagagcattcactcgtcttttaactaccctaggcaggctttcagtgtatcctgttggtgtttctaccagaacatcaagtctttcttgaaggactgcaagaatctgaggactttgcattatctgaacagttagctgatgtgctttgatttttgtttcttcaccagtttcttcttcatgtacttcttcaacatcatccaaatctcgatcaagttcagattgtcagtgtctgccatgttataagaactccaaatatcggcagctagtatgggaagccaggaggcctgagctgcgcaggcagtgactcagggcggcagtggcggcaggaggagcaggaggcggcactgcgagcaaatggtgctaaaaaagaacagatcagtttaactgatcaatttatttgaagtgatattaataaaaatacttcccattattgtagggagacattaatgtgtaataattaagagtccagcctctagacacagattacctgagttttaatatgagctctgacactgactagccgtgtgactatggtcaaggcacttcatgtctcagttttctcatttgtaatttgggactaatgcttaaaataatacttggtgcacagaaggaactatataagcattaactattattattataaatagcttttatttatgttaaaaacacttttatccagtgtttgctacttgccaatcactgtattaagtgctttgtgtgtatcatctcaattaatcctcctagcaaaccactgaagtaggtcctattaacaactctatatgaggtattattactctttacaaatgatgaagtcatttacaactttacaaatgatgaaatcaagactccaagagtttaagttatttgaccaagatcaaataaggtacagtcagaatgtgatacaagtttatggactctagttactctattatgttattcttggagaaccatttttgtttttgtttttgagatggcgtcttgctctgtcgcccaggctggagtgcagtgatgggatctcggctcactgcaagctccgcctcctgggttcatgccattctcctgcctcagcctcccgagtagctgggactgtaggcacccaccatcacgcctggctgattgtttgtatttttagtacagacggggtttcaccatgtcagccaggatggtcttgatctcctgacctcatgatctgcccgcctcggcctctcaaagtgctgggattacaggtgtgagccaccgcgcccggccttggagaaccaattttaacatgtattgagtattataaaagcacccacttcaggcctggaatgtattaaatgtcacttagtatctaacaaccttcccacctcatccctgaggacttgagtacttggctcatggtatttcatttatcagcctctcagttccttcaatatgtcccctgacggcataaatcatccacatcgtccaccagcaccggtaaacatactagatctaatcattacttggaactgttctacttctgaaatggtaaactctggttattaccaaagacttcttggttctttcttactcaatcctgtaacaacagctctttaatgtcatacatatctccttttctttaatttgtaatttttccagtctattattcttctcaaacctcttacaccttttccactgcctggattctatgattgctgttttaaaaattttcttaccaataccgtgtgttattttccttcttgtacaacttccagaaaaacttcaaaattgggttggtgttatgcttttccccttctacctgactgattaaattttgatggagaaaaccacataatcatgcaagctccatcaccatacattaatggtctccaacctcagccaggccctcagcatcacttatcaattctctgagtgattttctactttcatttttcaactctcatttttcctaatgactattccaaaccttcaccaccttcttcaagcatccttttcaagtcccataccttgagttcagtaaacagcctttgctccaaattcatcaagataattgggggctttagttattggagttttagagatccatccttggctacaactttctggttccatattattcctgagagatcgcttccactttaatggtataaacactactttatgctgatgacgtttaaatccgtatttccacttggagttctctacatagtggacatctgtggttggaggccccatagtgtcttagtctgtttctgctgctataacaaaatgccttagattgggtactctttaagcaacagaaatttatttctcatagttatggaggttgggaaatccaagatcaaggtgcctgcagattcagggtctggtaagtgcctactccttacagatgatgacctctctgtgtcctcccacggcagaagggacagaaggggctagctagctccttgaagcccttttataaggtcatgaatcttgctcatgagggtggtcctcatgacttagtcagcttctaaagtctccacctcttaatactatcacctcttaatactatcacctcttaatactatcacctcttaatactatcacctcttaatactatcacctcttaatactatcacctcttaatactatcacctcttaatactatcacctcttaatactatcacctcttaatactatcacctcttaatactatcacctcttaatactatcacctcttaatactatcacctcttaatactatactcaatactatactgaccttgtgttcacacagctccctgttcattgcactgaagatgtctccttgtacttacccacgtgtgtgtctgtatcacagttagactgtgagctctttgaagcttgggactgcacattgtttcttaatgttgaacaaatggatgaatgattcattaatgaaaaactgttttacacctgaaatgatttctctgctttacaaaaaaagggggagaggaagtaattaatatcaacaaacattgtgatttttttcttagtctgactatgagtaacagtaggcatagtgaattcaaatggcactgtgagatctggaggtgcacaaagtgcattatgtcccaggagaagaacctggaattctctgtagccacaataaatttgcaagacttctattaacatccacacaaaactctcatttcagttaaatcctctatagaaagacttacttgccgaatgaaaaatcgtttaccatagcttgttaataacatatagattcttggtctccaaaagtgaacaatagaacagtggaggacaaactagagttaagagtttttttctggctgggtgtggtggctcacgcctgtaatcccagcactttgggaggccaaggcgggagaatcatctgaggtcaggagttcaagaccaacctggccaacatggcaaaaccccgtttctactgaaaatacaaaaattagccgggtgtggtggcacgtgctgtaatcccagctacttgggaggctgaggcaggagaatcgcttgcactcgggaggcggaggttgcagtgagccaagatcgcaccattgcactccagcctgggcaacaagagcaccccagcctgggcgacagagtgagactccgtcttaagaaaaaaaattgtgttttttttttccgtcctgtactgactttctttccaggggctttacaaaaaccctgaatctagctaatgcagaaagctaacctgcttgaacaataccacactttcaaagcatttctttttaaaattcacgtaagaaggtaagggaggactggcatatttctcctgaagttcagtactgagtatttataaacttaactattattagggatccttttgtagttaagctaatagtaagtaatgatgatggggaaaaaaaagagctaactgctaataataacaatttataaagaagttacagtccttgaatgcccactgagtggcaggtgcttttcacaaagtatcgtatttacgcttcacagcaacattttgaatagaaatttatttttcctttttctgtttgaacaactgaagttcattgagttcagataacttggggcaggtccaacggacgagttggaaagactctggggccaaaggctcacaccacgcctctcctagcccctgagttttgctacctgcttgcgtttatgtgcaggcagggcgggtgggtggtggtgggggaatcagatgaagctgcctaaggaattaaacatggaaagtggtggaaaggcgaaggaggtataagcggtgggccgctggaaccctaagagagaccaggcaagaaccgggagaagggatgcacccgttggcggctcagagaacttaggtagaggcgaggggcggggcggggcgaggggcggggcctgaacgaggctagggcggggcccgaacgaggctagggcggggcccgaacgaggctagggcggggcctcgggggacagagtcgaccatttggagacctgccagaagagccgtctctccaagggaatgaaaggtgaggggagcgtgagtgcaggcatgatgggaatctccgtgacttggtaaggcaactcacccttacctgtcctacacccaagaaaagcctcttctatgctcccctggggtatctctcttgcagagtaggcaggtcaatgacgaggagagggtcctgcccagagcgtgcccccctccgtcacttggtacggcccgtgcccccgccgctgatctggcaggctgcgcgcgcacactccggccgggtgcgggccggcggggcacagcggcctctacggcccgcctccgtcagtcattccccggtccctcctcccgctgctcgcgtgctccgggccggcccagcaccctccgagttacgtgcccgcgctccccggcggggaggagcgcagccgcgggggcgcgccccggtgactccgcccctcagctcccctcccctgagcccgggagcccggctcgcgcggctaggtgcgaggagacccgggaccccacgcccgcccgccctgcccagcgccccagccccggcgtgcgaggcgccgctccctcctctgccctgcgcggtgcatggaggggcccgttcggatcgcagccgccgccaccgtagccgccgccgcgcgcgcgcggggggatgacctgggggtggctttccgagccggctgcagcgcaggaggtctggaggcttagccagccccgcggagaggtgcgggggtgggggtcccgccgcagggtcggagggaggggtggcgcgcgggcactgggcttggggggccttggcttaggggacgggaggtcccggggacgggcgggccggcgttccctggagggcgtgggggtgcagggctgcgtgcggggtctggatgctgatgcttgcccggcggggagccccggcgttccgcgtcctcgggggctcggaggcacctcgcgggaggaggcggggtgaggtgtcagtgacacgacgaaacctcttcttgacgatggtcctcggg

SEQ ID NO: 5233 - DNA, 6000 bp, Homo sapiens
ggttggaatagagactgtatggccagcaaaacctaaaatatatactatctggccctttacagaaaaagtttgctaactcctgacttaaggttcttgttaaaaacccagatttgtgggctccttccctagagattctggtttattaggtctgggatgtgttccaggtggttttcatgatctgacaaattaggaagcacctcgcagtgttttgtccatatctgtggtacagcactcccagggcattgcaggtctgtgtattttcttcctgacacactgaggtcctagaccgcagggatctgtcttatcaactccactttctcgcttcctaacctggtgcaggagtcacccaacacctttggctgccaagcagctaagaggctgtgccaggcacccacctctgcactttcacgttgctctccatggctgcagcatccttttctgaagccagcaagaggtagcccgaggggttgaaccggaggtccaggggaggagcatcgactacggccaggtactcctgtgtgcagacagaagctcctgaaagaaactgacttaaggatgccagaaagagttttcctgccttcttcccccacagctccccaggctcagtgccccagacctgcggcaccaccactaggaagaaggccagggcccccctctcctagttggctgacccattcttgctctctggctaccttgctagctgggctgctccccactctgggctaaaggaggggtaaccaccccaacatcccggatatcattgcacctacattgatgttccgtagaaagctggctgaaaagagggagagctggatgttctcaggcaatgagaactgctgacaaatcccacctactgagagcccagtggaggcctgtgaatactgtggaaagacaagaaaagttgaggtagaccagtaccctatcacatgtgactagaatactgcaatgaaagcttcgagctatacacctaaagttgaaggggagtcctatttgcaagtctataatctaagacccatgtgtaagtcaacttgaaggcaatggtgtttaaaatcattagtagtggatgtgcagagcagagagggtcagtcatctggaaagagctgacacagtggtacaaaatggtaatggcctggaagtccaagggcaggcgattaacgtttgacctaccatttgggaaatgaaaggttatgattgaagtaaagtagcaagactcgtggctagctggcaatgcaaacaggaacacctaaagtgtaaaaaccagccgggtgggtggctcatgcctgtaatcccagcactttgggaggccgaggcgggctgattgcttgagttcaggaatctgagaccagctgggcaacgtggcaaaaccccatttctacaaaaaatacagaaattagccaggtgtggtggtgcatgcctgtggtcccagctactctggaggctaaggtgggaggaccacttgagcctgggaggtggaggttataccgtactccagcctgggcaacagagcgagaccctgtctcgaaataaataaatacaataaaatgcaaaaaacctcagaagtaacgggacccaaaagaagcaagttgagggctgggaatggtggctcatgcctgtaatcccagcactttgagaagccaaggcgggcagatcacttgaggttcggagttcaagaccagcctaggcaacatggtgaaacctcatctctactaaaaatacaaaaaatagctgggcatcagggtgtgtccctgtaatctcagctactcagggggcggaggtgggataatcacttgaacctgggaggtggaggttgcagtgagctgagattgtgccattgcactccagcctgggtgacagagcaagactctgtctcaaaaaaaaaaaaaaaaagagaaaattgagacacttaattatagcttgaatgcaggctctcatgaccagagctatgagatctcgaaaaatccaatatggtgatatctgctttcaaaagaacaaaccttattgccaagcttcctggttcgactgaggaagatcctaggaaaatttctcaacaaagtccaaagcacaatctctgtccgttggaccctccgagattgaggtcttcccctcctctccttcccttgtcgctagagtccttaataaaatgagtcatctttcttgccccactcatgactctgccctaccccagacctcaccgtgtggtcccgttccaccactagcactcgaatagcacctcgtctgctctccagcttcttcagccaataggccacagacaagccaagcaccccacctcccacgatcaccacatccgagtgctcgggaggcaggtggctggtgtcttgcagtagatcacaggaccttccaggcaggatcgacttgatcttcttcttaatctcagacacctttccatcccagtctgtgggatgtagttagggtcagagggccaaacatttccttcccacatggttggggggttggaggatgggcacaggaaaaggtgagctaaacagacacatgagttggcagtccccactgtcagcccatctcataaggtcaccttgcacccaacagtgttgccacagttttctgaatagtccacatgccatcagtctcttcatgcattgtgccaagcactgcaagattcaatttcctaaaattaattttctacattacctcctgcatagacctctcctgatcccaactcacatattcaactgcactgtcatccccacttgggtcttccaggccttggaccaagaggccctggcacaccccaagtcacggcaccctctgaagcatgtcaccgctaagcggtgccatgcttatcctggatatccatcaccaccaccaaacctacatttatatcctatccataatcaagttctgcgggctccggcttccaagtaactcctcaatctgtcccctttcttcctctgccaccatcatcctaggccaagccactatcatctctcaactggacaaatgcaaaagcatcctaactgttcccactgattccccgcttccatcctaccccctgctgtgaacatgtttacaatatagctagaaatatcttttcaaaacacaaatttaatcacaaaccctcttgcttaaaaccctccaatgagttttccattactctaagaaccaaagtccaaagacttaaacacagcctgtaagatactgcacaatctggcttctgttcatcttatcctcccctacactccaggccctttagttccttgatggcaccttatttcctcccaccacagggaacctacatatgctctctgcttttaaactgtgtccacttccttgcctagttaattccttgcttgggaaagcctttcctgacccccagaccaggtcaaactctacatgatctcttggacacaactgcagtttgtattgttacatactctaaaatccatgaggggggaggctgtgtttaccttcaccactgaatctccagcctatcgcaacacccggcatattctaagtgctcagtaagtatcttaaataaatgaatccttttgccatttcatacctcactcaaactcttctcagcagcactggaatctttctttggtctggccttagcttacctgtccacactacatttcatgctactactcacaccgtctatctagatggcttttgccagttccttgcataagaacaatatttttctcctagtctgcactcagttatttagagactggaacacacacctttcttaagccagtaaacatcctccaaggctgatctcagttcccacctgctccatgtacttctaccgttatactagctagcagtgcaaagcattaagttgagttctagctaatctttttttttttttttttttttttgagacggagtttcgctaagtcgcccaggctggagtgcaatggcatgatctcggctcattgcaaccttcgccttccgggttcaagcgattctcctgcctcagcctcccgagtacctgggattacaggagcccaccaccacacctagctaatttttgtatttttagtagagacggtgtttcaccatgttggtcaggttgctctcgaactcttgagctcaggtgatccacccgcctcgacctcccaaagtgctaggattacaggccccgcgcccggcctctatccagtcttgaactggcctactgtctattgaaattttccctctctaggtacactctagccattttccagaacattcactgaatcccgtcttctcttcactcctttaccgcaacagcactaagtacagcatcctgaacacgggcaggacttaatgcacatctgtgccaccgattatcaatcagtctgactgtaagcttaaatggagaatgatgtgagacctgccacctgaaaagggccgccttgggagccatacacctgcacagcccctacaagctctggtaggtaagctaacccccttccccaagccgacccactgtcctgccagtgtgggccatggtttcgggtcctgaaggacacacagtcggaggttggggacaacccagaaccacaataccctctgtcgtcctcaactttacccagagaaaagcctcctctgcgcgtgcctggcctccgggtcaagaggccccggcccatgccgtgcggcagaaccctccgaatcataacccctctgagcccggaccctctgaaagctgcactgctgcctcgctattatcgcagccgtcactgctccgcgccaaacgccattcagacgagcgcgccaattggccagcggccctcagggctctgccccgcccaatgctctaggtggccgtctccccgtgacctctcctggagccccacccaggcccgctcccacccgccattggctggccttgcgatacgtcagtcctgcgcgcccccgggcggagatggggagggcacccggcgttctgagcggaagtacggttgagccgatttccggggccactggtgtgacgtgtcccgcgcttggcgcagcaggaagcggcggcgaacgcggcctgaattcccggcgccggccccagctcctctgccgctgccgccatgctcgacttcttcaccattttctccaagggcgggcttgtgctctggtgcttccagggcgttagcgactcatgcaccggacccgttaacgcgttgattcgttccgtgctgctgcaggtaccgtccccgtgggatcagaactccaggctcttctttcctgacccgatccatggtccccttcgactctattccgcgcctcctcccaccctccccgcccacctcacactgaccactcacgcgtaacccggactccgcttcgttttctcgtccccttcagactaccccgcaacttaatgacggcccccgcctctggtgtctcaactctagccgaattccggcgcctttgggattctcctccgctccctctatttatccccagcagcttggttttgttgtttcgagcctaggtgaaataacagatgggaaaacacctttacaaaactaaatggtgtatagctgctagtaatctgattgtttacatgactacttcccttttggctcccatgtgtcttgctctctctctcatctttttcccccaacttggttatcttatttctggtggaatgccagagagaagtgccccaacatcctcttgtcctggggacagatttgagtttgggggaaatgtttggctctttcccaaaggttatccaaacccagggcccaaacctgggttttctggggatagtctgaacactgagacatactctttctccaggaacggggaggtaacaactccttcacccatgaggcactcacactcaagtataaactggacaaccagtttgagctggtgtttgtggtaagtggggtgttgtagagggacgattgcattgttaacatagccctgatttttaagagaactctgattaattgcagccagtgtatatgatgacgtaactgaaaaaactagaaaggtagatgggggaaaacagcagctactgggcccaggcag

SEQ ID NO: 5234 - DNA, 6000 bp, Homo sapiens
gggcttgaccaagatattttgtgaacatattcaaatttcgaagaagtatcagaaataggttaagacctgagtccaaaggtacaactcccattgtaagagagtccctgggacttcagaagggcttactcttctagtcataagccagtcatttaataaatcattgctcctttgaactaaatgacacctttgtggtttaaaggagttaatgtgccttccagagtctttaacttgctctcagggaatcacttacagctcaggaggctccagttcattttggaatattgaaagcttaagtggaagagtcagattttaatctgtaatgttttatcatcttccgctttttattttttgcaggcagcccccaaccctaacaagtatttcagtatctaaaaatccatccttcctgttccattgttgggctccaagtgcaccaatccatcatcttaacactatttactgcagagtttgtctcagcaaaaggttgggtgaatgtgaattgcactaaagagctgttagtgtccacacagtctactctctgcttccggggtttgcacttgctgctttcatctgccaggaacaatctcgggcttttcctccttctgggaagctcctactgggatcccagcttagaagtcctgtcctcagggcagtctcacactctccccgtccccaggtgtatctgtatctcatgctttgccatagacctatatattttctacacacacttgtcataaatgtaatcaattcacggttcaatgttctcctcccccactgctctctgaattttggaggggtgaggacagtcttgtcttgctttacattgtatctctttgcatcacatgtagtaggtttgtacctggcccagagtaggtatctaagaaatatttattgcatgaatgaatggatacataaaataccacaaggtaatctcttcatcagtgcagttctctgtataacaaagaaacaatatgagtcagaggaagtccctgtatccttgcccaaggtcatacagctggtgtgaaggagcaggactggcatcaggcaggagcacaccttggacccagggggacctcacccctgatccaacattcccattccccatctggccctaggaagctggccgctgcctttgaagatgtcagcccaacaccgctgttccagaagaaagaatcctagtcagaagtgcaagtgtgacagtcaagtctccttgcacaactgcctggtgttggttggtttgttcccccacattgttgctatttaaatacagttttgatgattttgtttgctttggaagaagaaaataaagattcacagaaggtataaaattgcatattatttaccccagagaagagagcagtccccctagtaaatatgcattgaagcatttttatttgtatttgtattttttaaagatgtttaaatagacccagtagaccgtaatatctctttacagagttggtgccatctattgattaaatatgcatttatacatttcttcctctactttttttaaataaaagagacatatgttttaatcatataatagacctaaaagaattgatcagtgaaaatacatatttatgtgtttccttaaggaagatcatattaggtatacaaattttaaaaattttttcctgctatacatagaagtgtgttaaatgtgaatttaattaaaagacttggggtatgtgtgtgtgtgtatgctcatgtgtgtgcatgtgtgtggactaggaaaaatgttggcagaataaatgggtgtttttaaaacaaaaatatagttgacagggaaaggtgaaagaatgtaaactctggagtaagaaagacctcaatttccttgccacttattagtcttagaggagggactcgagactctctgtaacttgttctatttatttatctttgaaatgggctagcaatacagagaaaatttatgaagttcctaggattgtgattggcccaagacagtttaatgaaagtttgctcctgtctggccactagctaccgactagtagtgtgtgcccctctttcctggagtggggttggggctgcatggaatgcacttccatgtcctcaggtgctactgcacaggcagcgctgggactcggtcccctcctaggctgccagtgctgctccttctctctcctcctggtggttaagagcaccagtggtgaaggcaggccttgaaccggggctccacacccgggcagctctgcaatgttggggatgttattaaagctctttgagctccagtctctccctctagtctgtgtgggtgataaataaatagggatttataagggcaatacctgagtgattggcatgtgaatattcaataaaatgatggtgcccaatatgataatttcttctagggagtcgcttatttggaaacagaaaaacccaggattaaattttggctgtcactaactagctgtgtgacctcggataaattacctaacctttctaagtctcggtttcttcatctctcaaaaaggcataattacaccttcatagagtaacggctaggaattgaatgtgataatatttttaaaaaaaatctagcctgcagagggtgaatacatgatgtctattatccgtagaatgccatcagtcactacgtcctcctaactcttctgcgttccacatacaacccccttcttttcctcttctactgctaccaccagttccaggatctatcaaacttgggccatgcctactaacaagtgtgcttgccacaatccctcctgtacacttcacccagattaatttccataaattaactccctctcattcacagcgctcccctgctcaaaaagaaattaactgtttttcccagcagggggaaatttctaaatcactggtctaggactcaaggtctttctctcttggtctcccatctcctcccctaactcccccctgcagggtttctacctgtgtctgctctcttcccctccatgagatgtctatctcatttctgtggcctatctggtctctcccacaatttcaagccagttgtattctccagcgtattcagccactggtaataattctggatttctgcaggattccagcattgcctgaaggattcacatatcaatttgcttgtgaacgacatgtttgcagtgatgaggtctacaaaatttgactctaacagtgtgtacgtgtcctattatttttatgtacattcgcaaagtcacaatgctaacttttggctgatctcctgacttatattgtatgccctttatagacgagaacaaatcatattcttcatattctcatccctgaaaaaatgactatgttaagtaggtacttcataagtgtcagcggatgatacaatcatcatctgttttctcttttactgctgaagttttctgacttgttcataaggaggggagtaatcaattgttttacttctttaaaagtaaacatgatttattttatagaaagagaggcgctcagtcaggcccaaagaacttgttggcaattggctgctttataaaaactgtgtggattttgcaggacagacctgggtttttatcttaactcattagctgtgtggcaagtcactgaatcgctgtcaacctcagttgaaaattcaggggtcataatgcctacaaggaaggacgctggtgaggattaactaaagtgatagaggtgaatacctgcccatagtaggtcacttgggaaaactttgggaattgcagcaaaggaggaagggagaaagacctcctgtggagtgtccctcacagacctcaaggtgtggacacgtggagctgggaaggaatccaagccacttgaggtcttcggagagcacctgggacagaaatcgtctgctgagtcccttctctaatacttggtgctattttgatcacagaccctccaagttcagggtatagttcagtggcagcaccactcagccagcaaggtgtgctgcttacaagcacgtgttagggagggcaagcaggccgttttagagcaggggaaagttctgaggtttcttacacccagagatactgccatcctgtgtaaactgccggtgtaaactgccattccagaggaagggacagactggaccctgaaaaggagaagcagaaaaaaaaaaaacagaaggaagccacaggtatccttctgtggccttctccttgtgaagatttccgatgacttcagcaagtttccgcctccttgagatctaatctgaatctgtccctgcctatgctgtaatcatagcaattgtttgagcttctatagcatcttgccttggtagagtttcagaatgctctgattgtggggaactggccaattctccctgcatcattggtttaaaaccgtaacatgcccatctccttactgggaaaaccaactgcttccaaatgctgttaatggccgaatggaggggtagggtgcagatttaaatgtctgagctctccccgtgggtagcagttcctgctccatccctgcctggagactaggaagaaggaagaatgataaggaactggcatgggcattagtcacatttctgccaagcaacctttctttcttggtgtgccctgagccctgctggcagtgccaggccctctccactgcccaccaaggagctcgtgtgtgttcacgtgtccacgtgagccccacatcaacatactcacacagatagcaacacgcagggctgtgctccggtgagggggtgagtgaggggccggcttcgactccccttggagtcaagccttccaagcaggaaagtctccttccgtcgctcaggagagtggagccaatgcgtgccttggaggactgctctgagccctgtgcagattggtgctgatgattcttaccagttgtgtgcaagaaaagaaatcagagacgctgcctgcctgctcccatctctcgcgcgctctctctctcttctgctctctccctccctttgcaaacattggatttaaacctgctcagaattcagcacagaggaaggcagcagcggtagcagcagcagaagcagtagcaagcccggcagctgagagcaccgcagcgtcgagatgtaccatcctgcctactgggtcgtcttctcggcgacaactgccctgctcttcatcccaggtaccgtacaggggaagggtgttttctctccctggggtgattgtacgacgtgagagcaggagaggcagtggggagatggagaggcaaggaggaaggggtgaggacagggagtgtgagatgcatgtgagtgaaagaggtaggcttgctgtgtgcacgcacacacacactcactcgctcacacgcgcgcagatgctttcagcacgggatttgctctctgttccgggggatccagtgagctgggttcgagatctgcaccatgctgtgaggcactgctgtttcagtgaaagtcaccaactggcattaaccagctgtggtcctgggggtaggagaagaggggtttgaactcccagccataaatccttcttgctgcctatgttgggacctgcagggtggaaggggcaccctcttatctctctcagtcgtggtggtctctctctgtttctgaatcagtccagatctctgcgcctccctgtctctctctctgtttcttttctctctctctctctctctctctctctccctctccacctctccccactctcctcctccctcccttccttcggaactgctctcccctaccctctccccctggagctccttccctgccccatccctccttctcagctcactcatctgctcctgcatttcttgttgtaacacaggccctctactgcctgccgtcctttctttatccttccaccaaatgggcagattatgcccttgaaattcggaatcctctcagtatctccttcctgttccttacgtcaggaatatgaatttcccttggcagaatttgggatgtccctgctgagggaaggttggaaatttggatttgcctgattctccccagccccttccccaccttgtctaatgatttaaatgtgatcccacctctcacagcagttatttgtttgg

SEQ ID NO: 5235 - DNA, 6000 bp, Homo sapiens
ctcttcaaagagcctctccctgatcctaccctcccaggactctctccagctcttgaccctatttcttcccttcctgtatctcctccacctctgtttgttctgtgcatttgcccatctatggaccactagcatataatccctgagttgtgctctgacgatgagcctgagtcctggaactaggctgcctgcctcaaatgctggctatgtcacttactaggcatgtgaccttaattaaattacctaaatactacgccccagattcctgacctataaatggaaactataatcgaaacttgtcacaaacagtaccttgtaaataacaccttacatatgaaattagctaacgtgcatgaagacttggaacctaacctggtgcatacatataaatggcctaattgaagttaacactcctaattgctgttgtttactgcatgtctctggtgcccagcacagtgcctggcatatgactggagctcagtaaatattagctgaacacaggaaagcatgcacagatgggtaagagcctccagatgtgtccggataaagtgctatgggactgaggggaagagcagttcactgccagaggtgcctgagggtcgggagggctataggagacagcacaagccacagagctcaggttgggaaaggcttcagtgagactttggaggtgtgggctctgcagagtagttaggggatagtggggaggtcaaaaggcaatctgggttattttcacttctgcaagaggacaaagaacggtcccaggttagcctcagagatgctcccctaagtctgagggctctgctcctatcacctctcatccctccctcagccacagaggaaagaaggcaaaacaaaatgacatgactgaagtgttctaaagccatgtaactgcaccctttccctggaggcagagactggagagaagcaggagtcagcctttttgcaccagctcaggaaagatgccggcctggcttctgagaagagaggagggcagagggaaacctgttgaccacatgaccattttcaattttttatggacaaacaagggtgttcaagatccaaagctcagaccagaaacctaatgaaagggaagagttaaaaggtctcctcctctttctgtatctgggccatgaactccaccacccaaaacagcacatccacacacatccgtccaggagccactgtgggaacagttcagacacgcctgatagcatggctgggtccctggggagctcaccctgcctgccgaggcagagggcagctcttcctcctctcactccccctgctctctggcagcatctgggtgtgcccatgcatgtgcatgtgctgtcacccttgccagggcaatgacgggagaggacgggcaccttgtggggtgggattcctcactgaagaatcccactgggacctttccactcacatcagcaaaatcactgctatagattcctggtgaaggcaaggggagattggatggcccccaacaatcagactggctaagacgggtggggtgagggcctgggccccacaggccagggcggcaagcagcgcagctgcgttgcctctcttgggtggtagctaagaaggacggcacggctgaaaaggcagtatcattaggagtctggagcagaccaaaactcctgctgaaagagaggccagggcagacagaacccacgaggggaacaattaactgataagagtaaactaattgttattcatattaaattagggcacaggtgatttggagaaaacctacagaccatcccagatgttttgcaggttttgcattgcagatgacggttttacaggactcttctgggattcagattatgggaagtgggccaggatcagagcgggggcagggctcccgtcctgcttaactacacaataaacacataacggtttgtcccagaggacaaacccgggctttgcatactaaacatgctggtgctaggctttgggggcctctgagaagaggggctcactactggcagggaaggcagggggaggggaagatcaatcattcagggagaccttagaggtgctccagatgtttggagcaagggtcaagctgtgaggatgcaccaagtccagacatgggagggaaggatttccacagtcctgcagaggccaagcaggaagacaggggtgggagtgtggctgacccgggggatggtgtgtgtacacgtgtgtctgtgtgggtgcaggtgcttcaggtacatccgtgtgcaagcgtttacatgtgcacatgatgtatttcagagtgtgtgtgtgtgttcatgtgggtgaatctgcatgtgtagctgcctctatgagcatgttttgtgcctgcgtagatgtcagtacatttgtgtgtgtccatacacttgggatgttgccaaaacttcccaccaaaacgaatggcaggctgttgtctcttcactgagccttatcatgctaattttaatctcctattattgttttaaattggctctaaaaattaatactaaaaattctgtaaacagagcctggaactaagatgcaagacaggtcccttgaaagcggctttattatcacaattgttcctgccagaatgctgaggtaaagccgagaacccctgcagacagcatctccgagccacagcccagcaggacaagtcggaccacagcccacttagtccaaccctctgtttcattactgaaaccagccctgaggggaagtcttttgctagtgccttcagaatcggcctgaaacccaggcctcctcgtcgccatgtccctgagctctcttgagatcacccctcatgggtgtgtttccctgttggtaaaatgagggtctggaacgagacagtcttcacggtcatttctgtcctcccatttggtgattgtgtgactgcggctggctggcttagcagaggagggaggcaatgtgccctcctggacggcctggcccctccttggtgctctctggtacccccgcccatcctgcttctgcacctgcccttcccctcccttcagctggtgtggagtctaaggagaagcagagtatggagactaggaaaataccagagaacaccgacttaggaaaggtctcttagcagagtctaaaagagagggttgtagtaggggcagaagaaggcggagcaaggctggctgggattccactcattaagagaagggggaaatgctcctgtaccgcagcaggaggtactgaggttagattcagaggaagtttcttgccggcaaagggggctgttaagcacaacaatgaaagagcgcacgacaaggaggagcagttatccctagagatagtcactaaggacactttcacatgtctgtggcatgatacggacggtgaggtgccttcctcccctcaaaatcttgaccaaaggggctgattctggagtctctgccccctccccacctgcacatcctcagtgggaagagcagggcccggcttggtcctaacagggcaggaaagctgatggaaaagaggcccgtggtcctcagccccagcccatagcacgggggcacagctctggttaagcagtgcctagcagtggggctggaactggtttcccgggaaggagggagaccctagagaaagtaccgacagtccctggtcccgccgcgaaccccgccatgggaggtggccttctcctggggctgtgaagaggacacagcgggtgtggcccgaatacaggtgtccaagagcaccgggagatgccaacctctaaaacgagtgcaaggatggcttcaaagtctccgacaagctgaaggagtatctggaatatacagctccacagaggcaccctaccagtgcacccacatacgtccaagtgcgcgcccactcactggcctccgtcccccgccgaccaacacaccgcggcagaggcccgggaaactcctggagatcccgctgcccccggcctccccgcgcccgtccgcccacgcaggcctcccgggcctctctccggaacgccgggtgcaccggcccggaaggggaggctggggtgaggctgacgcgcggcggctcgaggtgcccttccacggggcagcagaccccgtaccccggcacggcaccgtccgcccccaccggccacctcccatccggggtgcctggagccaaggaaggagccgcatcccccaccggcttcccagctcggcctctcggtcccagagcgccgccccccgccctcctgcagcagcccggccggaaacaatcaccctttgagagaggctgccaagctgggcgccaggagcagccaggatggaggcggggtggaatgggggtgcaggcgggggccgagctttaactctcgagagccgagatctgggggtgcgctcggcccctgcccgccacccctgctccgccgcctgaagcgggagccgcctccgcgggggacggtgccgggggagggtggggggcggtggggaggtgataccaatcccgggggggggtcccctcgccggcctccctcctcgcgcccccgcctaggctggcgaggttggtaccgaccattagcagctcgggtcccgccggcgctggcgcgggctcggggcgggggcggggcgggggcggagagcgggtgggggcggggcgggaggcgccggcagagccgcggcggcaccggcgcatccgccgccacctcggggactctgcgccggcccggtcggctcggctccggccgcgcgcccccctcgcccctctcgcccccgcgcccgctccccgctccccctccccgctccccctccccgccccccgccccccgcctccctgcccgcgccctccctcccgcgcgctcccagccttcggccgccgcctcgctgagcccagaacgagccgggccggggcggcggggccgggcggggcgggcgggcgcgcggaccccgcggctatgaagtggcccccgggggcccggagcccgacagtccccggggagggagccgcacgcggcccagggcagcggtctaggggcgccggggccggggcgtaggggccgttgcccgcgatggaccgcaccggagacgctccggactcgtcgccgcaggtcagtgctccccgcgcccccgcgggcgccccgccgcgcacagagcccctttctgcgtccccatcggtgcccacgccatgtcctcccgggcgcgcgctggggtgtgtgtgtgtgtgtgtgtgtgtgtgtgtgtgtgcgctgcgcgcgctgggggcagctggaaagggggccgagaaccgagctcgggctgggaggcgctgctgccgaggggctgcgaaacaaaacccggcacagcctgccctcgtcgaccgggattaggggaagagctggttctcagcagcttctaacaatcggcccgggctctcagtcgtcagttcccggccccctcagcaggtggtttctggtggccggatgaggagtcaggggtcagtcgtcccccacctccccacccctgctgcccaacagcgctctctggatcgctctctggctcctgggcactgccaagttaactctcttgagggggcccgagctctgcggggcgcgctgagggacccaggggtagcaagggtggcaaagggcccttgggaccttcggtgtagcaaggaggaaggaggcgcgaccagttcaccaccctcccatctgcacctgggctcaggtctgaggtcccaatccctccaaagtcagagcacacaacttccagaaaaaggaggctgagagttgaggcaggaaatagagaaggaagccaccaggtccgacagtgccagggtaaggaggtgacagccccgtaccaagcagctaaggtcaagaaccacccccacatgcacacacatgggagccttggccaacttccctgtccccttcctcccccagccaggcctagctgcatggattcttgtagaagctggagctgaaggactctggacatacaggaaggggacctttactgacagttgctagcccagtgcatgggcacctgcataggtggggtgcccaatggggcctagagcttgggctgtgtagcacgcactgttgaa

SEQ ID NO: 5236 - DNA, 6000 bp, Homo sapiens
actttgggaggctgaggcgggtgtatcacctgaggtcaggagttcgagatcagcctggccaacatggcgaaaccctgtctctactaaaaatgcaaaaattagccgggcgcggtggtgcgtgcctgtgatcccagctaatcgggaggctgaggcaggagaatcacttgaaccgggtaggcagaagttgcagtgagatgagatcgcgccactgcactccagtctgggcgacagagcgaggctccctctcaaaaaaaaaagaaagaaagaaaaaaaagagaagtgaaaagtacacactcaagaaagggccgtgtgggcggagactcgagagagtcacttgcaaggggtttgggtgggggttccatctttcagggtttctttcaccaagcgggggagtatcatgaagattcttgcaagaaggtgacgatttctcagaactgaggtgccttgcattttttttttcaagacaacatagagggtctttattggatagcagctgagagaccatgcctcagtcctcttgagggacgcctttccccccggcgtaccacttctttcccacgtttcccttctctgcaggctacagcttgatgcaaaagaaagggatcgtcctacaggtccttatacacaacctttgagggcacagtttggaggtggagtggcagaggacatttgtaaaagtgggacagcaaagtttcactgtagcccacgaggaagtagaacttgcgggcaggcaagtgcctcgggaccagggcacagatctccaaccggttggcccagcactgtaaaaccagcgggtcagccaggcagcccgggaaggcaccccacatgaacttgcgacggaaagcatcctccaccgttcgctccgccgcatggtcctccccaccagggttccccgcgtgagcgacctctggccctcacggcgggcgacgaagtgcggcgcgtgtgcgtcctcataggtcaccggcttgtccccctggcctcggcggactcgggccgccggttcttgttacagaccgcggaggtgtgcggggcccgccccgcgcaaggcagctctcggccccgggacggcacccggggccacccgccacccgccacccgccgcacgcggaggccgccatcttggccgagcgcccgccatgtttacagcagatctgtgtgttcctggaagtgtcgcggtgcgggtgggtgtgggccgagtacgttcctatgaggaggtcctaggggacgcataggtcgcattcagcgccgtggtggctctggtctgtcttagccagcttggcccacactgcttttgaaggtctcatcggcccctcgcttctgcagcaacctcaacagtctcttttgctagtcatgcgaggctgctgcttagaatgttctgttctcccgcagccgctccatattattctgtctcattttgtggatttaaagattttctgatgggcagctggcttaaagagttcagctttggggccgggcgcggtggctcccgcctgtaatcccagcactttgggaggccgaggtgggtggagcacgaggtcaggagatcgagaccatcctggctaacacggtgaaaccccgtctctactaaaaatacaaaaaattagcaggacttggtggcgggcgcctgtagtcccagctactcgggaggctgaggcaggagaatggcgtgagcccgggaggtggaggttgcagtgagccgagatcgcgccactgcagtccggcctggttgacagagcgagactccgtttccaaaaaaaaaaaaaaaaaaaaaaaaaaagttcagctttgcctaaagagttggttagtcgaaagaaattcttgagtttacataaccggggctgtggaagccaaggggcttgttatgcagatgaggcctccaggtggcaggctggagacaaggatgataaaaaaaatctctcttttccacccttaaaaagggctcttagttaaatgtctgttctataggaaaagacctagaaagggaaggagattctctccagaatgcaaatttccctaataagagacagttgtgcaaggccatttcaaaatatgccaaataaatatattttgaggctgtgcatggtggctcacaccagcactttgggaggatgaggcaggtggatcacttgagcccaggagctggagaccagtctgggcaacacagtaaggccccgtctcaaaaataaaaatacatatattttgggggtaaataatttttatttccttcagagcctgctatttgttgtgaaaggaaaataaatattaggaccccgaaatcactgaaccaaaaggagacgtcaagctgggaactgcttagggacacctgcctcccgttctactcctaaaaacggctgctgccgaaacaaaaagctatatacctccctcacagtttgtccacagggaatttccttgtggacaaaagacaaatggaactcaaacttacccttttgctcgctgagataatgcatatctgattgcttcctttgcaaaggctcatcagaaactcaaaacaatgcgatcctttgtctcttctcaacctatgacctggaagccccctccccacttcgagttgtcccgtctttccagactgcactaatgagcgtcgtgcatatattgatgtccatgtctccctgaaatgtataaaaccagctgtgccccgatcatcttgcgcaccctgtcaggacctcctgaggctgtgtcacccgctcatccttaaccttggtcctaaatcgactgagaactttctcagatatttagggtttacactgtcatgtgacgctgtaccacagtcagttggaatttggtaccttattgctacgaagagtctgttttgtcagtactatgagctccatctcagtgttaatgctggtcggttgtgcctaaactccacagggaggggatataagtaggcctgtccaacctccctgtcccttcgaggctgtgaattcagtttttcaggtttgtttgggacccccttggccaagggagctccattcagtcatgggggcaggggaggcttagatttttatttttggttttcagtcagcactccagtccagtcaggagggcttcagaccacgaagaggggaggtgtccccacggcagagctagacacagatcccaggacattctgtgtgtgggggagacatggcccagaatagaaggcctgtagaggcctggacatggctaagcccttagagctcaccccagccagcagaaggaggaggacttagggtgttcgacgtcgagaagcactgtgagtcgatggtagacacagccattgttaaagttaaatcttaggaatcttagaaattatcaataaaatttatcttatagagccaaagtcatcgttactcaaacacatcactctgcagttacacggctgcacgctaccgtcatgtaaactctggaatactgacgtggacctgaccacccgctgaggtgaaaggctacagcagggtgagcagctgcccatctctgtaaattccaccctcagcgatgtcctctgcggagtctggcctggtgggagaataagcccaggaaaatgggcccatgtagcacatcaggaattaaacagggcgcaggtcgcggtgcacataggcctgcaggccacgttcctgcccctgtgacccgcactgtcccctctgacaagctcaagtgcacagcatcagctctgtttgctgcaatagcctctgccaaggaaggtccaggaagaagcccagaggccacacaaggtgtttccacagggaggctgtaacctcaggagctgctcagaggcagcaccggttcatgggaaaaacaggcggcaactacaggaagcagctggcacccgtgtgaggacccagggaagaggcagagatgatcagaacctggaaatctggagggtgccccagggaccagccagccagagctctgggcagcgtgggtgctgctgggctgtgtggagcgggtctgggagccgtcacccaggtgggcctccaggggaaagggccatggcttctaactccaccgtccaggtctctgctattggcatcccacagccccctcttctgtcagtgctcccagagtcccctttcctgggcctggagggctcctttggggcaggcaacattggccgccaaccctctgacctgcaccaggagacacggggacctttaacccccaaacccgcatggagcaggactgcaaccccagcaaaggacaagggatgtcagcagatgaggcctgtgacaagtgagatgagggcttttttttttttttgagacggagtctggctctgttgcccaggctggagtgcagtggcacaaccttggctcactgcaagctccgcctccccggttcacgccattctcctacctcagcctcccaagtagctgggactacaggtgcccgccatcacacccggctaatttttttttgtatatttagtagagacggggtttcaccgtgttagccaggatggtctcgatctcctgacctcatgatcctcccacctcagcctcccaaagtgctgggattacaggcgtgagccacggcgcccggcagaggtgagggctttggggaaacggttgtggggcctggagtgtggaggcgtcagcgcaggcctggcaggagccctgaaccgggacagtgaggtcctgcagctgctggcctggggtgtggagactcccaacacaggggaagtctccaggaccccacaccactaacaagatgagacttgtgctcctttgggctctagagaggaagcccctcttagccctcagcccctctttcctccctctcctaaagtaatttgatcctcaggaatttgttctgcccttatctggccctggccagctctgcatttgacaaatgccaggaagaggaaactgttgagaaaacggaactactggggaaagggagggctcactgagaaccatcccggtaacccgatcaccgctggtcaccatgaaccacattgtgcaaaccttctctcctgtcaacagcggccagcctcccaactacgagatgctcaaggaggagcaggaagtggctatgctgggggtgccccacaaccctgctcccccgatgtccaccgtgatccacatccgcagcgagacctccgtgcctgaccatgtggtctggtccctgttcaacaccctcttcatgaacacctgctgcctgggcttcatagcattcgcgtactccgtgaaggtgcgtatggccctggcggaaatccagggggtgccggtgagcctggggctccacctgcccacatgctgcctggggtggggacttgtgtgtccctgtgactgtgagtttgtgtgcacgtctgtcctgtgtgtgcccacgtcagtggctttgtctgtgtgatctgtgtgtgtgtgtggcttggggaatctgcccagtgcaggtctaggaggaggctccaggaggctggctggctggctcagagtctgtccccggctatccactagcccagagcagttctccctatagcccagtaagaaattacaccttcaccttccagactggcacccaggctctcccagaaagtgagaagggaactcacaggtgacttcaccccatggtggggagaacagcctgtgctggggccaaggcagaaggaggatgagccccgaggctcctggagagtctgagccgggtgaggaaggggaggaggtggtccctgatctcagggcagggaggagacagtgaggagctggagccatagcacgcggctctcagctgggggatcctggtcccctcaccatctcctctcccccagtctagggacaggaagatggttggcgacgtgaccggggcccaggcctatgcctccaccgccaagtgcctgaacatctgggccctgattttgggcatcttcatgaccattctgctcatcatcatcccagtgttggtcgtccaggcccagcgatagatcaggaggcatcattgaggccaggagctctgcccgtgacctgtatcccacgtactctatcttccattcctcgccctgcc

SEQ ID NO: 5237 - DNA, 6000 bp, Homo sapiens; identical to SEQ ID NO: 1609

SEQ ID NO: 5238 - DNA, 6000 bp, Homo sapiens
tgctcctatcacaaacatgtataaaatgtttatgtaaacgtagctaaggggcattaaaatatgggaagagtagactgatatttgatacttacatttgcttaacaatgtgaactaaggatggggtattatgcttttcttcattatgtttgttttcaaatattctaacacaaacacatcacactttaataaacttattaaatttgctttatttttccacattcaagtctattattataaactttatttcccccagactcagcttgactcttggcttccgggtttgagtgcagctcctgaagaggcaagagtttggcctggacgtcctggcaggtggccctgccctgccttggcagagaactttggtcgaggttccccgtgggcctcctgctcttcctctgtggaccctggaccctgttcctctgcctttcctcctcccacttcagaagaccccgtccaccagaccgcctccccctgaggcccaacatgcagcagaggcagctcctccgtccctgcagcctccttttaactgtgggatatggcagccacccgtggagcggtccgggtgacaaagccagcgagagctagggagcgcccaggtgaaatcccacaggcaggtgtgagcaccaattgtcattacctttgccctgggcccctcagagacctgtcctccccccccgcccccaacagcctcctgggcgcggccacagacacagacacagtgtctggacgagcagactcgtccaggcactgctcagaggcagcccctctgggtcagctggagtcggtgcctctgagaacctgcccctgtactctctctgggctggtctcaggcaccctgctggctccagcctctcttggctgacagtgcttggcaggcgacccccagcctgaagcccctgcaggggagaccctctcccagctgggcctctgcccttgaggaccacctgaagccatccttgcctgccacaccagggtggcattggggtggggacccaaacccctcccgtcctcattgcagggacaactctgtctccttgctgcctccccaacacctccaggccttaaccatcttgacttggggagcagtcctgctgtccacgctccctccaacaagccagagaaaactcccgggcacaggtgtgcgtgtggcacggtgagtttttctgtaatccactcacctttatggatttaccgcaccaggggaaatattacaacaggcatttgttactttacaaattcctaggcttcctctcccttccttgcaagggcatttttagaaagcatttcgccaacattcactatttaccaccataaatgtgactctggccagctctgtccctgggtaaggccagaattgaccattttcttaaaagttccagcgccctgaggcttctggcaggcatctctgcagctgaggaaggcttctgtcccgtgcacccttccccaggcgggggacccccagttctgctgctctggggcctcaaagaaccaagtcctccaagctgctccactgcctcctcaccagccacggtgctccctgagccacaaacctccggcctcacccctgcccctcaggcccacgtcttgcaatggactctgccagtccacacatgcctgggtggggaggggtgtgcacttctgcagctggggtgaagacagggacagggtaatgtgagactcagatatgagacgccaggtgcaaaactgcaggtggagagctccctgtagagtgcaggggttcagggtagaggctctggggtctggaaagagctgggcgtagctgtcaccaacctttctctgcctcagttttttttttgtttgtttctttttttttttttttttttttttttgagacggagtcttgctctgtcacccaggctggagtgcagtggcgtgatctcagctcactgcaagctctgcctcccaggttcacaccattctcctgccttagcctcccgagcagctgggactacaggcgcccgccaccacgcccgggtaattttttgtatttttagtagagatgggctttcaccgtgttagccaggatggtctcgatctcctgaccttgtgatccacccgcctcggcctcccaatgtgctgggattacaggcttgagccaccgcgcccggccttctctgccacagtttttttgtctctaagcgacagtcaaaaatagaacctaagggggtgtgttaagatcacaatagttggcccggcgcggtggctcacgcctgtaatcccagcattttgggaggccaaggtgggtggatcacctgaggtcaggagttcgagaccagcctggccaacttggtgaaaccccgtctctactaaaaatacaaaaattagccgggcgtgatggcgggcgcctttaatcccagctactccggaggctgaggcaggagaatcgcttgaacccgagaggcggaggttgcagtgagccgagatcacgccactgcactccaggcctgggtgacagagtgagactacgcttaaaaaaaaaaaaatcacaatagttagcatttacaaagcgttgggaattctacttggcacgtggccagagctccgtagtgatgggcaacgaacacgtggtctgcgcgcccggggccgcgcggtctggcggggccgcgcggtctagatcacgctactccgggtcccaaggccccgccctcaggccccgcccacagaccatgtcctcggccccgcccctcacgcgcccttgggccccgcccccgagccgacaggaacgagcgtcattgcgaggcggcctcgcgcgcagcttccttggggccagggaccccagtggggccggtacatctccccgccccggcctctgcaccctggagggacggcaggagggctctctgtgcagtttgagagaacacccatacgcaggaaatgaccccaacgccaccgagagggcgcctggaatgtgagcgccacctgctgggatgggaagaggtctgggaggggacctgaaggatggttcacagggaaccaggcctgtcgggtgattgctggaaagatggcatggacgggagctggctgctctggccactcagccgaccccagctggacgcggccagggcctggggcagggggccaggcctggggaggcccaacagcacgccccctggagccagcgcctcccgcactgcccagcctgtgtgtcaggagctggggtgaaggtcccatcacagtcaggccccatccctgctgggcgtggctgtgcaggagccccgcaaatatgtttatatatttagtatgtgagttatatttcaataaagctgatatgagatatacttcacatatcatgcagttcacccattcaactcgtttcgagtggacagttgagtggtttttaggacattcacagataggagctgaggtcaatattacagcactttcatcgccccgaaagaaacctgctaccctttgtagtcgctccttattaccccttccccagcccccggtgaaaactcatctaatttctgtcttcatagatttgcatttcctggacatttcatacaaatggatcacataatgcgtagtctcctgtgactggcttctttcacctagcatttttttttttttttttgagacggagtctcgctctgtcgcccaggatggagtgcagtggcacaatctcggctcactgcaacctccacctcccggatttaagggattctcccacctcagcctcccgagtagctaggattacaagcgcccgccacaatgccagggcaatttttgtatttttagtaaagatggggtgtcaccactttgcctaggctggtctcgaactcctgacctcaagtcatccgcccgccttggcctcccaaagtgctgggatgacaggcgtgcgccgccgcgcccggcctgcctagcataatgttttcaaggtccagctgtgctgtagcatgcgcatgcttcgctcctctatggctaataacatgccgctattatcaaaatgctgcaactaggagcgctagtgtgtaaatttggcgtggacacttgtttccaggtttgaggagctgccacattgcttttcagagtggctcaggagctaatttttttgcagggtaccatgtcaacaatttgggtcaactaaaatcagcgtgtccgcaccattttcgcccgcccaatttcacgcgatcctgcgaaagaatgacccagaccggtccgggcgcggtggctcgcgcctgtaatcccagcactttgggaggccgaggcggcagatcacaaggtcaggagttcgagattggcctggccaacatagtgaaaccccgtctctactaaaaatacaaaaattagccgggcgtgatggcggccgcctgtaatcccagctactcgggaagcttgagacagaagaatcgtttgaatccgagaggcggaggttgcagtgagccgggatcgcgccattgcactccagctcgggcggcagtgcgagactccgtctcaaaaaggaatgacccgggtcgcatggggtgaagggtcgggaagcgccccaaaaggagaacggggctgggctccgggatccgtcggcgaggaaggggcgaaggggtggagggactcgggccaggccgccggggatgtctgtggttacctccaagctctggaggccttggcgagacccgcgccatccgcagcttggttcctgcgacctcagccgcagggcggtccggctccggtttcccagcaaccaggcgtcatccttcccagcaagcactgcgtccaacccgcgacgtcggaccacaaggcccagcatgccccgcgcggactacaagccccacaatgcaccgcacaccctttactggccggccccgcgctgctctcctaagaccccgcgggccagcgccgcgaccccttcccagcgctcctcgcgctgtgtgcggcgcgtcctctcgccggtgacccggtgtgcgtggggtcgaggcgccgggcggagtggctccgggccgaaacgccatgcggaggggcgagcgcagggacgccggaggtccgcggcccgagtccccggtgcccgcgggcagggcctcgctggaggagccgcctgacgggccgtctgccggccaagccaccgggccgggcgagggccgccgcagcaccgagtccgaggtctacgacgacggcaccaacaccttcttctggtgagggcagtgggcggccgcggggcggcgagggtgccctcgacctgggggttccggcaccgctggcctgggggtccccggcagcgccctctcgccgtcttggagtccaggactgtggccgggggtttgagggtgtggcagcaccgccccccgggtcccggggagcggccggaccgagctcccgacgccgggtcgggcggagggcggcgctgtaggtgggggagaccctgggcagaccctccctgcggccgctttgcgtctctctcgccgccctccccacccctgcccgccttggctctgaccgcgcggttctgcgatccagaccccttccccgccacccgcctccagcgtcaccccagaaacgctttctctgtcctgctgtcgaagcttcacctgtgtcccccgtcattctgcctgtggttgctcctcagtgcttgcggctgcacgaaatcatcttgtgtgtcgcgcccgaccccacgtggcgatcgtgttgattagcagagtgttgtgcgtgcttcaggaatgtagtcggtgttcgtcgaatccaggctctgtttctctcctcagttgcccctagcggggccagcgcctcctccctgcacaactcagccctagctacaccttggggtccccctgtccgccactctgcctttaatgggggtggaaaaggaagaggcccccgggagcagctggagtgtggcactctgtgtccagacaggctccaggtgccgctcctactcccgacagctgcgaccctgggctggccctttgccgatgctcctctgtgagaaggatcaagccgtcgacctgaaagcaggcttcgtgagaggagggtttggctcttcttgactgc

SEQ ID NO: 5239 - DNA, 6000 bp, Homo sapiens
gtgggctcagttgtggggagggaggggccggtgggcaggagggagaagtctgccctgcctgccagctgtcatgaggctgggccacacaggcccaggccaggggctaaggacttggtcaggactggctgagccctcacttgggatcagatctccagttgcagagtgtgaggggctcctccctcactgaccccaagcctgctcctctcagctttcaggaccccaccttccttatcaccaggtcttctccactggcccctgagattgccatcacctccagctcctcctctcctgaagttggcagcccctcctgggttccagcctcctgagatgccagacccactggggcagtacccacaggccctgagcctacatcaaccaccccagtgacaccccaagcctgcagcattttccacccccagccccctggtcccaccttgccttccgcccaccttcccacctgctgcagggagggccctcggctgagccttcagacacacttgcaccccatccgctcccctcctgaatttcttctgaccctcccttggcttcacagcacctgaaggccaggctgaggccccctgctctcatggccagccctggaaagcctggggctgatgaggcccaggaggaggagggggaactcgaggggggctctgcagggccgcgggctgcaatactggagcaggctgaggagctgtttctgctgtgtgacaaggaggctaagggcttcatcaccaagcacgacctgcaggtgagtcccccaccccaagagactgcttcggccctgggttgaccgcagcggctcatctctgctctccttccccgaccagggtctccagagcgacctgcccctcacgccagagcagctggaggctgtgtttgaaagtctggaccgggctcacactggcttcctcaccgccagggagttctgcctgggcctgggtgagcctgtggcctgcctatcccccactgcccagagctggaggcctgatcaggaggcctggcacttgtggcgccctgagggctgccggtgcctctcgtcctcctccctccagggcccgtgctttgtctgcacgcactcgcgcctgggggctcctagctgcggtggagtgtgtggagctgaccttcctggcccccagctcctctcctgtgctaagctccggtagggctgggagctggcctgtcacctcttgtttccaggccaataggaccagaataaggaaggaaaacaggaaactgggccctgagagagggcaggatactcgttgggagggtgaacggggacacagccacggtggcgacccacagccctggtaatcgctcgctccatgcccgcagggatgtttgtgggggtggcgtcagcccagggagcgaacccctgcaggactcccgaggagacctttgagtcgggcgggctcgacgtgcagggcacggcgggctctctggatgaggaggaggaagaggaggagcgattccacactgtgctggagcagctgggggtggccccggtcctgggcaagtgagtcggcgctggccccgctcccactgcccgctctgctgtttctctgcctgcatgctgtctgcccttgtcacccgagtgctggttctgcacagggtctctaggccgggtcaggcccagcctagcgtcagctgcgattccctgggagggacccggcatgatttcccgcagaatttgcatttcatgaggcagcagccagggctgcagggaggaggggcagcgccgggcgcggggccacataccggcactgcccagggtacacacacctcaccgaccacgcacgccgggcaggggcgaaagcgctcacgggagggatgccctgcacgcagcaagtgctcctgtcctgcccaggggcgaagaagtctcctaagggtttgctgctggcggagggaagcctgcttcccgcttctgccagctccagcctcagttcccgcccgccctccaggcagcgggctgtgaggacgctctgggccaggctgcagcgcgagcgccccgagctgctgggctctttcgaggatgttctgatacgcgcgtcggcctgcctggaggaggcggcccgggagcgcgacggcctggagcaggcgctgcggaggtgagggccggggtggggtatgggggccaatggagggcctcagggcagcagcagaggcggtgccagggggctgtagcgctggcaagttctcatccggggtcgcccggtcccccgaaggcgcgagagcgagcacgagagggaggtgcgcgctctgtacgaggagacggagcagcttcgggagcagagccggcgcccgccgagtcaggtgggcctcgggccccgcccctcccgccaggcccaatcccacctcgctggcctccctggctccgccttctctgaattaatccctccccgacggccccacctccgcgggtccaggctgccctcagcccgaggagatcccactgggcctcacgtatcacccccgtccggtcttctccacccgaccccgctccgcccgggcccactcccagcccctggccctccgtgtacctcttttgcatggccgagcggccggcggaggctcagtggtcctccgtgcgtcccagaacttcgcccgcggggagcggagaagccgtctggagctggagctgcagagccgcgagcaggacctggaacgcgcgggcctgcggcagcgggaggtgagcacccggcccctgccctgtccccacggtcacccgtgcactctccccctgtgccttagcgtccccgggttgtcgggagcctggggcacgcgcagcaccccggggaagagggggcgttcctcgccggtctccatccttccaccctccagttagagcagcagctgcacgcccaggctgcggagcacctggaggcacaggcccagaactcccagctgtggcgggcgcacgaggcgctgcgaacgcagctggagggggcgcaggagcagatccgcaggctggagagcgaagcacgaggccgccaggagcaaacccaacggtgccgtgggacggggctgggcgggccccggtgcgtgtcccgggggcggggccgacgggcgctcaggtctgggccactttcatccccatctcaagtcccaggcccgccccgtgggaaggaggatcttctagggggtccgggggctccccaaggagccttcctgcagccgggtcaccacctcccatccacagagacgtggtcgccgtctccaggaacatgcagaaagagaaagtcagcctgctacggcaactggagctgctcaggtacggtcaggctcaggcccgagagggaatgggctcagcggagcttgggggctcccagctccccaacattcttggctgccgctctactccattggaagtccttccttatgcctgcctttcacccctcacgctgcagcctcagccagacacctctcttcgctctgaggggagtcggagctcacctccccccaccttgagctccctcagaccctctcagtgtcggactcctccttccctagggagctgaatacacggctgcgggatgacagggacgcctgcgaggccaggcgggcgggcagcagctgcaggaaggctctgacaacagcccgcctgcctgggcccacctgctgctgctgctgttgctgggctcggccccccagacgcggctctggccaccttcccagtgcccggtgaccagccccgagtgactcacggaccatgagctagaagctgcccttgcaggaggcttgtcatgggtcgggggtgcccactcaggatgcaggctctccccagtgggccccaggctcgcctgactgaagacatgaaggacctagcctaggagtggtcagggtcccgggagtggccagggtcccgtgtgtgccctctgccagtcttcgctctgtccccgttcaatcaaccccatctcagttcagcagaaaaccccctcgtcaaataaaacccactgactgcactgcgtcctcctgggccttccgtgtgtctgggagccacagcctgtgtgtgccacatggatgaggtgggcacctgtgcacgcgtgctgtgtgggtgaatacagggagcgcgggcctgtggcgatggggctgaggtcctgcgtgtcctcttgtgtccctggtcatgccccaaactcacactacccatcaaggctggagcccctcggggccctcgccagtgtgtggatcagggctccccactgtctcgccagggaggccgggcaggttcccggcctcagtcggccaccccctcccatgctggtcctcccctgtggctgtgatgaatgagcttggtgggtgggcagccccctccttcctcactcccactcttggcgtcttggtgcagccctaggccggccctgcccttcgtccctcacctcctcgcaccgctcccagtggtcccttccagtctggagggcatgggccccccaggaccccatgggtatgtctcgctgggaccccaggcctgcccgggtctccaggctgtccacactgcacgtacagtagcccttctcccgcatttgcccacagcgctaggccctcccacgccccaggccggcatcggttctgccgacccctgcagcctctgggcggttcctgggtgaggagaaagagatgggggttgggcatggaggagggccgggtcgccacagcccagggcctctggctaggctggtcgccgtcttacctccgggcccgcctcccgcccagctcctccgtccttggacgggatgggcccttgctgggctattggcgcccccagggctgcagctcgcccggcctccgcagtgccaggtcgacccccagcgcctacacccacgcgggttcagacctgccgagcgcccgccgccgcgggaggggcttgaggccggggcggggccggggcggggcggggcggggcgtccccctcgtaggctccgggccgcgcattctcagcgctgggagccgccgcccccgcagctgctgccgccgccgccagggcccggactcggacgcgtggtaggtgagtgcgcggccacgacagctcggccgagcggggcgagcggggcgaggggggcgaggggcgcgaggggggcgaggggcgcgagggggccgaaggccctgcgcgccccagccccggaggcccagccgcaggcgccgggaggttccgggaggccgcacccaccgcctggcccagctccctcgcctgccccagctccctcgcctgcccttccgcgggaggcggactccgggcgggttggggaggcgcagcgggaaggagaggcgcctcccgggcccttggaccggcctgacggcccccttcagcccaggggtcccgggacgcgcagcctggacaccctgctcattgtccctggacacggcagtcttccctccgcccgcagcagcccccgcccgcgtgcaagtgggcgcgccattggccgcgccgggcggggtcggcggcggcggtgacctcattgcagtgccccggggacgcttggcaggcgcggagtcccaggtccccctgactggggctccccctgatagggcgcgggccgcccaggggcctggtgcaggtcccggggacttggggaggaacagacaactatttctggaaggccctttcccagggggtccagagggaccaggcattcctgggaagaggggccactcctcagcgggtcgcctgtgtcctcgcggtggaggacgcatctgtgcccagaaccaacttctccagaaagcctgggaccttacagccaggccaggggcaggtccttgaggggctcacacatccccccatcggtggcagacgcacaccccgccccccggtggcagacacatccccccgctggtggcagggtctgcctgtgccacccttcctgcgtgtatttaggccctggctccttcatggagggtgaatatcccctctcagctcagtggtaaggtctgtccccctccagctccattccatgatgcctctttcccaggctgtagctgccgctgtttgtgggggaagggcca

SEQ ID NO: 5240 - DNA, 6000 bp, Homo sapiens
gtggggatcggcattgcctgtgtgcaggtgagggcacatgggggtggcggtcatcttgttggggacacggggcagggcggtggctggtggccccatgacgtctgcttacgcccacccggctctgcacacaggtctttggcatgatcttcacgtgctgcctgtacaggagtctcaagctggagcactactgaccctgccttgggccttgctgctgctgcacccaactactgagctgagaccactgagtaccaggggctgggctccctgatgacacccaccctgtgccatcaccataacctctggggaccccaacctcagaggcagcttcaagtgccttttgctgcgcaccaatgcccagcaggggaggtgaggggggctggcggggcgaagtttggggggtgttttgtggggctccccagacacactctctgcctggtggtcagatgcaggttggaaggggccttgctgagtggcgcaaggccgagcgttcccagcagggggagaaacccttcacaccccaggcccttcaggaactggggccttgccttgcagccacatggccccatcccagttggggaagccaggtgagctctgacccttgggcctgggcctctgcccctcccaacccagccctcgtctccctcgacagcgcccctgctgtcttccccaccgcagtcaccaccacccgaaatgccacgtggtcactgtgcactgccctgttcatgtgcctctgcggggcagggccttcctggttttgttcactgctgtacccagatgcctacaaccatccctgccacatacaggtgctcaataaacacttgtagagcagatggacgagctcgctgtgctggtaacagatggtggtctgttctcagggccctcgcatccagcagggcagacagacccacccccgccccgcccagtgtcaggacaaagaagggcagagccaggaggacacaccccccatggggctccagggaagggaggtctgatgccagggacagctgagcacaggcctcagcagaaagaactgaacatgttcctaaatggtgagatggtgtgttcagagcccctgggggagaggaaaaatggtttccaaaacccttctggccatggtggggagcagacgtgggaagggtgcagactgggggccgtgcccaggtaagaggtgtcaggcaggtggggtgggggcagtagggtgagggggtttacatggaggagcctataggccctgctgggggccagagggtaggaggtaccagagcctggtgtctggcagaggtaccctggagatgggagccagggctcggtcactgattgtgccccccactgcccaggttcctgtccttaaggctcagaactgtagaccctcaggcagacccgttctcccctaccagaggacaccacgccagatatctgggcagcagggacatctgacctggggtgcttgctggcagcactgcctggacagcagggcctccttagggccacctcccaacccagctaggagcgtcttaaggcctgccctccctgctgggcttgggtgggacgctcagggacaggcagcagtgggcagaggccagcaggtactggcagccctgaccacagcagagactgggccccagaaaatctgtttctctcttctttttcatagttgtgttgagacagagtcttactctgttgcccaggctggagtgcagtggtgcaaacacagttcactgcagtggcaacctcccaggttccagtgatcctcctgcctcagccccgagtggccgggactacaggtgtgaacactgtgcccagctaatttattaaattttgttgtagagatggggtctcattatgatgcccaggcgggtcttgaatttctggactcaagtgatcctcctgccttggcctcccaaagtcctgggattataggggtgagcccctttgcccggcctaaatctggctcttcagattccgagagagagggtacaggagcctctctgctcagcctgaagaacacccagaaggagggaacctcaaagagccccgagatggaaggctctcctggcagcgcctcctgcaggggtgcctgtggaacaggctggccccagggctaggagagttcatggcccagtctgcttcactgggctgccacagtgtgaaagctgggcctagacctggctcctgacatcctagtgagggctgggaccttagtggttctgaaagacctttactggatggttccttccagagtggggtatcggatacacacacactgcggccaggcattacgccagctcccggatgcctcagcctcgtgaattcggggcaggacgctcagggcccatggtcagcacagcgggtgggtgggttccagcgtggtcacttctccaggggtgcataattgagcagcttctcgatcaggtccacgtgggccagcagcatccggcggcagcagtagcgcttcaggcccagggcatccagcgcatccctgtgtcgaggggaggagcagaggccaactgagttctctacggtctgcaaaggcctggagcccacatccaacctgcctctcactgcctgctggcctcaccccccccgccaccggcaaggcgaacagattcacccggctcagaagctgagatctagcagtatgatcctggctggagtaacctggaaatgcccagaaccctgggtggagcgtgaggagcctcctctcccacctactctggctgtacgtgtgtgtgtataacgtatgtaagaaatgtaaatgaaatgaaaacgaagtaattgcggggagcttagaaaaccaagaccaccaaggtgctgatgtgcagccacctcatccagcactggccacggcagggtagctctccaggggcctgcccttagctggttcacccccaccccagccagagcaagccctgctctgccgctgtggggtctttcctcacctctgcttccttccatcagagagagactgcttctccacggagccacctctcccacttcccaagccaattagaagctttcatttccctgggacctagctccagtcaccctcaagacctccagaaaactcccacaccgatggctccaatgtgcagagacacagaagcttgggaaaggggaggccacatgggaggcccctgccgttcctatccggggaaagggtctggacaggccgccagccactcagtctagcagcccactcgctttcctcgtttgtccagcaagctgcaccaagtgccgatggcaggctggcgcacacaagcccagggcttcacatgtgacgaagactcagtgggcgagggtcagactccagcgggggcaccaagactcaggcaccgtggtgacagcagcaccaagggacaagcacaggagaaagacgcctcccctacaaagcctgatgagggtggtcagcaagtctaccctgcatttctttttctgtgtgtgtgtgtgcgtgagacggagtttcactctctcttccaggctggagtgcagtggcgtgatcttggctcactgcaacctccacctgcctcccagactcaagcgattttctcgtctcagcctcccaagtagctgggaccacaggtgtgcaccgccatgtccggcgaattaaaaagatagagccaggcgcggtggctcacgcctgtaacctcagcactttgggaggtcgaggcgggtggatcacctgaggtcaggagttccagaccagcctggccaacatggcgaaatcccatctctactgaaaatacaaaaattagccgggcgtggtggcacacgcctgtagtcccagctactcgggaggctgagacaggagaattgctggagcccaggaggcgggggttgcagtgagccgagatcgcgccactgcactccaacctgggcgacggagcgagactccgtctcaaaaaagaaaaataaaataaaataaatttctggagatcagggtctccccaggttgtccaggctggtctcgacctcctgggctcaagcaagcctctcgcctcggcctcccaaactgctgggattacagatgtcagccgccgcgcccgcccgtcctgcagcgaggtttgcaggacatggggtgggcctgggggcagagatgggaatagggcggaggccaagggctttactgcgggtgacaagacgcctgcgacccgccaggccacctagaatccccaggacaccactggtttgaagcccaactccgttctcttccccagacttcaggggataaggttctcccgaaagcagatcacagagcggggctggagaagccgggcctgaagctgctcatggggcgctggcctcaggcagcgctgcgcctcccgccccggcgcgcaccccagggcggactcagcccccagccccggcccgcgccccacggcggactcagcccctagccccggcccgcgcctcacccctcggtgtactcggcctgcagcagccccaggtaagcctcccacttgttgccgacgatcttgccacaagtgaagcagcgtacagggatgatcatggcggcggcgcgtcccagactgcccggcccggcccggccgcacgcgaagaacccccccaggccccgccccgggcgcgtccactgttgcgggagaatcggctccgctcgttctccgctgttccggccgtccctccaccggccccgccaccgctggccgcagtttccgccgcgataggggcttcccgtgcgtcccggggctcctgggcctgtgcgtcccggggctcccgggcccgcgcggccgcggcagcagcagaccgcacacccccgcccaccgtcttggtgcatcccggcgctacggcgtctgagcagggccgtaaagctgcggcggcggttcgcgtttctcgtgtccgcttgactgacagctgcgcggcgggagcgggcggcgcgagcgggaggcggcggcgcaggtactgcgcctgggggttgtgggggcgtgcggccagggtcccgtggccggaggtgtccgaccgggagcggctggagccggacgcgagcggggcgcgcgagttcgagcccagagccgacacgcagcaacaagtggggtccggcgcgggggctcggggagagggcgggcgggggccggggcgggtcttcctgccgcccctcctggccgcgccgagtagtgggttcctccgcctcggcctctgcccgcggggtgtccggggctctcggcgctgagttcgggggtcccattctggacgcggcccagcccctaggggcgccgccctggcctcagctgcgcaattacagcccccgccggcagctccccgccccgggctcctgtccgcgttctttccgctctttcccgggaatggggtcggggtgcgccctcccgggtcccggctctgctggctgctcgccgtcccgagctcccgacgctcagacgcgcctctgagcacggggagaggggacccgggagggaggtcggggagggagtcgtggaagaggtgctttttgagctgaacctggaagaccccggcacaggggatccctgggcagactcccggaggctgcactggcaggaccccctgaaggcctcagctctggcttgccctggagctcagggcctacggacgacgagggacgaggagcccgtgtctctcggatggagtgcgggggggctggcaccagcacccttcttgctgtgcccctggggtgggggtgaggaaatggggggtcggtgtgcagtgagaggcaaagaaggctccttggaggtgcgaggtgggctgtgggggtgggtgggccgcaaagcggcacccatggggggctctgggctggtttgccggcctggggcttctggctggggtgggacctgtgttgggttccaggcatcagctgccgctttctcagggcaatgctgcgtctgccttagttgcagaggaggaggacgaagggttttctgggtccggagtggtgctagccagatccactgcacgcttggggtttccgctcccaccctggccagggccctgggcagcttccccagtggcatt

SEQ ID NO: 5241 - DNA, 6000 bp, Homo sapiens
aatgcggggaggaccgggagaacccccgtcctctgacatggtggctgcagtaccagccatttgaggagtgggttacatgcccccagacttccaggtgacgggggtggccacccagacacttcaagacatggggttttcatcaccaaaatccagatgcagattctcagaggataggaactgagcccatggaatcagcaccagccatgttcagagggtgcagacccccatgcccaagacggagcagagcctcccagaggctcggtgatggggtgcagcctccacggaggctcgatgatggggtgcagcctctctggaggctcaggtcatggggtacagcctccccggaggctcaggtcatgggatgcagcctcccagaggctcggtgatggggtgcagcctccccagaggctcaggtcatggggtgcagcctcctcccagaggctcggtgatggggtgcagcctccccagaggctcaggtcatggggtgcagcctccccagatgcctggttgatggggtacagcctcccgggatgaagaggcacagacagtatgcatgaaaggtgagtgtggcacacacaagctaagacacagagaatgggcatagggcatcccaaagcacagagaactgtggcaagctgagttcccccatccccggccatcccgggccccagctgatgagggtgccccagccctgcagggctcagcagctggggtcagagtgggtggggcaaacacgcgctcacccagcacacttttctttgtgtgccagtgactcctggctccccagagccagcgcttgctttgcagtccaacctcaagcattccccaggcgacctcagaggaagcgtccccatccaggagccccaccagggtctccatgaggctgctggctgccaagccaccgtctcggggcctcgggactggcctcgggctccagctctgtttggttttctccttcctgccctggaacctcagacgccagtctggctgtgaaggcgcccatatactggggaaagtacaaagcccctacacagctggctgcagagaaccgcgcgcagggcacgtagctcagctgtaccctggggccagcgtcgagccaccccctgcatgtgtccccttgcttgcctaaaagccccactagggcagcctctggcccttctcatcccagattgagtcagactaggagacagacccataccctgtgcaaacaccagaaggacgtacaagtccccacacgcccagggccgcgtgtgaccggacgggcccagacgtgcacatgcatgcccacacgtcctcctgctgtggcccgaaagcatcctcggagcctgggctatgtcctccacacttgctgcctgaccagccccgtggggccggccccgctgggacaggttttcccgttaagcattaaccaccagcagataagggctctgagggaacgccctgacctgggatggctgctcctcggtaggcccaagtcatggatctgactagagtgaccagaccagactaactggcagagcagagggagaggagcttaggctataggctctgctcgggggtccaactgaagcaagaggcactgaggttagaccagagtgaggacttccagccactcacccgggggccagctgataagaggatcactcattaggaaaccaagaactcaagggattgggtcagcccagcaggagacaaaggcacagaggggaatggcccgaaggtgcctggggctggaagcagaggcagtggcggagccaagccggcccacctggctctctgtgagccccctgccccacactgcccagggcagcccccgcccggcccctaccctcctcacacttggttccccccagcccacagcacctgaggatgccctcttccaagccaggcagccctgcacctcaggacccctccccgtcgtgcagaacctgctcaaaccaggttcagccaggccacctcctgctgcccctcaccaaggccagcctgacgggcccatcgccccctcctgcaaagctaggtagggctcagggtgcccccagccccaagggacccttggaaataggctggagcccagatgctcagcctctgcgtcttggggagaccttcctcccaaagggagttgcccagctatcacgggccagcagttccggccacaaggtggggttcctgcagccctggcccccgcaccccctcctaccccaggagagagttccccgtcaccagaggcagtgctgtccgagagctggacccgccttcgggtgtctgagaggaaggcctggtggctggccggccacaggaagtggtgggcgtcaggtgagagcatttacacctggggggctgccagccccagcactcggggaaacgttgcttttccagaggaagggctcacggaaaggtgttcccacggaagcagaaaccattccgtatagactcaccctggagggaagcattagcaagcctgaaatggtgcccgccttgggctaacatgaagtctaaaggaggggctcacccccgttctgcctggtgggggctgggggccctaacggggtggaattcagcacaaaacgtcatggcaggtctgggggtcctggggtgaccagggagggttccctggaagaggtgggctcacgctggccttggagggtgagtcggatggggatgcggagaggccttctaagcagcttggcagctgcaggagcagagcagccgccttcgtggggagagaggagccggtttccagagccttaaggagcccgctggagcggtggccaggggggagccggggaggagggaccgtctccctttcctgggaaaacatggcgtgaactcccagagaaggttttcccagcagggccacaggagacagacagccaaagctagacaacggggagagcagccccgggaggctcaggcagggagggcgggggattcccagatctgggaggggagacccgagagcccccagcgcccaagggtctccagggcactgtccccgggagccatgagggaggccgggtcccgaggggcggacggcgccacctggtggccatgcgcccgctgcacctgcacctccctggggtcccggcggtccggagggaccccgcacctccccaggctttgggacccccagcatcggcagccagcgcccccagggtcctggggttctccggagcagcttctgggtggcccctgtgctcctctggggacaaggtcaccaggctggcccgggagtgccgctggccggccgcggcaaatcactgcaggggagctctccccgcccggccctgactgttcttagactaaaggaggggggacgccagcaaagcgggggcacaggggaggggcgcacgcacacgcacacgcacacatgcccgcactcacagatggagattctgtattggcaacttatccggaatctcaaccataaaaatctggagtgaagctactttaatctcagcatgtatacaggctctgacatttcaaaaagagaagttgccttgaaactccacgtagggaggaggcagtggcctgtttgaatctggccggcacagtcccgctccagggaccctgcggacccagcccattccatcagccaccaccagtaggagcgctccgccagccacgtgtgggacgccggacccacctgggagtgtcccccaggagctgaggggctgccgaggcccgtgagcttcactgcacacccacactgcatctgcaggggactcacccaaagggtcccccgaactcgacaagctccgtcatttgtgaggcccagtgcagaatgaaaatgtgcagcatcttgttccaaaattaagaatttcaagatggccccagcacgcattaaaccaagcagggacccctctgagcatggggccctgcgcacagggtgcagcctggaaagctggccctgacctccgcatctcctttttgtacctataatccctccattgtgctggcccctgtgttctggggacaggctgggcttcccaggccatgctggcctccagagccacaaaactagagctcccagcctcggtccactcgtctgtaaaacacctggcctgctgacctcacagggtcaacatgcgtgtggggctggaacctggaccctccctcccctccttgagctgcagccccctcatctgaacactgggggtttgggtccgttctgggagtgcagctgcctctcccagcctgccagggagtggggcattgatgctgtgtgcgcgtgcgtgtgtgtgtgtgtgtgtgtgtgtgtgtgtgtgtgtgtgtgtgtgtgtctggagtcatggcagggtccctttctgtctgtctccttgctctgccccagactggggggctgcagaggtgagggtatctggcctcaacagctgcttattcccgatgggatggcctgggctgggcccctgaggccaggctgacttggacatggcaagaggggtcccaggctcttgtgggcaaagcaggggaggcgccaatgtggaggaacagagtctcctggctggctgctgctctctggagcgggtggagtcagggaagagctgagctggggagtcaccctgggcctggggtcaccgtaggccccatgtagcaccctggttcccctgcctgtaggtgacaggagccagcccagccaggtgtgctccctccccaggccctaggcaggcgggtacaggggccagcagctgcgcccgccccaccttccttcccacccacatgccgaagggtggccaggcaggcaggtggacgagtccaggcagcggctgagtcagtgtgtgtggaatgttctggccgctcccagctgcaccctgcccctacctgccaccacctcaccttcatcctcaggcgctgcggccctgagcccctgccaggaatgcacctttagcccaggcctgctcagtgagctccgccgacagccagccctgctcctcccgccatgaccctgcagacccctctgggcttccaagttcctgggggctgcagtgaacatgctccacctgcatggctggcaaaccatggtgggccccagctgtggtgcgtgctggggtagaggcaaggaagtgatgggaccgcagagatgagacccccagggatgagatgggacccccaggcagggcccagggtccagggcccaggagagagaagcagggagggagagagcttcctggtggaggacgcatcctacagtgggggcaagggtgctctgaggtccggtgaaggcagggactaggctgcccaggccctgcctgcttggctggggctgggggctgctgggaggtggctgggaggctgggcctgggcagctaagctggagctttggccagggtccagagcctccctcccttcagcttcctgctgcacagaaccctcgcccctggccaccccgtgctgcctccttgccctggcagacccagcactggctgctgctagtcagatggggtagcgggcaggggccggaggggccaccctcccagctgacccagcctcctgggccgcttcttccaaaccagcagggtagaaagatggggcacccaccagtctctcccagtgccccggccccagctggcaccacagctatacctgggcttattccagaccttgtcgccgggaccccctgtgagttgtgggattcccaagaggggtgtggggataacccagccaagtgggggctgcagctgtccacagatgcactcagcctggcctctaccccagggccccgctgggctctcattgccggcgcccttgccgcgggcgtcctcctcgtctcctgcctcctctgtgctgcctgctgctgctgccgccgccacaggaagaagcccagggacaaggagtccgtgggtctgggcagtgcccgcggcaccaccaccacccacctggtgaggagcggctccttgctcactcagtccagagagggcttgaaatccaggctccagagcccagggcagcgaggcgagttcagccccagggatggtttaacccccacagaggcagggcgttgag

SEQ ID NO: 5242 - DNA, 6000 bp, Homo sapiens
cctgagtaggacacacagctcccgagacccctcactggggacacaggggggccctgcagccagggtgtcagtgtggggacagcccagcagaccccaagccacccactgaggttgcttctcaggggagcaccactggtgggctgtcagctcctgcctgggccccggcctcttgcccctgtcccacctcccacctgcacggcctccagcattgcccaaattcactgccttcactcccaagtccacagaggtgtctcatccaggcgggtgaacactcgtgtgttgggaggctggtgaagcctggcattggggggcaccacccatctcccttctttgtctcactgccttgaaacaccccacatctatcacctctgcccccgaggctccccaggttcaccccatgccagcctcagcccaacaaggcctgtgcttctgaccagcaccgctggggttctcagggcatctaccctttccgctgtagcccactgtctctaaacatatttcacacgttgctgggggcagtgtgtgtgactcactgcttcccagagccagcccagagctgtttagtagacatgaggtgagtgaatgaatgaatgaatgaatgagtgctgggagctgtctcagttagctccaatctgccataaggaagcactgcaggctgggcatgtaaacagcaggtgcttatttcttgcagttctggaggctggaagtccaatatcaaggtgctgctgattccagtcttggtgagggctctcttcctggcttacagatggctgccttctctctgtgtcttcatacagctgtccttcagtgcatgtaaggagagagagagagaagagggagctcctaaatgtctcttggtataagggcactaatcctatgggaccagggaccttcatgtcctcatctgtccctaattacctcccagagatccacttcctaacactatctcattgcggggcagggcttcaacctatgaattttgcaggaacacgattctgtccatagcgaacactgacactgaacccgcctcctaaagccttctctcaccatattcctcatgctgctcaaagatcctctgcaaccttgtgcccctcccaagggtccctgcacctgtcccagagagagggcagcctggcaatgggcctgggccctgacgcttgagcatcggggtctggcctgaaaggggatgggcgttcacttctaggttcctgagagaggcaacactgcacctttaaaggtgtcaggagctcactgccccagctggtcatgaaacagtctcttcatcaagggctaaataaagcacgctgaccaccaggaatggggcaggaagcttctgccctgcagcctgccttgtctgcacagggagtgtggggaccattagggggagggtccgatgtgcatttttctgccagcgggaccttcccctgcccccagtcctgcccaggcccggggggtcactctgaaggcatctggctcttaccccaggcatctcctgcctctgccccactcctccacccccacggggtgccgagtctcagcccaggctggggtggcccaggcaggacagcaggcttggtggtgcccggccccacatactagtgggtggcacagcgtggatgtggatagagacgcctcccctacagtctgtccctggtatctgtgacgcaggtgtggggtccctttagactcccctgggagacagctgtgtctatgaaggggcagccatccctgggtcccctctgccctcactgagggcagagcctaggctccttggggggggaagcagggtgcccctcagtgcccactggagttggccagcggaggcagcagcccacggcactgagagggaaggcccgggcagccatgccccagaaactcccttggttgggagcagagcagtgcccagagcccagaacccagtttgagtatggtcttggctctcaagggacaggccagggtgcctccaggggaagggggctgcccaggcagtaggggttcaaaggtcccctggggcccacccagctgacccaggcctagggtaatccagaaggggagctgccctcctcctccctgggctcaggagaggctgcaaaggcagctcctgggacgtggatttcagaatcagggcaaaggacagacatgagccagattcaggtgcccgcgtggcccccacaggtctcttcaagctccaggccccactcgctgtgacgcaggtgggaagctcttgagtgcctccccggtgggaggggccgcgctcacagacagcacaggggcccccaggctccagcctcagagcccggctgctcacctctgatggacagaaaagggtccctgtctcaggaaggtagaggctgccacctcctggcccgaggacacagctttccagaggaggggcctgcttctaagtccaagtcccatcccagccggatagccaggggcaactgcccaggtaaactgagacagcagcagcaggcaagccagtgcagagctgggtgatccacaggttcatgagcggtggcaggtggaacaagggcaccatgggcggagggttgggcagctgcaggtggcatcattgagccaggggcctcctggtgggtaaggacattgtagagtgagcgggcgcacctgggacccaggaattcacaggaaggagagaggaaaaaggaagtccctggcgggtaaacacatatgcatgcacacacatccacgtctgcacacgcatccacgcctgcacacgcatccatgcctgcacatgcatccacgcccaatctcttccctggaaataaagccaggggcccttaggccagcttgcagtggggcccagcccttaggacaggctccttggtggggtaggggtgggggcagctgtcctcctgggccagctccttggggctgaacccgctgctcgaggggtcttccaggctcccagcggccggcaccacctctagagcaggtgggcaggggtgtgtggggtgggcaggggtttgtgagggtgggcaggggtgtgtggggtgggcaggggtgtgtggggtgggcaggggcatgtggggtgggcaggggtgtgtgaggttgggcaggggcgtgtggggtgggcaggggtgtgtgagggtgggcaggggtgtgtggggtgggcaggggtgtgtaaggttgggtaggggtgtgtggggtgggcagggatgtgtggggtgggcagcggtgtgcggggtgggcaggggtgtgcggggtgggcaggagggtgtggggtgggcagcagcctgcacagtggcttcccctcaacaagccacttcctcttgcagagggaatgttggggtgggagggtgtggctcagcaaagggcgtgggggttccaccggctccctgcccccgctggtggggcacagtgaggggggctgtggtcagacctggtctctggagggccagccgggggttcccgtccacctgtcagggggttcgacgccactttgagatgacaagtgaggccacctgggcacagcgctggtgtgagaaggaggccatcaggacaggtcaagaacccaggcccgccctgctccgaaattcttcagacctgatgaagaggtgtcccagaagcgggtggtgctccaggcccgcctcaccagctccagggaggtcaaggttggagagagacaattctaggggcgaaccagacatagccaagagcagctcatcttccctggagaggacgggctgcccacttgcacagcccgggggcctcctgcccctagacctggtaccttcactcttgttgccacccctacattcatacctgcgccccagtctgagccacacctaggcccccagctgaagtgacactgtgggtgccaggcatctgaggtctccacaagcccccacagactcagggtgggaattcctgggggccagagctgcagagggtgctgcctgggggtgctgggctggacgggggtcctggttgtccctcctggttctcctggttctccctccgcagagggagggaggcggtggcctcagcagttcctccagcagcgttcctgagcgggcggcagctgggccctcttcccacagccacgctggggttgccatgcctgcaggtcttggggccccctcccccttgatgaggtcctgaccaaatgcaggaggagcaattccagcaccgaggggcgagcagagccgcctgttagcactcctgggagggcccggagtggtccctgaatgatggattcacctggaacattttcaccctcttcaggcccaccctgccccagaggcccacggaaaccctgcctgtactggggccgcagcgctgcccccacccatacgtaattacacggctcggtgtaattgcaaattcgaggtttacaaagcctccccctggaggccccacgtgagtgtgagcgaggccccagcccacccctgtggccccaagaaggctctgcgacaaaatatccatgagtgccgcccacgaaggcattaaaaccaacgaccttctcaaaacttaagctgtcacaggacatttcaaagggtgtttcctaagaacacctcaataatgatgttccaaggagaccccatccaaattcctccaaggattacgcccccaaggcccagtccacacttgctcactcccaggacggggagctcacctcctcctccccgggcgccgtctcctccacatcccacaccaggtcctgcccatgactttccccctctcagcgccgtcctcagtggccacaccaagaacgaggccatgtcttcctgggaagggcctcagatgtcagcaaatgccctggtgtcttgggctgggctgggggcaccagggtgaggtggtggggggagccaacctcactgcccctccccttcctgcctgcccttcttccggggcacccagcagctcggtcctagggcgatgttgacagacagacagaggggcggatgcagcctacctcctgggcagtgagctgcggtctgaggcccctgcccagctggaaaccacagggaggggaagggaggggaggagaggagaggagaggaaccgtcatggggccttggagtcgagtcagggttgccaaatgccagatgctggtcacctgcttctttatcttggtaacaggcaggtcgggcaggagtgggtggtgggtgggggtgagcaggggtgaggggtggcagggcctcagcacagggattatccctcccctgacacacacaccagccctactgtccctgtcctgcccttgcagacatgtgtcctgcccttgcagacagccgcaggcaggcagggaccaccatgagcaaccccgtctctcctcctgaggggcagcacagagcctggaggaggcctgagtggggctgaggcctggggcgagctggggtggaggggcactggctgccgggctccagggatcttctccccttcctgccccggagggtgctggcacaggggtggggctcactcccactccgtagacacaatgatcagaggtcctgggtgtctggggaagctgggctgtgcgtgtatgcgtctaccatgtgggggtgcctgtgagtgtgctggggcgtctgcagtgaaggcctcctgagaccactccacggaaacaccgggaatccctgcagctgagcctgtctctcacgggaccgggaagctggagagagccccaaccctgcccgctggggccgagctccctgctcctgcagcagtcccatgccccacactctgagtctgccctatccacagctgctgggcctctctgtggccaccatggtgactcttacctacttcggggcccactttgctgtcatccgccgagcgtccctggagaagaacccgtaccaggctgtgcaccaatggggtaagtgaggtccaggcctggctgcatcgggaggggcctcgggtgcaagggtggctggcacgagcccagctggacgcctcacagccagaatggtgccaggccctaggcaggagccagaggtggtcaggggcagggaggggctgccctggagtcctagctcc

SEQ ID NO: 5243 - DNA, 6000 bp, Homo sapiens
tcggcctcccaaactgctgggattacaggtgtgagccactgcgcctggccttcctaaggatatcataattttagtgcttacatttaggtctacgatccattttgagttaatttttgtgcacagcatgaggtaggggtccaacttcattcttttgcacatggatatctagttgtcccagcaccattttctgaaaagactattccttcccccattgaattgtcttggtacccttgtcaaaaatcaactgatggccggtctgaaggtagtgagttatctcaattgattgttcacagtcagttacagatggaacacctcgttctactctttcccgccttctcactgctgcacttgaacagtctttaaaaaaatcaattgaccataaatgcaaggatttgttcttggagtctcaactttactgcattgatctgtaggtctatccttatgccagtaccacattgtcttgattactgtagctttgcagtaagtttgaatcaggaaatgtgagccctccggttttgctcttctctttctagattgttttggctattctgaaacccttgtatttccttatgaatttgaggatcagcttgtaaaaagacagatgggattttgatagagattgtgaagctatagatgaattcgggagtttggccatcttaacattatgtctcctgatccatgactgcaggatatctttccatttaattcgatactctttgattcctttcaaaaatattttgtatttttcagtacacaagttttatgcatcttttgttgcatttatttctaggtatgttctttttgccaatattataaatgagattgtcttcttcacttcatttttggatggttcattgctagtgtatagaaataaaatcgatgtttgtatattgatcttgtatcctgccacattgctatgcatgtttattagttttaagggttttagtggattttctatatataatgtcatataatcagcaaatagaaagtttaatgtcttagtccttttgagctgccacaacagactaccataaactgagtggcttataaacaacacaaatgtatttcccacagttctggagactgggatgtccaagatcaagacacccgtaggtttggtgtctggtcggggcctacttctgggttcatagatgactgtcttctcgctgtgtcccccccatagtgaaaggaaggggcccagggtctttctaaggcttcttttataaggacactaatccaatataggaaggctctgccctcataacctaatctcccaaaggcctcacttccaaattccatcacctggggagtaagaatttcaacactggggggacacagatattcagacatagcatttttcttcttcctttctaatatgggtgcccttgacatctttttcttacctaattgccctgccagagccttccagacagtgttgaatggaagtggggagcattcaccccaccttactcctgatcataggggaagaactatccggctttcaccactgagcaccacgttagctggggtatttttgtcagcgctctttatcaggtggaggcaggtcccttctatttctagtgagttcagtgcttttttttttttttaatcagggaagagtgtgagcttgtgtttgggtgccttccctgcgtctgttgagatgatcttacggtttctgtctcttattctattgatatggcgtatttattaccttggttgctttttggatgttgataacatccaaactcttctgccaccccttttaatagaaagctgtacaactccccaacctgcctgggcgtgtctgcccaagatgagtgctagtggccgactccctgctagagtgagcactgcataaacagcctctgcttgtcctcatttgagtgatcttcatgtattccacgagaaatcaaggcacaggggtctcatggtctcatgaatggctccaccaactgaaggtgtgctccatcggggctgtgagtcacctcacgccaggcagaaaggtctctctgtcaaacatggcttcaaggaaccagggacctggttcctcccacaggccaggccctgcccctaagtgcaatgggaatatatgcacatgtcacctgtcccaaaatgctgggagatggcacttctgcagatggggaaactgagggaccagcccgaagtcacggggaggggaagactcctacacacagggaggagaagaacccagccgggctgcaaacgcctgcccttcctcaacgtgcctccggctgtgcccacatcgctccagcagctctgccttcctcaggcataagccttctcagggcaggggaggcccagggagcggcgctcccatcccaggccgggctgctgagcaagcccctcccctttctcccctcatcctctgacagagtccacctgaatatttgtcctggagccaggatggaagctccaccaggcccagctaacaacaggaaccctttcagacgcacttctgggtgcgtactgtgccagtatcacacagacacaagccatgtccttgtcagccatgggatccccaaggtccccatgaggtcacaccagtgggccactgggaagggcacttcagatgtggagctcccatgggccaggccctgcgaagtggtcctcctaccccctcatagccagtcttccctgtgagcctgcaagtgactgtgaatgtgagttccactctggagctaagacgggctgctgcccccgcaatcagatgtcaggcccatgaagccctccatcatcccactgcagtcagaataaaatgcagcctccctctggcctccaggtcccaaggccagcccccctgcctcccaggctcacacctgcccctaacctgtgtccagcccctttcccctggctctgtctcctgcttcccttgtgttcctccaacctcacctgtctgtctggagtgctcctccccggctctgcctagctggctccttctcaggcatcagggcctggatccactgtggctcttccaagcctctgcacttggagtgcctcagccccgtggttgaggagtgccccaaccctgtgaccctctagcaagcatcctaggaattccgtccctccccagcactgatatgaccatcgtgctgtgacacgtgtcatctccgccagagttgcagatcctccaggggaggggtctgctgcctggctcccacagccagggcctggaacagtgcctgacacacagcaggcacccactaaatatttgatgcatggctgaagaggacaggcaggctggctgctggctgggcatggcctgcttctgaggctggtggtcaaggacacagtgtgcatggatctgccccctcctcccacttcctgagagtggagccagtgtctccctccacctaccaccccctgctgaggacacagctcacacctttaacgggaaatgtccccatcactggggacagcagggagctgatgggagagcaggtgtccaggacatccagagaaatgtttcctcacactggaacccttttctattcccttctaaacaaaaagaatcctcgaagactctcaagtgaccatatagtgtcttttcttataatgtcacttcgacaggcacaaaatgtaaaaccaggcataaactactagtgcttgcagttcttacgcaggcatgaagccaaaaccagtttacaaattaaccaccaagaaaaccggtagagcacagatgatgacgatagagctgttttgtccaatgtgagcgctactggccacccagggccatgtgaatttaaattacgatgaaacacaatgaaaaatttggttccttgtggccacatttccagtacccagtagtcatctgtgccagggggttatccaggtacagaacattcccatcgttgcagaaggttctatcagctagcactgggttggacgacacttgccaagacgagctggctagaggatggttctccggacctggtcccacgtggttcccaggtaagcccccgcccaggatgcagccccgttgtccatcagttttcttggagagggcatgggaaaccttcgtcagtgtgtcatctcctgcaaaggccttcgctccttcctctggggagaaagcacccttcactctctgaatcattagcccaaagcagtaagtgcagcaggcctggccccacaccttccggaagagccacggtgtgaggctggcatccctggggcacgacacaaccaggatgtagacgaaatagatgcaatatctggaggttctcctataggtgtctctggcctcctggacacttcacactgttctgggagctgccctctcaggccccagtgaccttttcagatgcagactcccacagcatgggtcagcaattctccccttccgtgagacagggattggttacctgtactaggaccttgaggccaacactgactagggggcctcatgcctgcccaggttccagccccggagagcaatgtgagcaaagcttgctgtctttgcaaagccaaccactgtggcatcaactccttcaggaagccctcccggattgtccaaggtgctcacctcctttggggagccctcccagattgtccaaggtgcttgagggagggaggaatgggttgttctcccggcaccggggctgcactcctgggcagacgctgcatgcctgtcctcaggcgcggccctgctgccacccccttgggggctcggagcgcgacagcagcttggggacgcctcccgcgcccagcacggtgcacctgggccctgaggtcctggccgaaacgcgccaagttgggggtaggtgcagcgaccccatacccctcggctgcgcgccctggcggcaggaggcggggccgggggcggggcgtgagctggccggggcggggcctatggaggggcgggaccgcggcgccctataagtactgcggagcgaggcgcgcgcccggccagagagcgagcgcgcaacggcggcgacggcggcgaccccaccgcgcatcctgccaggcctccggcgcccagcgccccacgcgcccccgcgcccccgcgcccccgcgcccctttcttcgcgcccccgcccctcggcccgccaggcccccttgccggccacccgccaggccccgcgccggcccgcccgccgcccaggaccggcccgcgccccgcaggccgcccgccgcccgcgccgccatgggagtggagggctgcaccaagtgcatcaagtacctgctcttcgtcttcaatttcgtcttctgggtaagggctgcgccgggggccggggcgggagggggcaggcacacactccacgttgggcaggtcccgcggcagcgtgctaggccccgcgggcgcagcgcgggccgcgaagttgtggggccacctgtgggctccaggagcggggtggggggtcgcccggggccaccgcgccccccgacattggggctgagggctgcgagccgagtttcggggcctctgtgctcgggggcccacctctgcggccgggccggggcttctgggggccgccgggcagttcccgctgtggtggtgatgggtgcggtggtcgcgggtcgggacccgagtacccggccgcccctcagctaaggaggggcctgcgcgggtccctggccgcggattccggactgctgcttcgcggggacgaggggggggctcgcgggcgggactcctggcgccccgcccccatgagctcatcaagagccgccgcccctggatggtggggcgggggcgcacactttgccggaggttgggggcgatccgcctcactctttccccagcccagctcactctccaatctgcggtcaccacccgagaccttcctgggggtcgcgcctaaaaggagcgcagactcccgccgggatggcccagaagctggggtgcgcgcaccctggccgtccctgcctgggagccgatctccctctcctcacccagacacgttccagcggaggcctcctcccagaagggctctggaggcctcgcaggagtggggatcccgcggttctgagttggcacaagga

SEQ ID NO: 5244 - DNA, 6000 bp, Homo sapiens
cagcatcacgcaatatacctatgtaacaaacctgcacacataccctctgaatctaaaaaagaacagcagggccttaaatggggtgatgccttacagatgtagggcatcatatccataggagacattcgccaggcataaggatcctctggagagacacatcagcttgaggaatacagggtggtggctctgtccagccaccctgccccatctcctaccctcccatccattctgcattgggtgcctcctgcatgcagagtcctcctccaacagcaaatgcctcccagatttgctgaagggcctgctccagggtctctgtggagacgcccctgggacccttgctgaccaccctccacaatctgcacccccatcctgtgcccccttcgttttttttgtcccaccactacctggtggtgagacagctctgtaacctgcgcctagaacagcgcctggcactcagccggtgctctgcgaggatctgggggaatgaacgaatgattgaatgaatgaataggtaggaagactacctgaaggaggatgttggccaggaagcctgtggtggcctggctgttctagcagcccagccctggcccgcagatgctgatctcacagcagccacacacccttcccttggtcagcctcagcttccccattcctcatgcattcttggtgacttctgaggctcctcccactgtgggcctctgaccctgctggaggaacatgaggtgagcctggtgagctgagggatgtcggcaaacagccctggaaggttggtgtgaggtagattgagtgccatgtttccagaaggttctgaggctctgggacagcctgagagcctgagaggctgggagagggttgccttcctgttcatgctggctgataggtctgtcagtctttgcatctaggacagccagggctggacatgtgcacccaccggaatgatagaggaggggctttcctcagtggagggtgtgtcctggagagagcaggtggcagctgggaggctacaaccctgcggtcctgctccctcagctgatgggggccctcctcacctccttgctcacacagagagtggccactgggctcggtcaggccccacttgtattgtctgtcctaccaggccatccacccttactcccccaccctcagcccttggcctcacctgagcccacacccagcccagcccagccccaccttacctcacctgcgcacctggccttactccctcctctcagttccccacccatcccccttcagctccttggagcttgcagggagcttgaagacaatcccttgtccagtctctctcctgcctcagtgtccccaagccaatgggaccccatacccccagagcagcaggctgtggcacagctcagggcccaggagacagccctgggggcctccaagaagcctccctagtgagttattagaattttttttttttagatggagtttcgctcttgtcacccaggctggagtgcagtggtgcgatctcagctcactgcagcctctgcctcccgggtccaagtgattctcctgcctcagcctcctgagtaggtgggattacaggtgtgtgccaccacacccagctaattttggattttcagtagaggcggggttttaccatgttgaccaggctggtctcaaactcctgacctcaagcgatcagcctgcctcggcctcccaaagtgctgggattacaggtgtgagccactgcatccggcctagaatttttaaaatatggaggcttgacctgcctgaccgccctgccttttcactcgttttcagaataatgagcaaagcaacctgcagaagatcaaataggatttttcagtattatcatgaatgcatgggcttttcagctatttgatgtgttttcatccatgactctttctgatgctcaaattgtcccattgttgatcagccccttctcaaacttgacaatgaacaatagtaggatatacctttttcctaagataaaatagctgaggagtctatgctaatatagtccattcaatttaaggactggtttgtacttctttgattttttaaatctgtatcacttttatactgaaaatcttggttccaaaggaatttagcatcattctttgatacacacacacacacacacacacacacacacacacacacacacacagagttctttgggatcctttggttgagtattagtgatcatattgatcatggcactccatcgtgtgactgtaccacagcacagctgaagcgattgaaggacattgtgattgtctctagacttttgctaatataaaaaatgctgttttgactatcattatgtatatgtacttttctatttttcctacatatctttgggttatttcctagaagtggggtttctgtgtcaaatgatacatttagtaatatcgctaggtctcttttctaccagtgatgaggagtgcacctgtgcctgctgcctctcccacagagttgccatcaaaagtctggatttttgccaatctgataagcaagcagtggtatcagagtgtacttttcatttgcatttttcttgttataaatgaggttgaacattttttcataagtgcaaaggtcatgaaccccatttcctatgaactgctcatgtcttctgctcccttttctataggactgtctggcaggttcctcacctcagttttgatgttctttatgtatcagtgatattaatcctttgtgatcgaaactgcaaatacttttcccatttggtcatttgtctcctttactttgctaatggtgcttctattttaatttttcttattttatctgttgcttttggatttcaagtcatagttggaaatgttttcccgattcacaggttcttgaggaattgacctgtacattcttgtagaatttgcatggcttcatctcaccctttacacttgagcctctgattcatttgagatttattctcgtgtgcggtgagatggacccaaggtatgctttttctttctttatgactgtccagttgtccaaacgctgcttattcaaagctcaccttcctcctgctgaggtgggaggggaaggcagagactccatgcaggtgtatgtatgttcacccggaaagtaactgctgaatgcgtgctgtgtgccctgcagagctgactgactgcccccatcttctgacccgctgcccttctgcaccttcactgatatgcttcccaggaaggtaccctctcctcggcctcccttgtgttatcacagcgcccagcacaagctgggacccactccatccactcttgctgcaaatacagactgtgcactcctgtgtggcacctcactagggtggggagtcaggcgtcaagggcctgggctggactccgtccacgataaaagagcagacttttggcagggggtggtagatacatcaaattgacccagggtgctcagggacgacctggaagtgtcacatgagttatgggtctcctggcggggcggagagtcaccgctgagctccacctttagtccctgcctcagggctgtgtgcagtatcctgaaaaaagccggtctcttctgttggctgccccccaccccccccccaagcctgagacgtgctgagacccaaatgccagtagcgggcgggaggcagtgcagagacctgtgaaaatcttccgatgtgaccaacccacccccacccaggggaatccacggggcgcagcggcagcgcggtctcgacggtggggaggacaaggcgcccattctccaagttactagggtggcgcaagcgcctctccctttaactgcccaggcagccccgcctgctatgcccggcagtcaaaccaggtccagaccccggctgtgccgcccccaccccccagcagccctgccggctccccacccacacagctcccactgggaggtacctgacagtggtggtcccatctcaccctcccggtccaagggccctggtgggaagcgacccgagcgtattcgccgcccgcagctcgcgcgcctgggcacccgggggcgctcacagtgatcgcggggccagcacaccctcacccaggacatccctttcctccccccaaccccaactccggagtggctcagagggagggaaagtagatgccggcaccctaccccgcccctcctgcccccgctgtgccgttctcggtcgtggtatcggccaggccttaccccttcctccctggcgcagctggggtcctcctccgggccaggcagagcaggcgggcatcagaagtgggggccaagcaggtgggtgagggcagggcaggagcaagcaggggagatgcagacggggcggggccaagcaggtgggtgagggcggggccaagcaggtgggcggggagggggcggggccaggcggggtaaatgcacactggaacggggccaaacaggtgggcgaggagggggcggggccaagcgggatagatgacacgagcggggctaagcaggtgggctcgggcgggggtgggggtgggggcgggggcgcaggcgggggcgggggcgcggacaggccaagccagggggtgaggcggaggcagggccaggccggtccgtggggagagggcgggccaagccggtgggcgcgggcagggacgccctgtgcgcgccggaccggcgggggcggggcgtgcaggcgggggcggggcacgccgtcccatgggaccggccctcggccactgccccctccggccccgccccgagcgcccgggctgggccggcagcggccccccgcggcggggctggcagcagtggctgcccgcactgcgcccgggcgctcgccttcgctgcagctcccggtgccgccgctcgggccggccccccggcaggccctcctcgttatggccgcggcctcctccccgcccagggccgagaggaagcgctggggttggggccgcctgccaggcgcccggcggggcagcgcgggcctggccaagaagtgccccttctcgctggagctggcggagggcggcccggcgggcggcgcgctctacgcgcccatcgcgcccggcgccccaggtcccgcgccccctgcgtccccggccgcgcccgccgcgcccccagttgcctccgaccttggcccgcggccgccggtgagcctagacccgcgcgtctccatctacagcacgcgccgcccggtgttggcgcgcacccacgtccagggccgcgtctacaacttcctcgagcgtcccaccggctggaaatgcttcgtttaccacttcgccgtgtgagtatcgccaccggcgacggccggcacgaaggtgcttcctgagagctggtgtgggggagctctgtcccagcgccacctgccccgtcggagctgcgaccccggagcagaggagggaaggaagtggggaaacgcagaaacacaaactctgcactctcccttgaagttcagaggcgctgctgtgtctgggggtgcgcatcttctcgcaggcccggcgtggggagggagccggctggggaggggaccacctggagcccagaatttggctccacacctccgggagggtagtccaggtgtgaatccttctgggaagagaagcgtgctggggagcgcacccttgggtgcagtaagataactcctcaaggtcggctgagactcgaggctcaggagcccccaagagagaaggcccctgatgtccggtgccgcatctcagaccccctgaggcccaggtggactctggggcagggggctgtccaggataggaaggtgacggtggcggtgctccctgagggctcagcatgccacgggccgtccccacgggccccacattaactaattgaaccaagctcatgaaaacctggcttgatgcagagagcggagaggcacgtttgcagctctcactaagaggcagctgtgctcccggagaaagcagcgctggtagcagaggcacctggcccccctgttaccaggtggttccaattcccggtacagcgtgcctgagcagggctgggcactggatttctcagggacaggcctgggaagtcacctccgggaaggtccag

SEQ ID NO: 5245 - DNA, 6000 bp, Homo sapiens
gctacctggcaagcctagcccctttgggctgaaggctgacccctgggtcccaaggataccaggtcagggggtgaaggacctttgaacccagcctcccagactcttaacctgacacctcccagatgaagccgaggccaggcacccagtgcccacagcaggctgaaggcccctcataaggctgtgattcccaagacaacacatacaaagcctggggtgctgggacagagccccagcagggtgtcagacacagatcccactgtgggatccaggcagcccccattgaccaaggtctgcaaccgcacctcacctggctgagaaggtgtaaggtgggcgggaaccgaggttcgggcgggcaggagtcacatccaaccctgcctccgctctagtcccgccccaggcaaaaccttgttggctttattgagacaggtccttggagaatcataggagtaagagtacaaagcctcaaggagaacacgttcacttcacccatggagtaatggcgaaggccagagccctccccgctccttccagatcacccttctgtcctctgcagcatcatggagtaatggtgaaggccagagccctccccgctccttccaggtcacccttcagtcctctgcagaatcatggagggatggtgaaggccagaccctccccgctccctccacatcacccttccgttctctgcagcatcactcttttaaatcttaaaattgtaaacaaaggttctctctcttcatcccacttcccctccagccacagtcccatttctcagcccccttttggtgcaaaacccttcagaagggtgtccagcccattcctcctgcttgaatcccgagggtcagcccccatgctcatgacgctcttgccaaagccaccagtgactccagctctcggccccagggaagctcccaggccttcactcgcttacctgcctctctctccagacccagctcctttatttttccctccctttccctggtcagaaccctgggcacctcctcctcatgctggggtccagccttggcccttggcccctctcctctctagccccatccactcctggtcatctcatccagggtgggagctctaaacaggacatgagtgtcaatgacaccctcacgtccagctcagaccacatgccgcaaactgcacactgcacactctgccctctctgctggcccacaggcccctcccgtggatggacctgcagggttgcctcccctcatgtcgcccccagccgcacctgaaggccccctcagttggccctctcagcccaggccccaaccagcaggaagcctgtcaggcctccttccagggaggttccaaacctgcccctcaaatccccccatgccccatccaagtccacaccacctctcatctggaccacagcagagacctcctgcactgcccctcccctcaacccctcatcagcacatcagccagaggctccttggagaacagaaggggctcagaaccctgcagcggcgtccactgcacacacaggaagaactcaagtgctcataggcagtgagtcatttccttaggcattgtggtgacccgggatcatgtgcctccccgaagcctgcacatgcactctaatgatgcaagctaccaccaggcggtcagctttgccagctgacgtcccaaacagctggcatggggcatgcacacagtaggtgcttaataaatgtgtgtcgggttaagataggcccaaagccatttcaaatgtccaggcagtggtgtaggcaggggtcagctctgaagctggcctcctctcattcgggagacccctcagaggtcccagcctccaggatgcagtgttcagagcaatacttctcagtgcacgtctggctgtgtccctgcccagcgctcccagggtcacccctctctctagactcactttctgccccgtcaccccactgtacacccttggtcccagccccttccagtggctcagcttcctgaacactccaagcctgggctcacctctaagccgttatctatgctattctctcagccaggatgcccttcccatacccaaacaatccgtgctcacctttaagactggctgaggcatcacctcctctgagaagccacctctcccaaacctgagcccagatgagccaaagcccttccttcctccagtcagcctggatcctctcatccggcagaactgtcgccttgcttctctgaagcggtgaatgccctggggctggggacgcacaggctcgctggcccacaaccaaagccgcttcctctggaggaggaagtccaggggtgccagggttccacttgctttcttcttcacccagcctaaagggcaattttcccacattccctcagaaccaggaagttcccccattcacactgagcctgttcatgacaaaaaaaaaggtctctccgatttcctctgctcaaccagttccctggctacctgaggccctgcttcacctggaggaagacagtggtaagtttccagcatctccaccacacctcagcgccagaggaccctcagcctccctcgcacacctctgggcagtttggtaactcatcccatctcctcctgccgcttcatcctctaagccctccccagggaacccaggaggcgtctggaacctgttggggacagtccctcacacctgccccattgagtaagggttcatgtggatgcccatcctcccccaggagtcccaaatctaagacactctgagactcctgtcacccacccccaccttacacagccggcctttctgtgcagtccttccaggaaactctggctggacctgggctctcggcttgactgcactctccccaagtccccagggcggccagtggtgactattcttgaaaacgagcttggcagaggatctggggacacgcactccagatgcaaacacgtttgcactctttgggctggaatcccctcgagcggtacactgcacccgtgggcttgctaagaaaccacctcacagagggcagattgattggacaaaaggcatttggtccccaaattgattgacgtgtgtgaatgggagttttcagaacaaagacccaaagatatgggggaaacaggctgggcgcggtggctcacgcctgtaatcccagcactttgggaggccgagggggggcggatcacgaggtcaggagatcgagaccatcctggctaacacggtgaaactccgtctctactaaaaatacaaaaaaattagcgggggctgtggcgggcgcctgtagtcccagctactcgggaggctgaggcaggagaatggcgtgaacccgggaggcggagcttgcagcgagccgagatcgcgccactgcacttcagcctgggtgacagagcaagactccgtctcaaaaaaaaaaaaaaaaaaaaaaaaagatatgggggaaattgccatttctgatgcttaggctcaacaaagtatggacatccatgcgggaacacagatgaaccaagggacctgcactaatgctcctggaccgcaaggggaagcgcagcgagggctgttggtctagatttcttgaactttctgagcagcattccttccttctgggcatggagcaggaccctcctggaatggggtcttatgccctacagtcaaacaagagaggtcagataatttatggccagcttctaaacacaaaggtggagggaaagttagagcaatatttttaggtttgatgtctggctgtgtggaaaggcggggttctgatttctatgacctgccctggggaaaatggattccagtttctaaggccagcttcggggaaaatggcactgagagacaggagagcaagagaaggtcagagaaacactttttcttccgaagctgcttctgaggccttcattttggggtattgttttctgatgcccaacatatctgagctgctgaacgaagggtagctgctgaaccactcccacggtgacttggaatggcttagccagccggccttgggccacctggctctggcccccctgcccaccaggactttggccggctctcgctcgcctctgcgatgtccgtcccaccctgtctcacccctgcagttttctgctctgtggagcgatgattgacacatggcagggggacactggttttgacatttgagcctgtgcccagcccttgcctggggaggaggtggggcaggagtcctgaatgagcatctccctacttagtgacagtcaggggcacggagaatggtgcccaggccaagggcagggcttgggccaagtgtgcgcagcgtggggtgtgtgtgctccagcggctcctgctgcggagggcggcatgaggcttgtttacctgtgtgctggcatctctggtggcccctgcaagggtggggaagtggcaggcagggtgaaatggggaaaagtgggctctcaactgctcctagcagcctccgggtctggggagggaagtgaggaggggcccagagctgtctcctggtcactcttctggggctctgtgcagacctttggcagggccaggctacaccacaccctctacaacctcccctgacttcttcccctaacccctcaccaccattcctccgcttttctctccccgcccctgcctcccctccattctctccttccctccacctcccggtcccatcccctgcccacactgcccctcctcaggcccaaagtggacaccggtgctgcctgagggtcagagtgtccacctccagcagcccgggcaccgggcaggattcaagctggagggggctggggcgggcgaagccgggcacggggcgagcccgctggtgggcggggcaggggcgggtccttcgaggggaggggcgggctcggccagtgagagcgcagaaaccgtggcacgggcgctcccggaactggcgattgcaaagcgcgagggctggaactcagacccagaggggcggtccctgttgcaagtcatctcccgaaagggcggggccggggctcatcccggaaggaccggtgtctaggtcaccctggagcgctcaccccaccggcacccgtgcccaagcccgcccctgcaaaggcaggtactcgagcacactccggagagggcggcctctgagccccgaaccccgaactccggcgcagcgtcgcacctctgcccaatgaggtgcccctgacgtgcctgctgcggctgccctgctccccccagcctccctgcatcccgggatgggggagggcgccaggcgcagctcccggaccctcaggggtctccccgccctaccccaccagcctgggttcggtacctcggggctcagatgtgcagtcagctgttaatgtggcaaaatttggggaagtcctctgcagccgcaaaatccagttcccaccagttggaggccgggcggggaagggtggggacagacagcactccgctgtgggaggtaaggcagagctactggggagcctggaaggctgagctatgtctcccctacgcaagaccattccagaagccccttggagctctggctgctggccacaggggaaggtagaccttccctgagagctgcactgtgttggggacagggccactgtgggcctacggagggcctccaggcacagggacccacatcagccctctggccacagaaggcgctgatgatttgaggtggactcagccaccactccgagcctctgcctccctctaaaagtggggcatggcacattcctgtgtcaggcaaccaggcactgagcctggcccacctgcaggggtcggggggagcagcttgtccctgtctcccctccccgggaggctgtgtgcctggagaccagagctgtcaaaagtggaggagggggaccccctgatgtgtcctctaaggtccaggtagcaggagagctccactggggagggggtcctgcagtgctgtcctctcttgcaggcaaggccaggcgggtgctgcctgggacccagtgactcagcacccctgcccggatcaactggacttttgccccctgctccgccagcctcctgcttggatctctcctgggtctccctgctgcgc

SEQ ID NO: 5246 - DNA, 6000 bp, Homo sapiens
tgtagaccataatggctattccattctgggctttgaagccagggggcaaggtaagccctcgacgcttgtcctcccaggtctcctgggctgcctcccaggattcccgcagcagggcatggtgggccatttcctcctttagcaggggggctgccttctcctccatctcctctgcacaacccacataggtatcgtcaaaggtgtctggagccaggcccaggggcaggatgggaacagcctgggcctgtggagcaaaagaggtgccacaccgaaaagagcataagttcagagcactggacatgggtcctgggggcaaacccatccagaaacacagaatctcatttctatccctaaatatcaggtatatgcaatttggcaagggcccaataagaggcttaaataacacaggcactggagtcagtcagacatggactgaaatcttttttttttttttttttttttgatggagtcttgctctgttgcccaggctggagtgcagtggtgagatctcggctcactgcaagcgccacctcccaggttggagtgattctcccacctcagcctcccaactaactgggattacctgtgcatgccaccatgcctggctaatttgtttttgtgtttgtttctttgagacgaagtctcgctctgttgcccaggccggagtacaatggcacgatcttggctcactgcaacctctgcctcccgggttcaagcaattctcctctctcagcctcccaagtagctaggattacaggtgcgcaataccacgcccagctaattttttgtatttttagtagagacagggtttcaccatgttggtcaggctggtctcgaactcctgacctcaagtgatccaccagcctcagcctcccaaagtgctgggattacaggagtgagccaccgcgcgcaggctgaaatcttgactttaccacctattagctgtgaggccttgggcaagtgtcataacttttctggacttgaggatacttccaacctcacagttattatgaagacagcataaagagcattacttctgtacaacctaaaaggggtcatcctgtcattagaaaggttcttgcagtcggtgggaggtgggactagatgactatcaagcacttttccggctgtaagatctggcaggcaggtgatgtgcaaatattacacacagccagtgtccagctgcctaacccccagccccattctcctcgggctctctttccctctcatccagcaggaagcccttgcaggtaggtgctcagccaccacaccaaatcactgtgagctctgagacgcctgagtcctcccctgctctgtacccacatttggggtaggggtggtggggaggccaagccttggttgggacgggctgccaggactgcagcacacaggtaacccaaggaggctttgccgggctgtgcctgcgctgggagatgagaggtggggaggagaacgttggaggcatccagagagggatggagatgggggttctaggagacagaatgggaacttggggctccctgcagagatggaggttcctgagaggaagagagttaagagtggaatcctagggaagagtccctgggagagggatgtgaggagtcagccccgggtccacttcctcagggtctgtcccttaatgtcccccttggggctaggagatggttcctggagttacctgccaggtgtggaggccgaggctgccgagggcgatcatcaaagccgccagcgccatccctggaggagacgtgagggccaggggtccgggtgagggcgggaccagaggtgctggagtcctggtttcgaggggctggaggcagatctggaccctgtctccaggcgcacgggatcccgggtccaggattagggccccggcggggcgtgggcggggcctgggagtttattgcccgccccccgccccaagtctccgcccccgactccccacaccccttcctcagagcctccagtctggggacctttccgagactgtaaaggcggggccgcagtttggctccgcctgagaggggagggccgggggcggaggacccacttgaaggctgcggaagccgccagcgggagggagcgccgagggctctggcgggcgctgcgctgtccccggaggagtccggagtccggctgaaagcaaaggttctcgaggctaactgtagcccccgcgctggtaacccgacacccctttcccagcgccgcacgcggggccgggagcgggcgcgccagggcagggactgaggagcaattccctttctcaaggcctgcggggtctttctgcgggaccctctttggctgtgagtgatggggaggaaacttgtgagactcggcctctccctcaggcgggccctgacccggtcggcccctggtccccggcccaccaggccaggggccccgcgggggtcccgccggccgagaggtcgcccccggagcactgcgatttgcatacagtttgcatttggcccacaccctgggccacgtgctccagcatctgagcagcgcccactccctgcctgctctgggccctctccccattcgccttcagtggggttgggccagagacagagcccttggtcgcagatccacagggtccggtctcgcccctcccccagaccgctctcgtggccgctcagactcaggtgacccatgtttgtaaacactggcctttcccccacctcctctgggcttatctataaataacctggctctgagttttggatgccccgtcagaggtcatgggagaaggggccagcggaggaattggtaactcagggaagagcttcctagcagccagagccaggaggaggtggggttgtcacccctccttcccccagcggccggagggtcgccgaaagctaggatttgagaaatgctgcctgctggggctgaggtgggcacgaaagattagagctacccaaaggaatccatcctggtctggctcattaattttccccatccctgtccccccatcccctcagagtgtcagccaaataaaaagtttcctccacctagaatcctgctatctcccagaatcctttctgtagaccaaacgggaagacatacggtgggtccaggcttggaggagggtggggagggaggtgcttctgagtgcttgttagaaaaacagctccagggcagggcgcagtggctcccgcctgtaatcccagcactttgggaggctgaagtgggaggatcacgaggtcaggagttcgggaccagcctggccaacaaagattagccgggcgtggtggcaggggcctgtaatcccagctacttgggtggctgaggcaggagaatcgcctgaaaccggaaggtggagattgcagtgagctgagatggagccactgcactccagcctgggcaaaagggcgaaactccatctcaaaaaaaaaaaaaaagaaaaaagaaagaaagaaagaaaaacagctccaggacaagttcttttgcccccttctatgagtctagccatcccaaagccctcccagattctaaaataaggaatcatcctaccgtttcccatcatggtgaaaaacagcatttgcctatatatcctgcctgcccactctctggaggaagttgagtgtttgcagttgcttgaaaagataccacctgaggacagcttggcctgctgggatgacccgagaccagatgtattggaatcactgctttgtccctctccaccctctggctttgggggattgcttctcccatcccaggacctggaacccaaaataaggccccaagagatggattcaaatctagtcattgggggccgggtgcggtggctcacacctgtaatcccagcactttgggaggccgaggcaggcggatcacgaggtcaagagatcgagaccatcctggccaacatggtgaaaccccatctctactaaaaatacaaaaattagctgggcgtggtggcaggcgcctgtagtcccagctattcaggaggctgaggcaggagaatcgcttgaacccgagaggcagaggttacagtgagccaagattgcgccactgcactccagcctggtgacagagcgagactccatctaaaaaaaaaaactagtcattgggcagggatcctaagtatagcattaagaagtcctgcaagatcactggtaagtcagagctggaactgggactcagaatacagcctccttagttcgaatctctcctggcaccttagctaagtctcagtgtttgtgtgaaaggtacaaaatctaaggagacgctctctgaggtcggggtgctgaagcttcctcctctcttcctcctccttggctgaccagagtacaggaccacagccagtgaggaggcagttgtcccagcctggatccccagtgcttcagtccacctcctctctggcttcagggattcccttttttgtgggaaatgtagcaggaagagcctcagacaaaacccctcagatgctgagttaaagaaggaaggggtttattcagctgggagcatcggcaagactcctgtctcaagagctgagctccctgagtgagcaattcctatcccttttaagggctcacaactctaagggggtccgcgtgagagcgtcgtgatcgattgagcaagcagcgggtacgtgactgggggatgcatacaccggtaattagaagggaacagaacaggacagggatcttcacagtgcttttttatacaaataaccgattaggtcaggggtcaatctttaactgccaggcccagggtgtggcgctgggctgtctggctgtctgcttgtggatttcatttctgccttttagtgtttactttggaggcagaaatcggacataagacaatatgaggtatggtttcctcccttagaagaacactgggcaggtcagactgggcagaggctggtgttcctgagccctgaggagacatccagaaatagatgggggcgtgtcacgtttctgagcagctgtgtgggggaggttcaaggggtggggactaacaatatcaaaaagaaacttgtcctcccctctcctggtggccatggtggagatcagcagcagcttccccacccaggacaaggcctaggtaaggagtgcaccactctcctcctgggtgctgggcaggaaaagtggttttgaggtgaaatttgggagatgaacggtggaattttaggagtcatgagaaaaagtttccaggaaactttgatgaagtttgggatacctaggaaggttgggagccatgggaagtttgggattcctgtggggagatttggggtcacattcccaggagggtatgttcagcaagggcctggatgagaaactgatgacagaattgctccgagcaggatgagagggaggacagaagcgcagctcccttgggctagaaaaggaattgctcagcatccccagctccttgggcccatgcccaccccatccctccggttcccaccacatctcccctgacactggtcaccaaggccagccacccacctgctctgcagtggtctacactgttagctgcgctgagaaagttcctcagactctcagcaaacatgctggggcctccccagtccctggccttggcatacatggtccctgccctcaaggaactcactggccagaagaggagccaggcacatataagggcagcacagtgtgataaggacagtgacagaggacagcacagggtgataccagagcccagaggagtcagagggcttcctggaggaggtggccctcgggttaagccttgaagagtaggtatccaggagaagggtgtcccaaggagaggggcgatgtgtgcagagccacagggagggtaaccacggagccgcacctgcgacgttgttctgcactacagaagccaagcaggagtggcaggtgcgagcctgcagagggtgcagagggccaggataaggacgctggcctctgtccttagggtatggagggatgttttgtttgtttgttttgttttttttttctagatgtgtttgtatctcttccctcatgattttcatctctgcatttttactctata

SEQ ID NO: 5247 - DNA, 6000 bp, Homo sapiens; identical to SEQ ID NO: 1626

SEQ ID NO: 5248 - DNA, 6000 bp, Homo sapiens
tttccttagtaactacatttcttaaaaacttgtctgaagtcatttactccacttcttcccaccatattcagttttcaggacatctaccctgccttctgcctcaacaacctcactaaaatggctctttctaaggttgccaaagatctccaggttactaattttggaccacatttctcattcctcattttgcttacccaggagcagcatttgaatgagttcaccagtttcttcttgcacctcttctcttttagcttttatgatgcttcactctctgggtttcctcctgtccctctgtctactctttcttggtgtcttttgcaggctcatctttctctatccagtctttaataatgacctctaaaagtctgacttgatccttcatttgttcttattctacacactctaattctgtggtttgcattacttcctatatgatctgtatatttagcttcctaatggaattctacttaggtatctaatagacatctgaaacttaatatgtccaaaacagaacagatttgatggtgggagtttctctgtgctagttactattttctctatgaagttggagtctaggttgagagtgaagaatgctctgtgtctctgtgtgtgtgtgtgtgtgtgtgtgtgtgtgtgtcagggtgggagaagaaattagagattttatgagacgagaaaatttaaaaacaatattgtgtaaaatgagagaaagaaggtaatcagggaaatttggtaagacatctactcattctaagcagcacagtatgaacaactgaattctgatttccaaaatccctgactttgacttctggctctttcacctagtagctttgtggctttgggcaagttacttaaactctctctaagccatagttttttcatctaaaatagtgatcaacaatattggacctaaattcatggttcttcatgaagattaaatgtacttacaggtaatgtgccttgaacatcataggtgatcatcaaatagtttatattgagttaccagaaaccttattcattttttatctcatccttctttctcaccctccacatgcaaattatctttaaattctgtttctacctcctagataggtcttagatcaatcttttccactacgtccatgactttaggtcaagccactaccatctctcacccaaattactgtcatagactcccaattggtcccaccttttaagttgctccccacactaactccactgcaatctttccaaatctttctaaatcttaacaaatttccaatgctcccaattcttccttgcatggcttgcaagagtctgcatttgctgcctcatgagatagaaggtgtatgatttgtctgttgctgttgtaataaattaccatgaatgtagtggctaaaaacaacacccatttattagctcacagatctattggccagaggtctacacagtgtggctgggttctctgctcagggtatcagaaatcaaggtttcagccagactgaattctcttctacagactcgggggaggactgaagtctctgttcttttgctggctgtcagctagagactgctgtcaactagaggccactctcagggcttgtcctgtgccctccttcaccctcgagccagaaaacagccaccattcgttccttgccacattatcccctccatcttcaagctatcaacagtgtgttgaattcttctcattcttccaatctctttgatttcctcttctgctaccagcaagaaaaaaagaacccttggcttttaaagaactcatgtgacttggttaggactagccagataatctgtctatcttgagatcaactgattagtagaattaactccatctgcaaaatcccttttgccatataacataattgtgggagtagtatctcatcatatgcacaggtccatccacacacaaaagaagattatataagggtgacagtcattggtggtcatcttctaattctgcctacccaaggagaggaagccaggggaaatatccctgaagaatcgtagcttgagctgagatcagatggatgagtaagtgttaactaggtaaggaaggaaagaagaagcttccagagagcatatggaaaagtcatgcaactgaaggacatatagcaaaaaaaaaaaaaaaaaaaaagaaaagaaaaaagaaaaataaaagagaaaaaagaaggagtgaccaaaaaaaggctaatgtgtttacagtggagagaataagaatcattgtgactcttatttgaaataatgtgatttgaaataatgtggctagagaggtaagtgggagccaggcctcacaggctttctaaattctgttaatatgttttctcattcccaaaagcaaaggtcaaaagagtgggatagtcagatttgtattctgagcatagtacttcggctttaaggtgaagtatagatgtagagaggcatcagtaaaatgtggtggcccatttaggaggttaggagtgtggttcaagagtagggtaatatcagtggacatataagcaggcagattcaaggaacactcagtagctaaaatgaacaggactttgtgattgattcaatatgggagtgatgtagttatgttccccaggaagcagactctcaaacaaagattactgtggaggatgtttactaaggagcgttcttggagttaacacctgtgcaagagagaggatgaaaataggattgggcaaaaggagaagctgagtagtaattcagtcccagcaaagacctcagtcaaccatatgaagggttctaggggtgtgagcatctttcagagttgtccaccactgggttgaggggattaaacttttatacctctgtgctgatcggtcattggatatagaatgcccaagaaagggagcataaccttggatgagctggctttcttctgcttaggcaactcctgaagggttatgacagctgagggccatcttttaggagcactctccacagctggaaaataaatcctccatttttgaagagggttctgggctttgcatcacagcatccagcgcaggggtgaaggagcataggggagtaaggcatcaataataattcctaaatttctgatttgtacatcctggtgggtgcacttaacgaccatatattacaatcattggcttgcttgggaaaatcccactagagtaggtgctactgaggggcaaactatattggacaactagtgcatacccctagaactggcatagtttgctaaataagtgaatgtccatctatttctattttcactcccctctcccttacatcctttgctcccttccctcctcatcgtactgtcatccaatgtgggaaaacttgagcaggttatctgaggccccacctgtgctggagcggaacaaatagcaaatcaagctcctctggtccaggctctctgatgggcaagacaggcagtaccaggaggaaggaaagggggagcagttgatgacatctcaggcataaactgtctttcaactctctttcaatgcttcagcccctataaactcagggctggctgaaccaggtcctctccaaaagattaattggataagggcctgctgaatcccccataaagccagactccattctctaatttgctcttccactgatgcccgcccccaacctcttacagctactgctgggggtcagaagaatttcacatcgtattggagttcatccggaatctgaagaatggataggaatctggagataggaatctggagataggaatctggggaagaaaaggaatggataggagaatgcatagggagcagggctgaaatagtagaagaggcaaatcctgccccgagaagctgaacccagttcagtcctgcacccttcagccctgttcccgctgcaccgcagtgacccagtccccttctagccccctctcgtgggaacctgacaccctacacaggcagctctgcctgcactgagagcaaacagggagcgttagcgtgtcgggtgggcgtgggcgctgcctggagacggtggagaaagccaaccttctccttctcttttgcctgcgctgggccggcgttagaattatatcccatcctcaccttactctggtttatccttgtcagtgcttgccaccacccccaactgccctcaacactcaagtcagaagcttcctcccgggagcccttttccctggcaaggcttccctggagccaaatctcggccccggccccacccccactcccgcccagctgtggagggctccttgggacccttaagtgcaagcctgagtgttaagcctcagacaggagatggagggtgcggagacagatgcaggagctaccccaggcccgcagcgaggagctgcagggaactacggtagcaatagtgtcacggtcactgcggccactgcaacacagtacggtaaatgcggctctaggctcagactaaagcatccgcgcctcagcaggtgacgcacgcagacctggtctccaacgccacctccacgttccctgatacaccagagaaagatgctggatccgtggcagccgtctctacccaacccctcctaccctcccttccccgaaacctccccctacgctgccaatactcttgtcttcaatctctctctctctctctctctctctctctctctctctctctctctctcattcctgggaatcgggggtgggggcgggtgataaagagaggtgggcaggagagaaatctctaagaggagacgggacacatctagggagggggcgagcctggaggacagtcgcacagggaggggcagaactcccgagccagggagggggtgcacagtcacctggcgggacagaggctggcggagggacgggaacccaggcggggcgagccgcgggagagtggagggcaggcgcctgggctgggggcggggaccaggcggggcagggggcagggagaggagggcggcgggagcctgagccggaatcgcagcgtgagcaggtggagccgcgttgggagcccgccgggtcgagctgagtaaggcggcgggctcggcgggggccatggagctgctaaagctgaaccggagcgtgcagggaaccggacccgggccgggggcttccctgtgccgcccgggggcgcctctcctcaacagcagcagtgtgggcaacctcagctgcgagccccctcgcattcgcggagccgggacacgaggtgggtgcctccctcagccccccccacaagctatttctcactgtaccccagaacactaatagagtccccccaacgagctccacactaccttctcaaacgtccacaccgtgcctctcatagtactccctcagcccccaaacagctcccctcacaccttcacccccacagcctacaacttcatcacagcttcacaccacctggtcggaactccttcacatcctggtcccctgaatacacctagagcccctgctcaccccaaagcacagccccttccccaacacgcagcccctcctagacaccagtcagaaggcgaggacctcctcttgccaaccctgcagatctccttttccctcttacatccagttcacagagccacaacagagaagggaaggaagaaaggaaggcaggactgggaaaagaagggggctggttgagggagggagcactctggaaagcttgaatgcgaagctgaagttgtgatcacatctgacaccccagcccccagccatcccaaaaaagatcctcaaatctgaattaggctggacactaggggatgctccttagagctgcctgcctccatttcactccttctcaaacccctctgcctccctagttggagctttcgaggctctgtgccctctctctttgtctgcaagtaatgtctccagctatcttccaagctctctctccagccctaggctaggtgctgggggcacagggcaaactagacccagtctggaccctcatggcccatagccaagtgcagagagaaaccaagcaaatggaaaaatcacagacacaatggaagtcccatgaaagggtctaaactgtgggcaccaaaagaacttc

SEQ ID NO: 5249 - DNA, 6000 bp, Homo sapiens
tttattcctagtgctagatcccaatcttcttgggctctaagcacaattaaactgggtgggtgggtgagggtaggcctattcagatgcaaggccagcaatggggctccccattatccccacccctttggtcccagtccccttctctgcaatgggcacgcatagaggagagacaaagggtattagacgcaacatcattggcccaggggagtccgagaagagctgccattggctgacagggcattttcaggctctgtcattggtcagggagcacaccccagcctgaagagtgatgccattggccagggagtggttttgtcatagccgttggctgtgaagtggaaggaaaagatctgggaatgaagccctgtggccaggaagatagacagggcagcaacttctgggcctccaggccctcttcccaccatagcaatgtgggcaaaactggtgtcaggccccagccagaaaaaggagcccaagccagagggcaagtgacaaaggatgtaccatgtccaatctcccacaccctggggctgcccttcccaatgtctttcttgatagccaagttgggctgggagcagctcactgctcctctagccaggagggtttctcagctcctggaggccgcagcttgatgttgaactgctgcagggtctgctccagctgtttctggttcccagcaaagtaggcggacacagcattgtggaagagcagcagctgcttgtgcatcaccttgatctgggggtccagcagggtcagctaaggctggactcaggcgcccttcttgagggtctatgagcctgagcccaggcacagaccaggggcacaaggactctgctctgatggtgcttttggggtaggggctgaactctacccagggagtcaaaggagaagggtcagtatgatggaagaaacctcactggatttgtgggcctagggtttttgtaccccagctcagggggtgatttttcccagttatgttcctgggaccagcagccaaatcctccaacaggaaagggccaggaattggagggagggtgatctggaaaggcccaggggttgagggggtgaacactctactccccagctaggctgcatttcctcattcaataatggggagggtctgaggggaaggttagtgttacagatggaaaggtgggctagggtcaagggggtggggttggcaccttgttttcttccaggaacttgagcttgatggccacatctccccgcagcttctcatacttgtcccgatgggcctggaaagtggcctgggcactctcaagtcgaccacgtgtccctgcatcccgggggcctagactcagctcctctaagtctgttcggtaggcatcatattccagcctggggagggggtgataaaggctggtctccactcctttatcctcaacacatactctcctttccttcctgaattcttatgcccctaatgcccaaatttccacccataccagccaactccccaaaccctaagccctgccagtgcccacacctggcagcctcatactgtttcacagtcatgagcgtgtcttccatggtcttggtgaccaatgtgttgatgctagagacaaagaagttcacggctcctagcagcgtttccccattcttgcatagtagtttctgtgtctctgcattgtagccaaattcctcctgagggcagaagggaggaacagaccttgaataacactccctacctgactgaagctgtagagcccttcattcccctcctccccggggaggacacagccagcaaaactggaacaaccaaggactgcctccagcaaggctctcttagccggaaagttagtgggatcaccctggggatacctggggtaggaatgtgggtggtgggcattcttgggtaagttcacaagactggaacagtctgagagctagtgtggcaagcaggggaggggctctgattaggctgagcacgaaggcattctccccagtgcagagaggggttatttgtgaggcacctagtgtgccccctcccccaccccctccaacttctggacctctgtacaaacccttaggctgcctccacaggtgagtgctgctgggggtagggctgggcccaccctgaaggggttctccctgtgggctgcaggagggagggaggatgaggaatgactgcctgggagggcccatgcccagttcccccaccctctttggtctgggtgaggcacctgaagctctggggacttctggctgaggtcagcaaaggcatcacccagtgcatgctgggtctgcagcaggctgtagaggtgggctgtcagtgcccggcccagctgcaggacactctcatacttgcgcttcgtctcacgcagcaactcaatctgcagctctagctccaggtccacagtccgtgagcctcgaccaaatcgttctgataacagttgctttgtgcactgattgggaaatgggggaataaatcagagaccctaacagcctccccacacaacaggtatctaccccagcaccccccaggctcctactctcagccacagatgggatattacgatcacgaagaaaagggaaaaaggtacccataaggagttttggggaagggagaggtgcttaaatcctaccttataggtgttgatgccccatttcttgacgatgtcaaacttttctccagcaatgccccgagccacctcatctccagggccagaaggagtggtgctgtgagatggatggcggccagaccctaaaggatcaagttctctgacaccagcctctctcagatacaccagacacctctgtggccccacccatacttctcttcgagcacatgaaattgacttccctgaaggagatgctagagacaactggatgctcctgcttactaggaggaactcggactttgcgcggtgagaaccaaatcctgatatacatatggcctccttgggggttagaggaggggtttgcagggagttgttggtgtacaggggcagaggaaacagaagaaaatacactgagtttgggggcagcaggagtcaaggatggtgggtcatgataacaagaaacctggttgcattcccatgtggaatcttagtgtgagattcagggctgtttgttcctctaaactttagaatctaaaaattctgagaagcttcacaaagttccaactcagcctcaagctgtagagggggggcattcctgtgaagcaggtcttaacttgactcaggtggtggcagggaaaggacaaatgagccatttcaggggctaagtggcaaaagggaaatggatggacaacgctgggagttgcttttgggctgaggagagtccatgaggttcctacaagcagaagttcccaagatctccagacataattcaagctttcctagacatatcctatgcttccccaaaccattcctgtcccctcctccacccaagattcctgtttctgaacattcatacctgtggggatgagtccatcaccagagcccccatagccaccagacacaatgctggtttcattgaggttgggtcctgacaccatcacctgctggaggtcctataggccagagaagaggggttgcttcaggaacataggggctgcagaagcattttggaggtgggaacaagtttggattcaagcatcataaagatagtacacaagggaagtctgcacagaatcaaaatgatacgtaaaaagaatgaagggagtcagataagtcaggggaaggctactggaatggagggtgagaacctaggatttataaattggattcctaaattgaaacaattagaagaatcaaacagaagcacctgctccagcccatcatcttcaggaagctgcctggcttcgccgttcccgtggatagggatctccattgtggctgccttccctaggatcccgtccgtcatggctaggaaaggtattggagtaaaactctccaccccagcaccctgcaaagcccaacacagaagttctggacactggccagcactctagaagaaggaggcctcctctgtcatttctttaaaggctgtcccagggtttgagtgtcccagcgtttggccatcattcctttcttcagatatatgtatttctcccctccaaaacgcacatttgaaacaggcacaccaaagcacggtgtcttctcacaagcccccaacctcaccaggactctggtgattatttctacactcattcagcagacatttagtgagtgcctactatgtgtcaggcactatttgtgacaatgaaaatacaacagtgaagagggaaagtctgctctcttagaacttatctccatgcaggcgtgtttatgctgaggagatgaaccctttccagggctcaggtcttcacccccctattcaggtttgttctccattgcttggcctttcacattcctttagcgtttcttcccccttccttcagggggtctcccctcctccgtctcatacacctcgtcttcctcgggccctccccaccaggccttagttagatcagtgggtgtatgttcccagtctctggtaaaagcctctctctcccaggatatcggtgacccttccacagtcagttatgtctcccaggtgtgtgagtccccgcccccacccccatacacctggacatcaggtgtgtcctcatccttccccggggctcggggcatcttgccctctggacaggtttgtgcgttcaacttcccgtcgcccaagcatgttcctctcacctcgggccgggccgctcttcccctcagggcgccaggcccgggccgcgcggggacctcgggctccagttcccgtcgcgatcctagcagcaggtcagggactcggcggaaatgacgtcctctccgggcagaagaagccggccacgtcgcagattataagggcggagctgacgtcgcagccagggcagggcgatactcgagctagctctcgagatcagcgagaggttacttccggggcggcaccgagaagctgaaacggaagtggcgtacggcatgcgccggtggcgtgatggagcggcagcagcagcagcaacagcaactgcgaaacgtaagtgagaactaagtcgtttcgaggccagacgttcagctcgcattcctgcacacatcgcgggaaccccacagggccagggatttgagggctggaaacttcgggctatggcgcgcgggcctgggaaactttgggcggcgcgaccttgactagaagtgtggggcccttatcgctgagtttgtggtcccccttttctctcagctgcgtgacttcctgttggtctacaatcggatgacagaactctgcttccagcgctgtgtgcccagcttgcaccaccgagctctggacgctgaggaggtggggaactgtgtagggaggttacgctgcaagaagagtttagcggtagactgcttccctcctcaccccacttcccgtacctctggccctggccttcccacgaccctcacccctaggctgggcatggggaagaaaggaggcggacccgacagggcacctttatcctccacttaaaccctatcttccttctaggaggcctgtctgcacagctgtgctgggaagctgatccattccaaccaccgcctcatggccgcttacgtgcagctcatgcctgccctggtacagcgccgcatcgcagactacgaggctgcctcggctgtgccaggcgttgctgctgaacagcctggggtctctccatcaggcagctagccatacccaaccccaggaaggaaggccttggatggaccctcagattgaaggacccggtggaccttggggttggtgaatcctaaacagagagaattcgaggttgcctgaaagctgggtgtccttgctccttttcctggagccaatatacccagtttttactcagtttgatttatattctgggcaaggaagctttgcctactttattggcacaatccgttgttctgtcgtttagtgcatatctgctggcttcagccctggcagctgagaaattgttttctatatgtagaaggaaaacctgagcatttgcaggca

SEQ ID NO: 5250 - DNA, 6000 bp, Homo sapiens
ccctatttgaagtcttttatctcctgcccccttcccaccctttcccctgagtccccaaagtccattgtgtcattcttatgtctttgcatcctcacagcttagctctgcttgtgagtgagaacataagatgtttggttttccattcctgagttactccacttagaataatagcctccagtctcatccaggtcactatgaatgccgttaattcattcctttttatggctgagtagtattccatcatatatatatacatatatatatacacacacatatatatacacatatatacatatatacacacatatatacatatatatacacgtatacatgtatatacacatatatacacatatacatatatatgtgtatatatacgtatatatacatatatacgtgtatatatacgtgtatatatacgtgatatatatatatacatatgtatatatacgtatatatgtgtgtatatatatatatatatcacagtttctttatccactcattgattgatggacatttgggtcggttctgtgtttttgcaattgtgaattgtgctgctatatacatacatgtgcaagtatctttttcgtataatgacctcttttgctctgggtagatacccagtagtgggacagctgcatcaaatggtagttctacttttagttctttaaggcatctccacactgttttccatagtggttgtaccagtttacattcccatcagcaatgtagaattgttccttgttcactgcatccacaccaacatctactgttttttgattttttgattatggtcattcttgcaggagtaaggtggtatcgcattgtgcttttgatttcaatttccctgttcattagtatgttgaccattttttcatgtttgttggccatttgtatatcttcttttgagaattgtctatccatgtccttatcccactttttgatgggattgtttgtttttttcgtgttgatttgtttgagttcgttgtagattctggatattagtcctttgtcagatgtatagattgtgaagatttttctcccactctgtgagttgtctgtttactctgctgttttttttttcctgtgcaaaagctctttagtttaattaagtcccagaaatgtatctatctttgtttttattgcatttgtttttgggttcttggtcacgaaatccttgcctaagccaatgtctagaagagtttttacaatgttatcttccagaatttttatagtttcagctcttagatttaagtccttaatccatcttgagttgatttttgtataaggtgagagatgaggatccagtttcattctcctacatgtggctagccaattattgcagcaccatttgttgaaaagggtgtcctttccaaataaaatacttaggaatatacctaaacaaggaggtgaaagacctctacaaggaagactgcaaaacactgctgaaagagatcagagatgacacaaacaaatggaaacatgtcccatgctcacagatggatagaattaatattgtgaaaatgactatactgccaaaagcaatctacaaattcaacacaattcccatcaaaataccaccatcattcttcataaaattacaaaaaacaattctaaaattcatatggaaccaaaaaagagcccacatagccaaagcaagactaagcaaaaagagcaaatctggaggcatcacattacctgatttcaaactatactataagaccatagtcaccaaaacagcatggtagttgtataaaaataggtatacagaccaatggaacagaatagagaacccagaaataaacccaaatacttacagccagctggtttgatgattcttataaggaaactaatcctattggatcagggctctacctttatgacctcatttactcttaattaagtcctatctccaaatacagtgacatcgggaattagggcttcaacataagaatttacagttcactctatagcagtatctcacttcccttctgtatgatattctttctccacattgtttctcattcttctggacccctctccagcaagatatcctgtaaaagttgcaagatcttttcaagtctagactcagctcagaatttcacttctacacattctgttgaataaagtgagtcacaaggcaggcccaaattcaagcagaggggaacagacttgacttcttgatgggaagagtggtaaaatcacactccaaaaggacacatggaattggagggatagctatggctgtctttggaaacagtctaccaatttgtccttgaacaaattgtttaaccacctgattttactttctttgcctgtaaaataggaaatatagcatcaaccactttgggatgttgtaagtaatagattaagaaagtgtgtttagcacctcgtacattgtagtagaaacataacagaaacagcaaaaacacatattggttgagcccatactatgtggcagcactattacaagcacttaaatatattgctttatgtaatctttgtaacagcccaaagatacacgttatctttgagataagatgagaaaccctaggcacaaaaatgttaacttgcacaaggttggttgcatagtaactagtctgtctaaatcttgaatgtcttactgtctactttatccaaaggacactttttagttttttctctttaaactatatttgaaagtttacagttgatgttgctcgctcctctaccaaacactcctcctcccgtgatccctatgactcccctctgtacaatctttcctcctgttctcattgctaccttccaatctcctctttcatttcttcaactcttctttcttgaaggaaccatcccatgtggcaactcagtttctacctttccaatgatgattgccagtcttcactctctcctaaactctaggcttgcatttctaagtgttattagggtgtgagcacatatgacccaggtaacgttttgaaacgtttgtgcctttcacttctttcttattccattggttgcaatcttgtcacttaatacttgaaatgtttttcaaatttggatgtttctagcaatcagctaatgcctttggcctggtttaggccttcatcatctcttgcctggtttatcaaagtcattttttaactgaacttgttgctttcagttcctctctgacatgatggcattagggtaatatttccatgtgcttcaacacacataccttctcaccattactatatgtcccccccgccacccccccccagcatcacactatctctggtgtcaccttctctgttcatggcctttttcttcttctctaggggttcccccctttgaagaaacagcatctgctcaacctcccctacaggctcccttaaagctggtttctcctccctctgtttgtctctttgcaactctctggaggcatctttacctttacaactttgcattttctctgctattcccatgtaagttccctgaaaccctagtaccattcacagcaggatttcaaaggttgcctgttgcgtgagcattctataggatcccaaattatctttctgtgcaaatatgaattgttgtgatatgtccgtagagacggcacaacctcatggctaagaatgatagttaccagttctagagatcctactctaattgctctagagtgggggcctgaacaccagtattacaaaaaagacaaaagaaaaagaaggaaaaaagaaaaaagaaagagagaaaatcaaagctaccttcatcatgtatgaatttgagcaagtaacacctttgtgagtccccaggccccagtttctcattggtaaaatgaggataacaattacacagaccttgttgggctatgtacagaattaaatgagattatgtacctaaaaggcttgtggcacagtgacacacacacacacacacacacacacacacacacccagagtacttcgtggttatttctaggctttactgcttgaaaggctgaaaagatgggtggatgagaggtgccctgaggttccttccaactctccaagattctgtgatactcctccttgggtgctgaagacactttggcaatgtttggatttccaaacggttgcttagaaaactaagggacccacgaagcccaggtaagcctcagggtctttcccaggaatcgtttatttatttgatcttagttctgacctagagcctccaccttctccatccaaatcaccacagtggtcgaaaagggcctgtgcttgggaaatccttcctttgttggcgaatcttggacccaaaccctgcatttgggcatctgacacccataggcccatggttcaaacccaggcggctctttccaagttcgaagcagggactcggttctgcgcatctggcgggtgtgcccagattgtaaccttcgcactaggcatccaagaacgtgctttggacacactcggcggtgggagcgggtgcttggtttgcatcagggatgaggggtggagtagcgaaagcgcccggagcgcgcactcactcacactccccaagccagggcgcggccgctctgggcgcgaggtcccaagccaagtctcgcgctcggccaggagccggggagtaccccaggtccccggtctggggccgccgctatcctaccctgcggcgcgcactcctgacctggccccgccccccggcggccgcgagtagcgggcggagcgcaagcagagaggcgctctgggctgtgcggcaccgcctctcctcggtgtctggggagggacggagggaccgggcgggagagagagaaagcctgaccgaccggctggcgaagagctgcatgcaaccggtgggaggccgggccggctgggtctggggctcgggctcaggctcgcaccgtttctcggcaggtccctggcggtgagcgcggacggcccggaggcggcggctctgagctggcaggcggagggctgtctcctgcgcccgcctgcccggcgcggtccgaggatgcgggggggcgatgcccggggccagggacgcgctctgtcaccaggcgctgcagctgctggccgagctctgtgcccgtggggccctggagcacgacagctgccaggatttcatttaccacctgcgggaccgtgccagaccccggctccgcgacccaggtgagtgccgccaccgccgcctggagggacctaagggccctgggctgggacttggggccgcaccggggcctgaggcagaacagcgacgcggactgggagagggcggggggcggccaccgagccaggagagtgatcaagaaccagcgcactgtggcctgatgctgtaaccaggcggggacccgggcggtggctactgcacggaggccgactccgggtcggctagggcagggttggagggaccacgcccgccacctgcgctcccatcgccaaggctcctgggggcggctccctagctccgagctacgctctccacttcccgggctatctgcactcagagcgaggggaggccgcggcggcctcggagccgtgggaagggggacgaggccgaaggaaactctgggaagttgggagttggggacggccccgggttggggccgaatcccaccgggtgctgctcatcctttctcccaagcgtctagttcctttccttggtatggggtgagaagggcgggacgcgatccggcgttgggccggggacagggtgcttctggccttgggcagacgggcctgaacccgttcccggcgggtcgcacggcatggaggtggcctgggcctgggcgctaggctcgaccagcgactaccgccggccacgatggggttcgtagactcgtcggtcctggcttgtgcacctgtagttactcctagtgaaagttgcaaagctcttaactttggaaagttcatttattttggcatttgaccaattaaggttggaggagggagttttagtggagccatttgcttttcctgaggtccctgggtctcccaggtcgtctcatccgttactggctactggaaaatgcattccttccaatgtttgcttgagatgttt

SEQ ID NO: 5251 - DNA, 6000 bp, Homo sapiens
cggcttaccatcagagcagggttactatcctcaaagccttctcggtcaatacccagcttaggttagttcccagccatggccacaagatggcaccccagcccaccaggagggctgaggctctgggcctgggagagcagcatggaggatgtgccaacctggacaaaagcctaggggctggacttgggccagttccagagcttagcaggaccagatctaaggcctgcaagtgccaggtgggaaaacataggccaaacttggcttcagaactcccttcaccttttttttagtccactcccaacaccagcttatattctagcctttcctacatgaagcttactgaagcccagcaatccctccttgggcctaaacaagagaaattctagaacttagatgttaaggatacaggagttattattattatttcaatacaacagtaaaagcaaaaaacgaggcacagagaagttgagtaacttgcccaaggtcacagctagtcagtactggagctgggatttgaatccaggcagtctggttttaaagtctgtgctcttagccactgaacataccacaccacaactgctcccacccccaccagccccagctaccaaagaccctctggcaccagaccacaagctttcttctgcaagggaggggcaaatggctgcgaataggaggtgctgctccaaagtggaaaaggagtgaggttttcagtctagctgggggtctgtcgttagtgtttgcgagtgagaagctagggaatggttagtcattcttcctcctatttccccccaaaaccctctgtttctctgttttctggtttttggtttttgttgatttcttctgtgttgccctcttggttttcctaggctgtttgcaaatgctagcattctcgcagtgtgaaggggaagtgagagaagaaagtttgatgtcctgttcaggatccacaagggaggccattctttggggcctgggctgggggtgtgtcatcagggatcaaagtgagaatcctaaagtggaacagtgtggggcacattgggaacagctaccctctcctgctggggaggctcctgtgtctgagttttctctgcttacctcttgggggattttagggtgtaatgggctttagggtgcaatgaataccctttcacattccttctgcctccaaccctggcctacctccctctttctaacacatcgtccagagcccctaatcacccaaccttctgcctaccaggagccccttgtttctctctgtctctctgtgccccctccccaactgcctgggtcacactgcagccccctattaggactcgccatggcgtagtgatggggccctgcactgattccctaaaaaaccctgggtaagtccctcctcctgacttggtctccattaggtgttccagactcccacagtctctgccacttgggttctaggatcccagcctctctcctagcctttctcaaatcatctggaccttagtgaggatctactgtattctgggcactctggagggaagcaaacaagaagccctggaggagctgatggtccttttatggagatcagatgagctatggagaagatcaggagccatactctgatcccgtgtggttctgcaggtgaagagagaggtgaagtcctggaaccctatggctagtagaatcccagaagattcttgggtgagaagaggggctggacatctgggtagaaagaaaggaaggtttggagaggctgctttcttgtctctccccatcttgatttctcccagctgtgtgtgtgtgtgtgtgtgtgtgtgtgtgtgtgtgtgtgtgtgtgtgtatgtgtctgcctctgtgtccacctttttctcttccttctggattctccatttctatttcatcttctaccaatgttgggacagaatttcctgagaacccatgtcccggggatctgaatatgggccaggatgggccacaccaggccgggccacaccaggccaggcttccttgtggttaggagatggggactcacactggtcagggtgaaagggacactcaaaatcactctcatccctgcattactctgagattgaaggggaaacagctcctatttagaggaatcacacagatcaatatctggagggaggaggtgccatgcaggccccaaaatccaaccctctctttgtctctgcccaactctgcccatttctgacttaatttagcctctctgtctctccccttgtcctattcccatctgtcaatccttgccctgcccctctccaccccttcaagccttttacccaccacacacagattttcctgtggctagattgggattcccctggccaagtaaggagagcgatgtctgtggcacagctttgtccccaggctcacaacggcatctgtgggtcagggtagagggacagctgtctgcacagttagaaagtgccagcagtaataaaagcctcatatcttcttaattaaatcgccctttgcccaggcatcctgtgttcgattgggttgagctgggatcaataagcctctttcccaccccagccacccctggagacgggcctgacctccccagtcctgcctaggcccacctggccacctccccagaaggctgggagcttctcaaggccagaggctgggtcagattcatctcttgtgtccttgtgcctgggacggatcctgaaacaagtaaggagtaaaggagtgattgctttactgagtaaaccaaggcactagcagcaggcatgggccaggaaggctttgaggttcaaactggaactcccacccccaggaccaactgtgaagatggaggaatcacagcaagcagcagctcccacccagctcccagacataacaccagcttatcacccagggcagttgaagccctaggaagtgcggggtgggggtgtcagtgctcagggaaactacgagcagttgctgcttctgacctctgagggcagaaggtccttttcataaggggtctccacctagggatccagggttagtgtgggagagtccgtgagcttggatggatgtggcactcatgggagactccctctgtctgaagctataaagggcccagggtcagtaaggagtccaaaggggttaataggggtccaggattgattgttagtggagggcgtagaggataacgtggtgtgtgtgtgtgtgtgtgtgtgttggggttcatgcaagacattacccatggaaggaacatggggcctccaggttccgcgagaagggtcggtattaaaggattccttggagcggtcagcactggtccgggccagggtgtctctgatgacaaaactccgggagagctttgtctcaccagggatcagatggtccctggtttggaaggcaaggggagggtgccaacgcccttctcacctcagtctgacccgggggcgcgggcccagacgtctctcggagcccccgcccctggagtggcgttccccgagggcggaccgtgggcgggtcccccgggagcagcaggagccgcgcggggcgggcgcccccagcgccgaggttgagggaggccgggctcggtgcggggctgggaggggggcgcggaatcagggctttttaggacccagcgcggcgccttcctccgggggcgagtgcggctgcgcgcgccgtgtgcccgtgtccggagagcggcgggctggacgcggaccgcgcgaacgagcaggcgacgggcgagcagcaagcggagcagcagcccgggcggcagcagcgtcgcggcggcggcggcagcggccgctccgcgcctcgcctcaccggcctcgctggcctcacctcgccgcgcccggacccgccacccccgcctccccgcccgacctccgcagcccccgtctcggccggcagcgcccaccgcctgcccgaagcgaggagcggagtgcggggcgcagaggcaccggagccagtgcccgccggccccgcaaatcaaacccagccaggagaacccccgcctggccccgtgcagctccgcgaccgccgggagctgtcccttcagcaccgccgcgggagcccaagtccgagcgcagcccagcggaaccccagctcgagcccgggctcacggagagcagcgctcggcgttagccgcacgagcaacaccccgggtgcccctgcccagggggcccgccatctcctccaggaggcggggagaaggaacgaggagggcgggcgggcaggcgggcccgccgccggggggagcaggcagccaagcaaggagagagggagggggccggagcccgccctgcgtcccgagctgcagcccggccacgcagggaggaaggcaggcggcatccatctcccccgcgccgagagcgcgccgcggcgaccacctcacagaggagcgcgaatttcccggccctgtctcctcccctccccctcctgggggctggcctctagtccggccccgggagcggctgacctttcccccaaaagctttgtgccgatttctccattttcccgcggagatggggacgggagcccggccccccaacccattttccccacctcccggggctcgctgctgagcccgcccccctccctctttccccctcactccctccctccctccctttctccctccctttctccctcccttctttcctcctctgcctcctccgctgccggaccagctccctcccacatctggctcctagagacccctgggatcccgcgcacattcccctggaccggcacccgacaaagcgcccggagaggcttggctcgctcgttggggtggccagagccgcaggcctctgttccccccgacggctggggggaggggggaagagggcgcgcgcccccctccccggcgccaactccccctggcggccgctcccatgggtgtcgctgggccgcgccatgcctaagggggcgccgcgatgggccaaggggacgagagcgagcgcatcgtgatcaacgtgggcggcacgcgccaccagacgtaccgctcgaccctgcgcacgctgcccggcacgcggctcgcctggctggcggagcccgacgcccacagccacttcgactatgacccgcgtgctgacgagttcttcttcgaccgccaccccggcgtcttcgcgcacatcctgaactactaccgcacgggcaagctgcactgcccagccgacgtgtgcgggccgctctacgaggaggagctggccttctggggcatcgacgagaccgacgtggagccctgctgctggatgacgtaccgccagcaccgcgacgccgaggaggctctggacagcttcggcggcgctcctctggacaacagcgccgacgacgcggacgccgacggccctggcgactcgggcgacggcgaggacgagctggagatgaccaagcgcctggcgctcagtgactccccggatggccggcctggcggcttttggcgccgctggcagccgcgcatctgggcgctcttcgaggacccgtactcgtcccgctacgcgcgggtaagtgacaatttacccatcagaagagcggggcgggaaggcagcgtcctgtgcctccccgcgggcaggggtggaccggagaactggcgcctagggagttcagaatcgaaagggggtgtgtgcgcatgtgtgcacgtaccagggtaagagaggaagggtgtccgccggggttctggttttctatgtatgtcagtctgtgtgttgccaagtttaatatgtatgagtatgaatgggtgtgtttgtgtgtatgagtagattgtgtgtgcatatttatgtaagtgtggtggtgtgtatttgggtgggtaaagtgtggagtgggaatgagtgagcatgtgtgtatgttcgagtgtgcatgagcgcctgcccgtgaacatttgtgtctttgcagaggtgcactgtcaaagtatggactgctctcgagatttcagtgtggggagggaagctgggagcccttcctcctgtccaggtaaaggcgcatctggagccagccatggtcccccaaaaaggcctgaggcctgctgggcagcttgagacagacaccccctcctca

SEQ ID NO: 5252 - DNA, 6000 bp, Homo sapiens
ggctcctctctggttcatcacatccatagactttcagtatggttgagacttccaaatcttccctgtgagcctgagccctagttttgtatccagttccacccaaacattctccactaggctgacacacacattcagctcactccttacaactcaacaactgacgccctcacactgttatcagaacatctgaccttgtcacaccctccttaacatctctgatttcttcgacatatctgcaggtggggtgggggtggaatcgggtatgtgtggtgaccctgagagttggttaaaagtgctctggaggctgggtgcagtggctcacacctgtaatcccagcactttgggaggccgaagcgggcggatcatgagatcaggagatcgagaccatcctggctaacatggtgaaaccccatctctactaaaaatacaaaaagttagctggatgtggtggtgggcgcctgtagtctcagctactcgggaggctgaggcagcagaatggcgtgaactggagaggcggggcttgcagtgagctgagattgcgtcactgcactctagcttgggcgacagagcgagactctgtctcaaaaaaaaaaaaaaaaaaaagtgctctggaggcctgaaacagaaaagaaattagctgagatccagcatcaggttgggaataagataatcagtttagggctggattatgatttcaagcaggacaaactaagtgaggaaaaatatcctgtggcaaaacaacagaggtcagagatgaaggaggccactgggtgagaagaagccccatgggggaagcgaggcaagctcagaatgatgatgggtcatcatttctgtgcattgcccatgtcgctggtggatgacagcgggcacaattagagatgctaaggaacagaggacaattggtttagtgtcatctactatgtcaagtctaaacttcttagtagaaccttcatttttatttttatttatctatttattttgagacagagtcttgctcttgttgcccaggctggagtgcagtggcacaatctcggttcactgcgacctctgcctcttgggttcaagcgattctccaagtagctgggattgaaggtgcccaccaccacacccagctaattttttttatttttagtagagacggggtttcatcatgttggccaggctggtcttgaactcctgacctcaggtgatctgcccaccttggcctctgaaagtgctgggattacaggcatgagccaccgcgcctggctgagtagaatcttcaagatctgagttggctcatgcttcttcagtttcaccttctcactccccagctcgaatcagtactacagatatttccctgaattcagtgtgtctcttgtgctcttatgtacacatgcaattccctctgcctagaatggcatatacattggtgtctgctcaataaagactaactcgttcttctagatttaactctagctcctgcaattgctccaggtgtaatttataattctgatgtctttttttaatgccacctgtgacaccttcatacttcattaggtcagctaccacattgaataattgtttacttgcctgtctgaaatgaactgtgagctccataaggatagagaatatattttactcaatattttacaccccagaacctaatacagtggttagcacatattaggtgcactgtaaacatttgttggatgaatgagtgagtgaatgggctcacaagcacagggaaaattacaaagctgtgtgaaaagggccatgccaataggttggaaaggaagaaatgccagttcctaccaaaagggagaaatgcccattttcaggaagccttatcccactttctgcctcctgcaatatgcaattcaaaataaaaacactagtaaatagtaaacactagtaaatagtaaatgaaaatttacttttgaaacaacaaatctcaaccatatgaatgaagtcagaataagctctttctctttgggaagagggtggtgcccttgctttgtgggtgcctatatcagccagggtactggcacactcaataatttaactgaagagaatttaatgactatttgcagagacgaaactagccatgggtgaggaggcacctaaagactagcaatagcactgggcacagtagctcatgcctgtaatcccagcactttgggaggccgaggcgggtggatcacctgaggtcaggagttcgagagcagcctgaccaacatggtaaaaccccatctctactaaaaatacaaaattagccgggcgtggtggcacatacctgtaatcccagctaccagggaagctgaggcaggagaatcgcttgaacccaggaggcagaggttgcagtgagcatagatcacaccactgcatggcagcctgggggacagagcaagaccctgtctcaaaaaaaaaaaaaaaaaaaaaagactagcaacagcaggaaactgttgccacccctggcctgaaggtatggggagggagcctggggctgtagccatggagaagcaggccacagccagaatctcagcctggtccatcaggcctcgtccatgttctcatctcctgcctctgaatttcattggctgaactcagccagaagccagggccctggtgatccctgaagatacagtccatagagctcaggctcccaggacagggtagagaagagccaagaatgaatctaggtggtgggaaggcaaatggagaaaaaccggcattgaggggggatgcctctgctttgtaggcgacttgtgtatatgattagtttgcctactgggtaatcaagcactgagtggaaccctgtagatgggagttctaagtctcatgttttgtattgttaggtatttgtatgtgcaagcttcttagaactggtgccactaattagtaggtcttgggtggggcaacggcatctatgtttttaaaagctttccaagtaattttgataggtaccacttgttgagaaccacggatatagtccaccttctcatttttatagagaggcaaactaaggtctagagaaatgaaaaatgccctgacttggcaaatttctgtttgagaactatccctcaggtgatgttagagggtttggctggaaaactggaatatttgcaccttctactagcccatttcctccattttattcatgagaaatctgaagctccaaagatggaatgatgtgctcaattatacaccacagtagtgagtcatggagaaggaagcactaggactaagaatggcatttctaactctcaagccagtgttctctctaggcagcacacttggtagaaatgtgtgtgtgtgtgtgtgtgagtgacaaagccctggggcagcagttatagtccttcattctggtaaggtgctctccccaaagcccctaactggaaagaaagaggagtaggcagaggtcattgacccttagaactctatgctggaggggactggaggggatggggggaagatctgggtgactcctgtcccaagccttgactctcactcttgttgtactggactctgaatctctggttgccaattctgtcaccagaagaggactatcacccctctgaatgggtgttgggactttagggaaaactgggtaggatccagaaggaaaaggaagagacccattgtgggaggggcttacaggagacttcagcctgtcggtctctgcccaaacagcacaaggctcaggaccagcacaagggcctgtgtcaccatgccaggatgtttgaaactcctttttggctgctaattagggctggtcacccctttcccatcaattcccaaagcctgacacacagctactgcccttctacagtagcttacagactacttgcccatcctttgagatacagctgaaatctccatctccaggattgctagacttaaatttcctaaaaccagcagcccttcctcttccccaacctacacatgtcagagttgggtggaaccttagaactcacccgctcatcttctaagtgaggaaatcaagaccagagaggggaagtgattcacccaatctaacagcatggaagtggcaaaactgggactagatttcagtccatctggccacctacctctccatgtaattccaatgattctgaacatgcaccgctctgaatgagcttgtgttcctttagtctacgtaaaatcaacattaaatccacttgggacgtatttttggcaaagttagctcacgcttctttgggtctgcctgtctgtcattcttggggtgctcttgtatgtgtggcagtggtctctgagttgtaagaggtgtgtgcctacggccaattatctgtgtttgtttctatattagggtcatgggtctacgagctgctgtagagtccctgtatatgtctcttttcttacatggagcatatatgtcaatttgtggttgttggttttggatctgtgtacttgttgagtgcttaagggtaattatgattctgtatgtgtgatgtatatgctacgattatgggtccatggctgctgcatacctatatacgtgccgcttttcaagtcgaaggttgtgtgtttgctgatgatttggatgtgtgtttgtacacagtgaaggttgtgagtccaattgcaatcgtatcggcgtggactgcatgtttaaaggcttaagggaatctgtctttgccttttgctcccgggttatgagaaaatgtatgtggctgtgcgtccaggacagcaatgtgtttgtctctcagccaagctcagtcctcacccaggcaccggggtcacggtcacgttcacgttccgtggacgccttggcacggcctcccaagggggcggggcctggggggtatccgccttctgacccctgggagatgcctcctttctccgagcagcagccgggggcctggccggcgccgccagccgggccccgcccccccggctcccgcccgctcattggccctggcagcggtgacgtcacggggctagctgacagaaccccggcgccgggcgctcgggaggtattgtccgtccctccgggctttgtagaatcgtcgccggcttacctggccgtgggcgcgtcctggccgctgcagcccggagcagggtgccagccgccgccgccgccgccatggtgtccccggtcactgtggtgagtgagcgagcgagcgagccagtgcccggcgcggctggagcccaccggcctggccaccggacttcggcaggccgagctgccgaaggggccgaggcggggcgggggtcccgtggcggccggagtcccgcggcgggaggcgggcgctgtcaccgccccccgctcctcagactcgcggcgcccctcctcgcgcgcccccagcccgcccgcggagggaggaaaacactggccacgtgactcggaagcgtgactttgttgatctccatgtatttggcgcgggtcggcggggtcgcggcccgggagagggaggggaccgctgccggccgcagagttccgcgtaggcggaccacagggaggcgtgggggcgggggatgctgggaggataacagggacctcctgggaatgccgtcccaagtttgtttcctaaccttcctcattttgtaaacaagttggcggacgcccctgagtctaagaagcgctgataacgcgctgggggaaaagggggcattctctatgacatcccctgcttttcagactttctcaacttgaaccttttgtttcgtctccccatcctccttattctactactgggttccctataactgtcagggtctctccagctactgccagtatctccttctagaaaatatggggctgggagaggccatggagcggaggttaatgctcccaggggctggcaggtggttgctgggcattgtgggcctgggcatcccctccagccgcctcctctgaccatgcccctaccctgaccagccttaatttccatgggaagtggaagtcatctcttctcactgctcttacctctggcagaacaaggaaaggcttggaccctggaaccacccatccgcctcttcccaatcctcctcatcacagtc

SEQ ID NO: 5253 - DNA, 6000 bp, Homo sapiens
tgagtttttaacttttcattgttgaagctttttcatgagtagaagacaagagattgagcaagactcgtaggtaatccctgtccatctcccaatccctagcctggagcatctgtgagttgggttacagttagaaagctgaggctgcccaagcgctggcaagagagccatacagggtcagaagagttgtcctaaccctatattcactgctactttggaaagtgcattgttcaagtcattttccctccctgagcctcagtttctccatgggtgaatgaagttgggaaagtccttttgagctggtgttatgactttctgaagaggactctctaccccacctatcgccccaggctaaagtgggttcctgtattatattcttggcacttttcctgtttagcatttgccattgtctctatttctttttatctatttatttatctctatcagtatttgcctcccttggactgaattccagaagagcagaggctgtggtgtccaccactttactcatatgtttagcctggacctggtgtatgttcagagctcaacaaacgttcactacctaaagtacagcaagcactcaccccccccagcccctctggcttggtaccacagagcatcaggatttcctacctggtgtttgtgagaagccctctgctgacagatgtgtggggtttttggacattccaaagggtcattttgttgcagccatcagaatgattacaaccataagtccctggttcaaaaaccatccctgtcctttccacaggtatggaagaagcgaggccagaatcaaaagtttagtcagaacaaagtcagctgatgctcatattgtgacaaggaggattagcaaaccttaatatgggactttttaaatccaatagtggttaaactttgtgaaatcagcacatcttagagtgatttatggaattgagctgcctttaatgtcgtcttataaaccatttttttttcaactgggctcatttgtttcttcatttatttaaaaaacacgtctttttagcctttagcatgtgccagaccttgtgcaaaacataatgcagacaaatggatgtcaaccggcagccaagtggaggctgagtggaggaaagaggtggccaagtggaggaaagaggatctacttaagaactacaaggctgactataaaaagtaaatatttgtgaccccatttgattaaagtctgtctcttactgctagacagtagagtaagtcccaggaagccacaaaacagttttctctgtctttctcaataccgaatccccaatgctgaacagtgcctggtccatagaaggaactcaatatatgtttgtagaatgagagaaatagtgtcacctaaaagagacttaaaagtgctggggggactggaaaggtaaagcttagtctcagctgggaaatgacatgatcagagctgagagaactgtagagttactgcttccagcctctgttctcatccctattttacaaacaaatgaactgtcattagagagcgaaagtgatttgcccagggtcacacagtgtaatgagctgaattttgtcccccttaaattcatatgttgaagttgtaacccccagtacctcagaatgtaactttatttggaaatagagtctttaaagaggtaatagtgttaaaatgggtcatcagggtgggctcttatccaatataactggtatctttataaaaagaggaagttaagatatggctacacaaagaaggaggctatgtgaagacacagggagaagatggccatctacaagccaaggagagaggcctcagaaaaaaccaaccctgtcaacaccttcatctcaggcttttagtctccagaactgtggaacaaatttcttttgtttaggccactcagtctgtggtactttcttatggcggtgctaccaaactaatacacacagaaagtgatggcaaatcttgaattaaaagttgagcctgctgaatctctatcgttggcccttggcatgacagtacccatctggtacagtcaattgccctccccaacacccactcccaaggatgacaatggcaatgatgagaatagttaacatatacattgtgcctagtatgtaccagaccttcctctaagtactttacatacattagctcacttaattctcttgacagcactgtgaagtaagtactgtactgttattatctcatttttacagatgaggaaaccgaagcacaagtgacttcgtaacttgcccaagggcatgcagatactaagtgctggagctgggctccaggagcctgcttcttctaccatcatactattctagtgggctatgtctaccagcaaaggtattttcttttttttttttttattatactttaagttctagggtacatgtgcacaacgtgcaggtttgttacatatgtatacatgtgccatgttggtgctgcacccattaactcatcatttacattaggtatatctcctaatgctatccctcccccagccccccaccccacaacaggccccagtgtatgatgtcccccttcctgtgtccaagtgttctcattgttcaattcccacctatgagtgagaacatgcgatgtttggttttttgtccttgcgatagtttgctgagaatgatggtttccagcttcatccatgtccttacaaaggacatgaactcatattttttatggctgcatagtattccatggtgtatatgtgccacattttcttaatccagtctatcccagcaaaggtattttcaaagttgagaggtattgggggcagttagaggctatcactgcgtttggtttcatatagccattagacatggatatgcttaatctgaaatagctcactggaagcataaaacatgagcagagggaaaccaggagcctgactaaggagtggggtgttcggatttagttgctccaaaatcttccaatgtgttaggatattagtgcagacgcattgaaacagattttaagcctccctcaagttcagcatcttctaaatcagactttgaaaatgaaagaaacaaactacttcagccaaaatgcttgcagtaagaaacctgggtttgaatactctctttactacttacttgctgagtgacttggggtttatggaatcagcctgaacctcagtttctcctcccaggagatgaggaaaataccacccatctcgtggatgagacataatgtatgaaaacactagcacagtgccaacacatagtaagtgatgaataaataaaccttttttttttttttttttttttgaaacagagtctcgctctgtcacccaggctggagtgtagtggcgcgatctcggctcactgcaagctccgcctcccgggttcacgccattctcctgtctcagcctccctagtagctgggactacaggcgcccacaaccacgcccggctattttttttttttttttgtatttttagtagaaacggggtttcaccgtgttagccaggatggtctcgatctcctgacctcgtgatccacctgcctcggcctcccaaagtgctgggattacaggtgtgagccaccacgcccggccagaaagctcttattagttaagcaaaatgaccaaacccaaacattccttcctgtatgaatcctcacccaatgcctcatcctaacttgtcggaattaattgctttttcctctggctttcggtgggagttgcttgcacttctacttgtcactccatttgtccgtgtattaatgacacgcctgtacatccatccatccatcattcattaaaattgtgctgagcattttccatgtcccagtgctgtgttagacactgggagttcagagatggatctgacatggttcctatcctcaaagggtttgggcttttgggggcaagccagggctgacgtgcccaaaggacacagacactaaagcaatagtaatacatctacgattttattgtatcatagcaatattttccatggaaaacccagcactttgttggatttctatttatttattttatgatttagtattatttttataaaataaggaagtcataatgttttcagatcgttttcaaattagcttctaaaggtcttaatctggttccacttggcaacagacacatctaaggaaccattacaaagaactgtgttaagtgctgggctagaaaaaccccagtgtttactcggggctgaagtaggagagccccactgccccactggaacgccccaagggaaggagccatccctaatgcttgcttcatagaccttcaagctggacagggcttaaatgccagctcctccagtgccctccacaaagggtcgtggaggtcaggggggaggtgcacttcaagtgggaggctctcgcccactccccctctagcctgcgccgtagaactcattttttgtttcatttgaggaaacagaacctcaggcggtagaggtgacttgcccaagatcacgcaaatggagtggaaaacatttaaatagctaacatctattgattcctttttatatgtaacgcacgggctgaggggctttacatgcgttttctcatttaatcctcctgataattccatgaagtaggtacccttattttcctcatttcacagatgagaaaattgaggtaaaataagagactttcacaaggtcatttagcaattaagtagccaagtccagatttgctctcaatagatggtggttgacgttggaataacagtctgatcctgaccctggacgcacatctggggcccgtggcacctggggcagggaggggcgctcggtcctgggctggggctgggggagcgaccggcacgggcgggccgggggtggagcctctggcgagctgttcacagcgggcttcccaggaggtgagaaagtcccgcccctagccgatggagggctgggattggttctccgggaccgattgacggctcagggcacgagcggggaccgcagcggcggaggtgagggcgccagcaggaagtgggagaagaggcgacccaaggcgggctggcgggctggcggcagtcgctacttgcctagtagcctcagccgctgtgggctcctggggagatggaggggccggggctgggctcgcaggtgagtgcggccgggcggtggctgtcctgggggccgggagagcggctgcagctgtggaggaaaggatggtgtgggtgagaggccgctcgatgagggggtttcgggagcggcggggcctaggtctgggaagcgggagcctggaaacaccacgaacgatgctggaaattgtctctgaggcgactgggaagaaaaggcgaggactgaggggtgagggcccgagccggcccctccagcctccatccctggccagggcgccccctggggccggtacccggagcccggcggggacctctgtgggcctggggaggggacgatggcccttcccgggagaggtgtcaggtgacacacctgattcggacccgcccgtcttgacgttggcccggagtcggagcggttctgttgatttctttttcagccctggcgtcttagcacccgccttcaccccacccagtccagttttcgctcctgtttccgcatccttgcttactccttgaaataattaaggctgcttgtttaggatggaggaaaggggcgtggagaggggaggtacaccacagcgatctgcagaatctcaaaggacaatattccgtggaggaggtgttatataaaagccagacggaggtccaaagaagccaggcgggccagtcggagaagttacaggaggtagatgttgtctccaagaaaacaagatttttgtgctttttgcttatggccctttcctagtgcctagagtactgactagtatattgtagacgttcacttaatatttattgaataaatgcagaatttccaggttcagccagttttagtgagtgcataacccatgtcagatgctttcatatgcattattttattccagaattgaagcatccttaagaagatattatccccatatacagatgagaacgaacactaaagctgtcttca

SEQ ID NO: 5254 - DNA, 6000 bp, Homo sapiens
cactatggttttttatttctctgggatagatttctaagagtgagattgctgggtcaaaggataatatagttcttttttctttctttcttttttaaagagatgccactagaatttgtttctaatttgtcaaatgaccttgagtactcacttttcctccctggacctggaactctgctttctcactgataaggcaggcatgtggaactatagatgaccttgaactccttttcatcttgtcatatacttctctgcttctgcgctagcacccactgccctgtgttttgctgcagtgaagtgagaatcatcattactgctgactcaggaacaagcgttctgcctgtctgagtcatggaattttggacctgcattttgcacagactgattatttagctgaaccattgatttccaagtatgagctcttctgaaatgctatgatgagggatgcttgctttgattaacttgtgtttccctgacacccctgggttcagatgagaactgaacagtgaggctgattatgaagctccaagcttctgtcctttctttatactgaaatttaccttcatataaacaaaaagtgcctcaggaaaaactcatagcagcttctgtatttgagcacttttcctggatgctcctaattttcatttagtaaaggtaaatacttgattattgggcgaccaaacactggatgaggagggaaaatgttgcacaatcattacgtattttgtaaggttttctattctgcataagtctacccatattaaaccttccgacccagggagagggatttgtcttatttgctaattttgagaggcttcaaacatatgtttcctttagactgaataatattgttaacaatagcttattgaaagtatgccgggtagccaatctcaatctaggcacttcgcatgcgttctttcgtttaatcctcaggccacccttgaggttaggttaatttttttttttttgagacggagtctcgctgtctcccaggctggagtgcaatggcgccatcttggctcactgcaacctccgcctcccaggttcaagctgttctcctgcctcagcctcctaagtagctgggactacaggtgcgtgccaccatattcagctaattttttgtatttttagtagagacggggtttcaccatgttagccaggatggtctcgatctcctgatctcatgatccgcctgtcttggcctcccaaagtgctaggattacaggcgtgagccactgcgccggccgaggtaggttaatttttattatgctcattttactgatggggaatttcccccaaggtcacagagctaggaagtggtgcagtgtgtctgcagagcccacattcttagcacagaacaacactgcaatggagctgggcagtagtagacaagtgggacaaaaatacggcatggcttcttgactatcggccatgtcacctgaaacccacactgagccctcacatccatcatctatggaagttgtaggtgttaacgactcccatgttaaaatcacataaacatagacataggcgctcatactctatccctcatgtggtggatggagaggagccaacacagacagggactcaaagctaggctctgccctctgaccctggacacgttccttcgcctgtcagtcgcactggcagctctttcttgcatgctgccctgaggaccagaggaggctggtgccacagtgccccgctaacgccagagcaatagcttgtaaaacaccggtatctttccctcctctctccttccttagtgcaaaggagggcagcgacttgaatgcggtaggccgccctctgggccctctcctgtctgggttgcagctggcgtttcgtgtcttggcagtaacactggcgtcaggactgtcaccggatggcctgtttttcagaaggctacccccatacaaccgagtggacacgagttttcaaaaatatttatttgcttatctgcaaggcaggagaggagggaacaaagtgatcgaggacaaaatcaattactatttttcatctttgacaaagtaattaaggccgtagtgactggctaattcagaccgaatggctgcgcggtgatggatgcggatttacggcctccttggctgcggcgcgctgggcctgattatcactataaacaggcgtccgcggagggcgggggcggaggcccgcgtctagaggacgtgcggctggtcttcttcttcttcttcttctttttttttgtttttgttttttaatactgcggttccatcctctgcgcttcgtaggcgctgacacacacccatacgcacgacctgctgccccagggcctggcttcctgcctccgcatgctctctcccgcccctgaagcccaaccttcaagccctgctgatgcccgcccctccgtcccagcgttggcctcatagcgaaccctcttaggcctctccgttccagaccctccctccattctccacgtagcccctcccttctagaatcttgcggctgaaagtgggggcaggcggggagcccgaatagcgcctcagccaaaccccgcagccgttcctgcgcgtcacccgcctctgcagagcctgacgcgcggcagtctccacgccggaacccaagtgctcactgggccggggagggccagcgggcgaaatatcaggcctgggggctgagcgggggcgctgggcgtcactcaggcccagggccgcagctgggggaagtgagaaggccggcaggattctgcccactctgcgcagttctcccttcctcccggggcagccaagtctgtgcgccctggaacgtccgggcgccgcgtagactctccattcgcacctggccctttgcgggggctgctcaaatgcaaattgggaaactggccagaaccttccaaagtcgtgactgtccctcggggaagtcggccggggaaccgcagagggaggcctacaccgatctttgggcccgcctcgtggtaccgctccggccgatcgctctctgagcccgagcctgcctgccaggcctgccttctacagttctcgcattcgtcttgagccctctcggaaactggggactgtttaggcagaaacactcgtaggtccccttggcgtcccccaagatgccaagagcctgcggggtgcttctcagcgccagccggaacttgagcaggcacccctgcggaattctcagtcccacccactcagacgaccctcctccagccagagtccaccacagcccaccctaccctcttaaccctcgttcccgacctctccctacgagcgggccccggggagagagcgactgaccctagcgacagcccggcgggaggtggttgggatcttctccagggttcaaaagcgactttctgagccccaatttcctcagctttgcaattggtatagtttctgaaaggccattgctaaatctaaccgagataattcatggatatcccttgcacaatggttgagtattgagatctcaatagacgttagctcaaaactgcaataaaaagcgacctgaaatcctcaaggcgtctcaaaagaaagatctcctcctcctgcccccaccaaaggcaatgcagaccgtgtgtccccagccagctgccctttagaggggctaggcgggaaagccaaccagcggaggcatccaaacactctcgggctctccagaggagcaggagggtgccccttagtgcccccggcgcccgccgcaatctgccactgcagcctacgcctgcggccgcggccgccgcggcattgtcctcccgccgcgtgggacggcccagccgctggcgacggcgcgcaccccgaggcagtgggctgggctgttggcagtagggaagggaaaacgtgctgtctgtggctcctcatccccgaggccaggggttccccgagctagaccggcaaggaaggagagaagggaagcattttgctgataatccccttctagtctccaaactacaccttctttgtaaaggcgttttttcctcttctgattatagctattgcattgtacacacaacaagaaagtccatctttttatcgccatggccacccccactcccatccccgccacagtacggttgaacatcctggcatggctttgcagattgccagctctcattccccctcccccgcattgctgggcatcccgatttggacggtctctaaggtcccgcgctgccaaatcaggcctggctcttgtaggattttattgaaaggactgtaaagaaagaatgggtttcccttgactttgaaagtgacctaagaactaggtctgtgttggaaaaacttcgtttttctttctctaaaacgtcttcagaaaagcttaaaaatacaatgaaaaaggtcagttatactcagaattttctcttgattgtgataacagaaataggaacggaaataccagatcacaatttttaagcaaaaaccccaggattcctccaagactgactgtctggaagggtagggatgtgagaatctgaagtccacatacatgctaggtaggtacaccttgataaatgcaggacccatgcctgcttcagtcatcgcagagctgtggggctatgcgcagaccctcaacctctttcggagtaatattttcggaatccctgaagataaggggggacagcaatggaatctagtgaaagggaaagaatagacagtgatttaaccccctccttcctcctctacagcccgatccactctgttggcggctgcgccttgccttgggtgcagtgggacgtgtccctcccatgtttcccttaattaggaggaggcaaacttctgtcttcccctcctgccggtttcggtttagtaatcagaccacatgagtcacgccaaacacgcagccccctcccgctggagtgacaactggccagcatactctaggctgttgtccctttaaaacttgaatccaagggggtaatgatttatcaaacttgtattatcaagaaaatgtcaaaccaagggcaccttgctttgcactgacgcaaacccggcctttcccaaggagatatagaaagcgcctctcctgcctgagccaaacccagtcttgtcaatagcgggtttcaccctccaccagttcagtctgttgcctgtgtcagacatggtgagtgtttgcttttgttctttcaagaggaaagggggctgaggggacagggaaagcagattcgttttggctatttcttttggagatgtctgtgcattgggtggggggaaagggggcgacgaggagaacaattctcgcagccctaggtatttgtacttgtgagcgtcacctgaggtcgcaaagaggtttcctaggctgtagagctgagaggttggctgtggctcctaaagacccgatcccgggcactgtcctcggtgctgaaaagccagatgccggtacagaggcgagttgctctgggtcctagaggctactgagacaaatgctggctgaagccgaggtacctagatttgtgcaaatcgaggagttctattctgcgtgtttgtgaaagggggttagacgagaggagtgcggtggaggcgaagataataggattattcttacagtgtaataataattattggtgctaatgtttaggaagccgtgaaagataacacgaggggagaaagtggatagaaaaaccaccgctggcagttcttttcatttgaaagtgaattgggaaaaagcgaataaaaattagtcatgagttttggtactcaagcaagcttagagttgtgaaggatattagactcctgtgaatagttacgcaaaaaagaagaagaggaagaagaagaagaagaagaagaagaagaagaagaagaagaagaagaagaagaagaagaagaagaagaagaagaagacctaaacaaaagaacaaaaagctttgcatattcttttccatgtctgggaatctggaagtgaatacgagttgtgtaagataacaaatctagttactactctgtgtcttaaatttagtttattatcgttgtaggtttttttgtggttattttgatcgtgattcttaaccttgtctttgctacc

SEQ ID NO: 5255 - DNA, 6000 bp, Homo sapiens
caaaacctcagccttcatggagtttatatgctaacacatatgcataaacaaacacatataaaaatccagaaagtctttactgctgtgaagacaaacaacacagagtaagcagatactgatgttgggttgttgccttagggtggtcagcaaagttgtttccagggaagtgacatttgcatgaaaaactgaataatgtaagacagttaaccatcaaacatctgtatgaagatctttaggaggagtaggggaacagcaagtgcaaaagccctgtgatgggaaagtgcttgttatgtctgaagaacagcagtatgacaccatggctggagggtagttggggagggagagagacgtgggaaataataatggagacttagttagggccacatcatgtaaatagaacttttgcaattctatagacaagaactatgttttgatttttccctaagtccacaaaatagtttgtgatagaaagccatcgatagattgaaaacgggagtattatttgtaacctcagttgctgttccatgcaggcgtaggagagaataatgcttccttgctccatatctattgctgaacagttctccatgatctctgtagtctgaggacaaatgacagttttctggttacaagacagaggggatatgccaccctaggcattgagattgggaaatatcaagcatgcatgtgactgccaagtattaaaccccattttctgatgaccagtagggttccaggtatcagcacataaagtgagctttttccgagaagaatgaaagatggcaggcagaaatgaacaagctagtaaagaggactgaggcttattgttaaggtctggggcctaaaaatgtcaggattcaaagtgatcaatttggaaaataaagagatttggaccctcctctgaaaccagggagtagtgaatatgtagagtcagaaagtaactgcaaattccagagaaactgtggaagcagcattttgtaggagtgtgggggaaacaacaccctcaactactattcctaccttctggtaaatctattactttaaatttacctctgccagccaataaaactttttcatgttttggtacattttaattgtttccaaagtcctttcatgcataggatttatttgacttttacaacaacctgagaaatggctggaacaagttaagaaacttcacatccagagaagggagctggggatcaaagaagccaagtcatctgtccataatcactgtgctgcccaccttattaaggggtaaggatttaatgtgtgtcttttcactcctgcacaatgctccatgtattagagtatggcattttatgtgaactgcagagatattcaaaatacatggaataaatgaaatttttaggtgttaagaaaaccattgcatgataagaagtccgaaaggatggaacttccaggagtcaaagttttgatatgtgaagaaataaaaaaaagcaaactaatctaggccacagatgggaggtaccacatccttgctttaaatactagaaggaaaatatattcattaggtggcttcctgaggcctttactagtcttcggagtctagcttgtaaacttatgctctttaatctgattaagttcagtgattcaatcagcctgctagaataataaaaacttcacatgcaggggttgctcaagagtgtacatttaactttcatacagcttaggctctttttttcacatactgtacacttacattcctgagatgcctttcctacagggaattcacacttttactgattagcaggcatacaaatactgtcaggtgccagttgatagtttagtttccaaaatatcaccatttatatctttataactatgtttacatgatcgtttaaaaactttggcatactactcaggataagatataaaaggcaaataagaaaaagtgttaccagatgcttgtaataatttaaacaaaggctgaaatcatttggatggttaaaaaaagacaacttttgggctatattcaatacttaactgaatgttcaattacattaaaggaacacatataaattactcagaacgtaattctggaaatgtatggttaaagattgtatctaacgaggcagagtatagtgatggaggagaaaatgggcatatcctaaaagtataaatgtataagcaatataaaatatgtcaatgatatgaatatagagaatatttctctcaagatctaaagagttatggtcacaacccagacctttattagaaggacacagctggttttcaactcttgctaacaaagtttaaagcatgttgataacaatctaagcaaattcagcctgaaaatgtttcatttagtatggagcaaaatcatcaacatataatgtcttctcatacacatcatttcaaatacagaacagaataaaaaaacatgaaacaaggaattatataaaatactagaaaaataattttattttctttattttaacttcatctatataaagcaaagattctccccagctcttaactcacaatgtccacagcatctagaaaaatacctgatttcaggaaaaatattagaaaacattcatattgtagaaattttcttagaagcccaaacaaggattaataatcaagagatgataaccaaacacttctatcacaattagtcattataatttaatgtgtaaatctatgcttatgtatagtcacctttcaaacacaattccaaattacatcaagtagggaattgcctacctatagtcttaaatcacttgactagagctcatgtattcgtagacatataggcaggaaagtaaggtataggggcaaaactgatttccagttccgtggttaatcataacctttaccaaaccacttctctctaggcctgtttccttatctgcaaaaggtgattctcagttctgaaatatcaatagaatggtgggtggggaggggaatgcagtagcagaaaaatgaagaaaggtcaagacttctttggtcacctcatcctaactttcaaatcaccccatccttatcctaaactcagagtcactgatatggttcgctgcgtggcatgcccagggaattgtaataattctcaccctgaattgtaataatccccacgtgtcaagagcagggccaggtggagataataatgggggtggtttcccccatgctattctagtgatagtgaataagtttcaggagatctgatggttttataaatcggagttcccctgcacaagctcttgccctccccccatgtaagacgcacctttgcttttcctttgccttctgccatgattgtgaggcctccccagccatgtggaactgggagtccattaaacctctttcatttataaattacccagtctcaagtatgtctttattagcagcataagaacagactaatacagtcactccctcctcatcactcaaggctctcagctgagacctctacctcactgttagttcatcatcagtcttatttccccgccattagacagtgaatctagtctctcaattattgtgtagttggcagttgatcgggtctcaaaaacacagaaccaatgcagaggggcctgtgaggagtagaacgacccattctgcttgaggttaaagttctggttggggtgggcaggaagtggaggggggaaacaaagtaaccctttgaaatggagtagggatcaatgtaatatgagttaattttcttttcttttttttttctcttcttccttcctccctcttctttttttcttttctttactttcttttgagacagggtcttgctctccatcacttaggctggagtgcagcgggatgattgtggctctatgtagtctcaatcttctgggctcaagcgatcttcccacctcagcctcccgagtagctgggaccacaggtgcctgccaccatgactggctattttccaattttttgtagagacaggggtatccctatgttgcccaggctagtcttgaactcctgagctttcaagcgatatcgtccagctgagatgatgacaggcgtcatcccagctggactataatatgggttaatcttaatagcagctaaatgtttaacacattctgtggcaaggactgtgcaccgtgcttctctcaacagcctaggaggtgggtactattatcattctcctttaaatatgtggaaactgaaacttagagaaacttgccccacactatccaactcttaaggggcagaggctgacttggaactcaggccacaagggatgaccttcccccacctgtagagggcagagatcctgctgggaacccaggaagcaggcagggccaggagaaaagtcaatactcccgctccagacgctatggggaaggggctgctggcaccttggagtctcgggccatgagccggccttaaaagggaggggttcctttaagggagagggacttttccccacgagaccaaaagtaactcccaactgggagaggggttctctccgagtggcacgcatgagcggatcgatgaagacccggccaaccggctgagggagcatcgggaccccctttggggatcggaggaggaggattccgacaggagggaagcggcagccctggggaaccaggattcctggtcgtgggtggacccagtggaaaaggacgtgcgaagcctgtacagaatggagcaggccggccaacagggccggggggcggcgggtcccgaggagggacgggaggctgcatgtccggaggaggtgcgggaggcggcagagcagggacctggggacggcttgagcggagaggagggggccagcgtggagccagccgggccggggggcggggagatggcggtctccgagggtggggcgccggccggtcttgcggtctggaggcggggaaagaggcgtggaaacagggacgcagcgaaggggaaaggaaagctgccagagggcaggagtggaaaggatcctggcgagcaccgggaggagtggcggctgcgggatcagctgccgagcaggcacagggacaggtgcctggagaagtactgggagagcgcccaggagcgctaccggctgagggtggggaagcgcagggccaagcgcgcgaagcaggttgtgggggaccgggtcgagtggaagtacccgccggagaggaaggccggctggctgtggcgcccagagacggtggagtccgaggaggaggagaaggaggcctgcagaaggaagagcaggcccttagaagtccagcagcagcaactccggcggcccacagtcagattcagcacctgcctcagatctccacgtctgtctcagctgcccctctcctgctgcctctcaggcaccagtgccattaacgagctggcgaagatgggcgacccggatctcctggaagtgttggcggaggaaggtaggaccgcgccaagaggcgtcaagggagagccaggctggctgcctgcacccctccacccgcggcgcagaggccccgggggacgttggcggccctgcggcctgagtcctagggaggttcgctgcgtggcgtgctcagcgcgaaaccgggactgcggggcagagtcccccgcctggggtgagtggggttggtttcggcgccccacagatttctctgctgctcctgcgcgccagggacctgcgacctgtgacccctatggttccggaacaccctccttgctcccctgcaggcctgggaaccgccgagtaattcagggctgctaggctagcgctgcagtgcttgggtctccgaacccagccaatggaaacgaaggctttcccaaaaaaagcagcagtatagagtgcaagacagctatcccacgtgtaaggagctggtccttgagtcttattacctcactctctctgcccgttacttatcatgctttgagatgcttgttaattgtaggagtagcagatcctaaaatctatcagtttgagatactgagagccataggcacttggaaaagctgctgctgctgctgctgctgttgcttttcaacagctttcattaagccctttagttccgttgagaaatatttatccat

SEQ ID NO: 5256 - DNA, 6000 bp, Homo sapiens
tctatgcacgtacttttttgccaaaaggatcaatattttttgcagtctgcttttatcaacgaataatgtattagaatcatttttctcagtaaataaatattcatgcacactcaacgtttgaatgattgcttagcattgtgttgttactcttataaccggcctggtcatgttcaaatagagaccacactgttcactcaattagtcaccctaacttctgggggtcaagtatatattatctctggaaagtaaatatataactacaaaggttacctccatttccatctttctacaaacacctaaacaaccaaaaatacacaggcctagaccagtcaggcagaggccaagctatcagaagagacattagcaacaagtaactagtacaatcacacccaggatacttgctgagtatcagctttgatcaaaagcatggcaattcaccaaaataaggtaaagttgttgatattaccagagtatcagtttaagagcttataaagttgggcagagcctggctaataaatcaacaattattacattcttatgttgtcaaaccagtacagcaagatgagtctttatgaaattatctgcctagaagaaataaagtcatgaagctatgcaaatctacagacttgtacgtaaatttcaaagtgcaattagcacactgaaatttgtttgaatgtcttattactagattactttcacaaataataaagagtagttgaggattatggaaagccattcattcagcaaatatttatttgctcagcttttatgtgtcaatcatcttttcggcaccatgacaaatagaaaagtgagtcaacctgaagtctattttaaaggatttcttcttgactggtagaaaagtatgcgcctactttcaaaagcatacatgtataatgcatggtagaaacattatgaaaatgccattaagtgatgttattcatgctcgatggaaattggagaaggctaaatctacatctaactggctttgtactcagtagatgtagatgtggataaaatatatcttcatacaagaaatgtcattgctccctgaaggagttttaggacaatcattcccagtggagaaaacagcagcagcagcagcaaaagcagaccaataaggaagaaagcaatataggattaaaagagtttgtaaaagggtctttgaaacaatattggaaagtgctgcaagaaaatatggagccccttgaatggtaaagcagtgaacatggacttgatgatttttgtttaaataaattaaattgtctatttttaataacattattgaagtatgattgatatacaaagaactgcacatacttaatgtacgatgagtttgaacatatgcaaacacctgtcatgcaatcactacaatcaaggcaacaaacatatccacaggatgtatgggacaaggtagctgatgacagattaaacaacatggatttaatcctataggcaacttgaaataattattcagattttcagcagggttctaagatatgaactgctgtttaacccatcatcacctcctttgtcccacacatctcccttctcttgatgctgtcttcttacacaaatcattttgtgttcctgtctcttcaaaatgccatgtgctccaagcacttgagaattaatttttttaaaattctgttttgtaagacttcttaaggctggactcagagaaggttgaggctgctgattttcctccatgactttatcttagacacacccatcagtagtactacttctgaatgctactcggagcatatagcctggatatcatcaggatgaatctacttaattctgctgttatactgtcacatgtggccagaaaccataggcttttagggagaaaattgttaaatttcactccatttttccttttatgatagtatatgacttttttacagagctggtttttgtctttaatatacggagagaaactagaagcaggaaagtactgcttttccatttctgttaccatttaggcaatgagaagtatcattcacaattccaattttaattaaggcagtgattcatgacccaaagaggcagaaacaggactctctcagtccctttgacagagcacaatacagagaaactcacaactggctgagctgagggacctatttcgaaattcaaaggaataaaaagtctcccagtgatgtaaacatcagagtttcttacctctctggggagcaaatgttagcaggggggctgcaaagttaattacttaaggaggacaggagacaggttgtgagttgtggggagcaagagcagcagaaacatgaaggggaacgaaaccctaggtccaaagagaaaaaagagaaaaattgaagttgtagcaagacaggtatatgggtaggggggttgaagatctatgcatgtaataaggataaaatcaacacatatcattgataaagtatgaaaatgataaaaatatatgaaagtataaaaaatattaccctttactcaacttgcaagcatgattactccagacattttcgcatgtttatttctaggctttttttttctactttggaaaacagagtcaagactgtactgtgtattatacattaatcatgccccctcactaaacattatataaaatacacattttgcatgtcattaaaatttggagaaaaatgtttgaagctaaaaatagtaggaaaaagcaacccaacatagttcatagttagcttagctttccttaatgaggctacttgctatccattcttaaactgtccacaatggaaatgtcagtccatcaaaatgcttccttttaccccaacacagaatttttattttgagttaaaaaagagggcttttgctcaaactcttctttctacacttccaaaacgtactttctttctttacacacacacacacacacacacacacacacacagagagagagagagagagaggaatctttttctctttgcactgcctttctataaagcagatggtgcttcaaatttcctcggcccctcacaaagctgttcctctagcaacctcccctaaaagactgattttaaaacaagcaaagatgttctttgaatcccctgctagtcaatctggcagtccaacctaaaatgtttctaattttaagaaaagtaattaactttatgacaagatagtttaatcatagctgcaccaaggaggttagggtgcaagggtgttagaaataataacaaacattctttccttggaaaaaaatccaatgaggttcaaaatctcaactcatttctagttctggcagatacatatttgcctcctgctgggttttggatcagggagtaggttggagaaaatcagggatcaacagaaaaagatcttaggaaggtaaaggtgatacctgtgcctagaaatgtggaatagagggacttaaattttttttttttttttttgagacggagtctcgctctgtttcccaggctggagtgcggtggtgcgatctaggctcaccgcaagctccgcctcccgggttcaagccattctcctgcctcagcctcctgagtagctgggactacaggcgcccgccaccgcccggcgaggggactttaattcttttaactagtcctgctgaccagggattgaattaaagtttaaatttcaaaaatatttctgattctaaaaccggtgatttaaaagggggttttaaacatttaaatgagatctacaggggtcataactgactagtaagtattgggtgttagttttctgccattcttaaattcattgtctaatcctcacgtaggagaattgggttgcattagaatcaatgagttggttcacatcagaatgatctgtaagctgagttctatcagaattttaactctggatgaacaaaatttaaaaaaaacatcctcgagcaagtcatttattcttctcggtttcaatgccctcatctatacaatatctgtattaaaagcccttacggagacagtctctgaactgtgttttagatcttcatttggaggtgaactcacactgagttcattgtctgtaaccaagtatttcttcaatgcctgcatactgagctcttattgaatgctcagcatttctttctggaaagaccattatgatacattaaagaaggtagcacattgtttgctcttcctcccactgagagtagaatccaatttcgctttttgcttcagatgactttaagaccagttactgaacaatcaagagagactctgagagataactgcctgtctgaatctagcccacctgcaaaatccataagtaataataataaattttagtttacagcttagtttcagggtagtttgttatgcatccataaataattggagcatctgtttgttcaaagctatattcccctcattcttttgtatcatgcaccacagatgaatcaaacagcatacaataataactcaatatttttgaggtatcgaaagtttggaaatttctgcatattttttatctgcttttatttggattattcacctgattctgagttgattccataaaacttcaaaactgaggaagcaacggactctcacgatgtgtctgttcaataacatcttacatcttccaggaagaacttagggctttgaatcagggagcagagatagatggaggaaaggagatcctactgaaaaatgtgttcagctagcttctggtcctattttggccactgcagtttggtctttcaaaagttacttcaaagtgggagctgaatgatgagaacacacggacacaatgggggaacaacacacactggggcctgttggagggggagggagagcattaggaacaatagctaatggctgctgggctcaatacccgggtgatggggtgatctgtgcagcaaaccaccatggcatacgtttacctatgtaacaaacctgcgcatcctgcacatgtaccacgaacttaaaatacatggtgaagatataaataaataataaaataaaacttctcaaactaaacaaaaagagttacttcacttctttgggtatcgggtgccttctctttcaaataaggtgttgatttatgtggtcttgagaaatctttgttgctctgatcttaagtttctttttataatattagaatcatagtttacctacattacagggcttttatgaagattaaatcgagcatcgtgggtagtgttttttcagcccctgtgactaagtaggttataaatggtcctcagtcatcatcatcataaatgattcaaggcctgaatggcagaagaagaagaggaaaactcaagtgaaaagtgctagacatagaacacagcttacctaataaaacatgctactggctaactaagctggggtggctttctgccccctctacttaaatttaagaaagaaaaacagaaacgtctctgcatctgccactgcataccctctcagagcacagaccaactttgcccttccttaaaagtcccagggtttacctaccaacttttaggaaataaataaccagcctcaaagcttggcaaagagggcatcagtatcagctctagaggtttgctccgatttatatctcctcctccagtaaagtcttctgctcccactcccagccaaccccgctcaacgcccacccctcactgtggcactggacgcgcgggggatgcggggttgttcccagagtagccgctaaggggagccggacgctagaccgccctcccgcgttcccatgacaacgacaccggcgggcgcgtagcctggagagcgaagtgccggctacagcaggtgtcggattgcagtgcgctcgctgaggctccggaccttggagcgtctagagtctggctactgttcctccgcctccctctcgggcagctccctaagccggctgggacgcgcagagtgaaaatggtccaccattcaggctccattcagtcctttaaacagcaaaaaggtcagttggaatcttgctcccctctccctgcgggcgtcacttcccccctgcatgcccttgcagttgtgtaggagcatcctttgcaggcttatgcgacacaga

SEQ ID NO: 5257 - DNA, 6000 bp, Homo sapiens
ctttacttgtaaagtgctagaacaagtgactacttttttgttttgttttttgagatagagtcttgccctgtcacccaggctggagtgcagtggcgcaatcttggttcactgcaacctctgcctcccaggttcaagtgattctccttcctcagcctcctgagtagctgggattacaggcacccgccaccatgcccggctaatttttgtatttttagtagaaacagggtttcaccatgttggccaggctggtctcgaactcctgaccttgggtgatccgtctgccttggcctcccaaagtgctggaattacaagcatgagccaccgtgcctggccagtgactacatcttttatctcataaaatagaacagcatttcccaaactcggcattattgatgttttggtctgaataattgtgtgttgttttgtgcattgtaagatgtttagaagcatctttggcctctacaaactggatgcaattaacatcttcccctcaagttgtgacaactaaatacttctagacattgctagtgatttggtgcttaggagacctttaaatcaagtgtccccgagggacaaaatcaccacaggttgggaaccactgaaatagaaacatgatgttaagacaacatacaattcatataagtaactatatgaaagattttagtacctgtggccaaggtgtttttgcttttaaaacatttttatttttaggctgggcgcagtggctcaggcctgtaatcccagctctttgggaggccaaggcaggtgggttgcctgaactcaggaatttgaggccagcctggccaacatggtgaaatcctgtctctaccaaaaatacaaaaattagtcgggcatgatggcatgcacctgtaatcccagctactcgggaggctgaggcaggagaaccacttgaacccaggaggtagagattgcaatgagctgagatcttgccactgcactccagcctgggcgacagaatgatactccatctcaaaaaaataaataaataaaataaaataaaaataaaatttttattttttagatgctgggttttactctgttgtccacgctggagtgtagtgacatgatattgcatcctcgaactactgggctcaactaatgctctcatttcagcctcccgagtagctgggatttcaagcacataccactgtgtttacttttacattgagtaaagtgtgtagcttctaagagtgttcaataacaaacaacagtatttcgtgaaatctgaaataactattctgaacatattgtacctctacaaaacatgaagtcctgtttctaagcataatattacacgcaagaaaaggtggacataggaaaatataagcggaaaaggatgttatctcagctgatgaccaaaatgtaagaattcagagacagtatggaccaatagtaataataatattaaaaccgtactgatatgttaatacagtaggcaatacttagtgacaaaatagttgtgccaggcatgctattgcttatgaggatccagagatggaaaaacaaaacgactgctctttttctttgaaaagcttagagtttagtggtggttcatggacacatagacaatcattgattgaattacaataaaaaagactgtactggaaaaattatgatagaaatgtctactcctgacttgtagtaaaatgatggaaaaacaaatttaagaaactttaagagccttagctatgtgaacagtgtagttcacactttggtcaggtttctgtcaacctgaaacaaagaggcagttcatataattcagatgaagattcctctcttttgctacaaataagcattagcttattgggtgactcaagttcaagcagttgaattattttgctaaaatgatcaggataaatagtttaattattcactttgtggaaacttcaaagtgctgtggtctaatgaattgaacaagcaaatgtcagcttgaaagatttgttattgaaatatattattttgcatattgttgtatttgctttatgttaatatatttaatattggcatatattaaagtataccaaggtttttaaatttataaaccatttataaacatattctgctcctccagtgtgttttctgggaaccctttatttcttcaatgatgcaatgactgcaagttactgcatagctctgtactagaaaaaagggtttaaaaaatgagtatttaaaattcacataaacatagcttcagtcaagtaggaaatacacaaatttgaatgactgagaccttggcattgatctgggcaggaagtgagctttaggacacagctttgccttaaatttattggtctttctggacttgctgacctgaacagacaaacgcagaatgtcagaacaccaatgaaatgggattgggatgatataggaagtgaaagcgtgacagcttcatatattcaccaaatatttctggctcatctgcttcctacccggcatctgatagaataccatctcttgactcccttatagttggatagggtcatgtgactctttttggccaatgaatttaagcagatgtgatgcatatctacttgtctaaagcatttaattgactgagatattcctgagttctcttgtggtacagtgatcagcaacacttgagatatggcatcagcatgaatctactgagtgactactacgaacagggccctctgttgaactgtgatggatgtgtaccatttgcagttgttttttgttttttgagacagtctcactctgttgcttaggctggaatgcagtggcacaatcttggctcactgcagcctctgcctcccgggttctcgtgcctcaacctcctgagcagctgtaattacaggcatgcgccaccacacccagcaaatttttttgtatttttagtagagacaggatttgccatattggccaggctggtctcgaactcctgacctcaagtgatctgccagccttggcttcccaaagtgttggaattacaggcatgagccccttcacctggcccctttgtagttttaaaccagggattggcaaacactttttttgtaaaagaagagatagtattctaggttttgcacaccctactgtctgttgcacacccaagtactcaactctgctgtgctatggcagagaggcagtcatagaatggatgtgcatagatggattggatgtctcccaataaaactttagacattggtcaattccgaggaacaaaacagtgatttctgaaactttaatgtacacacaaatctcctgaagatcttgttaaaatgtagattcagttaagtctgctatgcagtccaagatagtagtgatagtggtagtgagagaggttgggctgaataaactttgagttgcaaggagctaaaggattatcatctccgtttctagcctctaggcctggcataattgctcagcgtagtgctaaggatggtttaggtgactaaattttgaaactatgactccccatctaatgcagcaaaagccaaagtccttaccgtggtctttcaggccctacaagaccagccccctttaatatgtttgacctcatctcctactctctgctcttgccactatggtttccgtgctgttccttgaacccaaaaagcacactccgtctcagatcttagtacttggtgtttcctctacctggaaaattcctcctccaaggtagctgcttagccttcttcctcacttccttcagtactagctcaaatgtcagtaaggctttccctgaccaccgttttttcttttctctaccatttcactatctgacatgtatttacttgtcttccccttacttagattgtaagctccatgtaaatatgttttgttcataatccctagcacttaagagttcccagcacacagtaaggtgcttaataaatatttgaatgaatatataacagactttgcagctaaccaggatatcttgaggtcggaggctgctgttgtttctccaggctccctcaggatgcactgttgccagtcagcgttactcattttattccctagggaacagtgggtttggtagaactctcttctaaatctctttttcatagaatttaaattataaattggtcatttactgttgtcacacaatattgcgttgctgaattttccactgattatattcattttatttcctcccagaacttggtttcttgtttttctgctcactgtccacacccactccaccccaaggctggaataattctcttggagcaaaaaaatcatctttttctttgtatttcattgaacgttctctttacagtgttaggtaaacctaaaaaaaaaggaaacaaaagtctaataattcgtaatactcaggcctactggatgtataacatcatagggtagctgaagactctttgtgaggccagagctttaggatttaaaaagccaccaaccatgaccgtgtccgacacgttctacagagaactcctaggttactgggtgattgtttggtggggaagcggcgagttgtctttttttcaaaagacgttttggggtatggagtttgctcgctctgcatacagaaggaattctagaagctgggatcgcaccacccaccccacgcaccccttacttgcagaaacctttgccccccaacccccacccccaccccaaataagggctcttcaaggggcagttgccagctccagagccagctgcttgacacctattgtccccgtttgggcgtcaaacgatttcgcctgaaggaccctagcgtcgattgctctcaaaactcaaggggcctttccttcggccttgccggggccatccccacctgcgtccaggaggcgccccacagcgccggggccgggggacggcggagaagctagcgggcggcctcttccgggcaggcgttcgcgccgggcagcccgagcggccgcgaaggcccccgctctccgcttctcccgcccctcgcgacccagagggctgctggctggctaagtccctcccgctcccggctctcgcctcactaggagcggctctcggtgcagcgggacagggcgaagcggcctgcgcccacggagcgcgcgacactgcccggaagggaccaccacccttgccccctcagctgcccactcgtgatttccagcggcctccgcgcgcgcacggtgagcgccacccgggaccgagccgctgcaggggaagagggccgctgcgcccgggtgtcctttatctccggacccgctggagcttccgaggggcttgcccccaagtccccccaccccaccccggtcatttcccatgcccttctctgcccccaagccccgacctctctctttcctcccttctccggaagccggcaaaagccggccctccccggtagggaccgttgcagtggccgttggcggccggcgcggcgatgccccgcctccggcgcgagcctcggagcccccgggctggtaggccgagccggcggctccgcgggggaggggcgggtcggggggcggtgcgaggcccagccgggcgccccgctggcgggtcgcgcgcgcgcccgcgcactcttcctgccctcgaggcgcgccgcgccccctcccccacccgctcgcgtaggctaccgctcgctgcgcgttttgtcccgcgtctcgccccgtccgtctcctgactggccgctcttgtccttcctcccgctttttcttctctctccttgcggtctgaagatgccctcggccaccagccacagcgggagcggcagcaagtcgtccggaccgccaccgccgtcgggttcctccgggagtgaggcggccgcgggagccggggccgccgcgccggcttctcagcaccccgcaaccggcaccggcgctgtccagaccgaggccatgaagcagattctcggggtgatcgacaagaaacttcggaacctggagaagaaaaaggtgccaggagttggcggggaagggaggggtggctgcggccgggctctgcggcccctccgaccctggtcgctggagccttcgcttcttttcgtctcgggagcgttactaggtcccctcctcc

SEQ ID NO: 5258 - DNA, 6000 bp, Homo sapiens
catttctaagtttgttatcatccaagtctaggaattgtcctatctgcatactattttaacctccaaaggtctgcgtaaaacccattttgtggctaacatggatctatctaaaaaatccagttgcatctctccccttgggacttccagggtgcagcagccacaccaatttctttatttaccataatttgaaagccttattaatcctaaaggctcagctctataatcacatttggttagcttgagactaatccttagaggttatttatttttcatgaagattgcttcccagctactggtttatttagactttactaataattatttcgcaagagcttttttcaccactgctcatttatatgtgtagaattcacactgtgaatatgaactaaggatgaatttttttaagagttaaggtttaactggaatgtcattttttctttactgtgccagatcattccttttctgggaagctgtcccgtgaaataattaaatattgtccctttaaaagagtctgtgacctgctgcatttgtaatccttgaattccatgattcagcccaagatctcccagctttccatttcacactcctgctcacatttggtttagatttggcttttctttgctcgagaggaacaggatttattactaccagtcagaagccatcagtccccaatatttcagcaaagaaccctagtctgccagagtgagtaatgctctgtttgcactcaagtctccctgaaccagtcaccccaaataggatgtcactgcttgcatttatttagaaactgtcaagttgtctatgtgtttcctcccaccagttcatgtgattcctgaaacacccctatgcgctttgatgggagggaaaaaaaataacagtccctcatacatttatgtaatgcttatttatggagcacagtgtatatgttagggactgagagctgagtatgtgctggcaccccagaaggacatgtccctgttctcaggtagcttagaggtcattgagtcccaccatgaggcaggcacaccaggaaatggtcttgatgtcttctttcactgactactcataataaactatgggaaaggtctgattacccttgttttgtggctgggattaccgaaactcccagaggttaagtcatcctctgataagggggaaagccaatgctcagacctggactttctcggtccaaggctgctgattgaattctggattcttcccaaatagtgtaatctcgtgtcaactcaaatcaattcaagtttcctttccagtttcccacatcccatggtttggcttagaaagaaagatggtgcaacacacaacagatatcaagcatctaagagtttgggaagggtttgtgtgaccagtggtgtgggcagggtgtctttagaatggaaagtggatgagaggggagctcaaagaggtgatccaggaattcccaaaggtggaccttgactcagtaagtcaccaggtctgttatttgaaatgagtcatttgtggtatgggggcaaatgacctcagtccctcaccaaactatcgggaagcaagcaaacaaaataatccccgcttctggggagaataatcctaattacagcccctagaatttgcatgcccttctacagtttgcaaagcactttcacacctatattttccttggtggaattgtttactgcactaatggagaagggaccaggacttgatatggcctagtttgttggtttttatatattttttaagaataatcatctgtcaaaatgtaatttcatgcaatagtctggtatataaaactgatgcaagtggaacttctgtggttgggatggggcctggggagggagaggcacagcttactcctcagcttttactctgaccactaggtctgcttctgaggggtctctaaggaacctccaggttccatgaaacacagtaagacagacattgttcctagtgactccccacgtcacttcactttcttgctccaagaaaaggaagctgaaatccctggaggttgcatgaggtgaaaaaagctgctccttgtcctgtattcttgtgcatggaacctaccagggctggtttcctcacatgagtagggactgaagccttatctgggagccagtttgcccccagttgtttcaagaaataaagtgtcctcttggtcacagacagcagcagtaacaactttttcctgcggactggcagcattttccaagcacctgctcttcaggtgggagttacgggtcactgtcttcattccagacgggcggctctttgagtcatggcatgccagcttctgagtggctgaggactagatccagacaaggatttttcagtcccaaacactcttcctgaaaatgcaagaggagtagtctttagtcaaacagaatctccacaactgaaaaatttataccggactagacagtggtagtggttgcacaatattgttaaagtactacacgtcactgctataaacacttttaaatgggtgaaatggtaaattttatgttatgcatattttaacataacaatgataataattttaactaagtacgttgcctccttatttcctacagggtcaagttcaaactccctggcatagcttacaccttgtagtccccatacctgtaacctcatgtctgctatcttcccccagccccttcatctgatctatgttcagatcagctcacattgctctctattctctggacaagccatgttctttcacttttctatgctcaaacacaattttgcttttagtaatgatagcaaacacttatttaaagtgcttactgcatgcatatgtagacataaatctacggcttaatacatgcagggcttttgagtcatttaatcctcaccaattctatgaagtaatagaattgtaatagtaataatagatactattattaagcccattttatacttgagcaaattgagctaattgccttaggcaaggtcacacaactaagaagcagccataatagggtttggatctaggtgttctagctcctgaatccatgctgttcgtcactacactgtactgcctgtggatgacttacttgtccctgtagtttcatctgaagaattcctcctccttttcctttgaggcctgcctcaaatatcacttcccctgtgaagactgcctggtgttctccaggagagagtgtgactcccttctctaggaatggtagcaccccaaacacacacattttgcagcatatttcaccttgcatggtaatggcctgcttgtgagttttattccgtaccagagggtgagggctctgaagatagcgccaggtcttatttacctcgataccccacaacactcattacatgtctgatgaatgaatgcatagggggatggctgggtgcatttctctcaacttttcaatttcttgaaataaataacaaaatcttaccttccctcagaagtcctggcatggttcctttcatcttgccacagccactgataatcactttcattttctgtgtaactcaccaggcaagaagtccatgcagatttacttttagtagttcacatgacaaataaatactgcgtttgatttccaaacattaaaccatagtatattatagatagatatagagttatcattcaaagtatgatatttcaatctcaaaaggcttcccctgaagaatattacaaactcttcctctctttaagatctgctgggtaggaaagatgggagaaaatgaattaatgtttacacagaaaggaggataatgggggcaaaaataatagatgaacgtatgggtggatgagagaatggataaaatgataggtggatatgttgatcttggacagatgggaaatgagtggatatatcaataaacagatatgtgggtggatgggtggagaagaggatggtggatggttgtggttttatgaagagatgtgaaaaaggaagtgtggaatgatggatgagaagttgtatgggaagatgaatagaagaataggtggttgaataaattaaaaggtgtgtggttggatgaatgaatgagtgggatgatagatggacctaagtggttagtggatggacaggaggatggatggatgtgagagccccagaaggacataaggaaagatgggtggatagatggatgggcggatggaaggatatttaggaggatgaatgagcatgtgtgtggagagaggtgcccattcacactggcttgaacacatgggttagctgagccaaatgccagccctatgacaggccatcagtagctttccctgagctgttctgccaagaagctaaaattcattcaagccatgtggacttgttattgaggggaaaaagaatgagctctccctctttccacttggaagattcaccaactccccacccctcactccccactgtgggcacggaggcactgcgccacccagggcaagacctcgccctctctccagctcctctcccaggatatccaacatcctgtgaaacccagagatcttgctccagccggattcagagaaatttagcgggaaaggagaggccaaaggctgaacccaatggtgcaaggttttacggttcggtcatcctctgtcctgacgccgcggggccagcgggagaagaaagccagtgcgtctctgggcgcaggggccagtggggctcggaggcacaggcaccccgcgacactccaggttccccgacccacgtccctggcagccccgattatttacagcctcagcagagcacggggcgggggcagaggggcccgcccgggagggctgctacttcttaaaacctctgcgggctgcttagtcacagccccccttgcttgggtgtgtccttcgctcgctccctccctccgtcttaggtcactgttttcaacctcgaataaaaactgcagccaacttccgaggcagcctcattgcccagcggaccccagcctctgccaggttcggtccgccatcctcgtcccgtcctccgccggcccctgccccgcgcccagggatcctccagctcctttcgcccgcgccctccgttcgctccggacaccatggacaagttttggtggcacgcagcctggggactctgcctcgtgccgctgagcctggcgcagatcggtgagtgcccgccgcagcctgggcagcaagatgggtgcggggtgctcagcgcggacccggcggcagcccctccggctgagtcggccctgggggactggagtcaagtgagctgtctgcgaagtgcattgggctccggaaagcagggctgggatttgcgctaaaccgttggagaatgtgtctgtggaagcaccatttggttgaaagaaaaagagaaagagaagaaagtttgttgggcaggctgccggcgcgcagttttgggcgaggtcgctagagctgcagcacatggcagaaagtaaccgttctcccggatgcgcacagtcgttgtctggactaacaggctcctgtgcccaagggctcgccaagccccaccgggctgtgtctaggcagggcagagctgggcggggcagagactggggctggaacagggcgagtggctgttatcaaggtggtcacagaagggatcacaattccaagtgtgagactagctggcaatgggttttccagaaaggggtcctgggttctcccagctccccactgagccttgttccaaagcttacagtccgcagtgtcactgccaccttagcgctgtggaagcttgaaccagctctgcggtgaggtcttgggtctccatgagattccagcctgggatagggagcatgaatatgagaggcaaccactggaccagctgcttggtcctcaccacctcctgcttctgccaatcagtgtggggaaatctcaacagtaaggtggcttatattccctgcctggcagcctcagagcagagagaagagccttgataccagggcaacatcagggaccctggagctagggctccaatatctcatccaaacagggtcagtgctttgtggtggctatggaggggaggggctgcgtgtaaggtatattctagcacggct

SEQ ID NO: 5259 - DNA, 6000 bp, Homo sapiens; identical to SEQ ID NO: 1656

SEQ ID NO: 5260 - DNA, 6000 bp, Homo sapiens
atcctatatgacttctaaggctaggtcacaaaatgccatgcacttctaagtgagtctttgttcttcaaaaccggcagccaaattatgaagaagctcaagcaacctgtggagcagcctcatggagaggaccaaaggcctccacagctctggctgacctcccagctggcagcaagtgccaacttgctaggtgtgtgagtacaccatcttgaaaatggatccccaacctccaattgaaccacctgacattgcgtagagcagagataagccgttgctgctgagcccaccccaaactgcagatttatgggcaaaataaatgagtgggatggtttgttacataacagtaggaaacagatacccgcactcattctctttaccttcctccaccagagatgtgcaaaagtcttggggccttaacctaggcccagacactaacagggaactggcccccatgttcttgcctacaagttctttgaagtctcctgctcagctgttcatcttccacctttggggtgggggaatcttctgagagcctggcaatcctatagccatacctctctgaggtcttgccacaccaccgtcttccccatctccaagttggccatggatatcttctctcaaggctttctagggtggttcttctcaccccttttcccacctccagaactcctggctccacctctagaatggactagaggtagagtctcactagaagtgtctgcgctttctgcctggcaaaatgcccaaggtgagtcatgacaaagcttgccttctgctggaagagaggggatagggacaatgctgagggagccaacccaatgtgatatttcagtgaatgactctgctatggtttgaatgtattggaaactgaatccccaaattcatatgttgatggtatttgggggtagggcctttgggaggattagataaggtcatcaggatggggccctcatgatgaggactggtagctttataataggatgaagagagacctgcggtggcatgcccttgccctctcaccatgtgatgagtcagtaagaaggctttcaccagatgtagcctctcaaccttggaattcccaggctgcagaactatacaaaataaaattcttttatcgattacccagcctatggtattgtgttatagcaacagaaaatggactaagttagactcagatgcacatctactcaacaactgtcccttaagcttccaggcatgtgctagaagctggggagacaaggccaaatggcaatgtcaccatagacctggacaagagggcacctgtggccacccagagcccacacctgaccttgatcatgctttgggtgtttaaaaacctagactgcctatccagcccaagccagtttttttgttttgttttgttttgttttgttttgttttgttttgttttttgagacagggtcttgctctgttgcccagctggagtgcagtggtgcaatctcagcttaccgcaacctccgcctccctggctcaagcgatcctcccacctcagcctcccgagtagctgggaccacaggcacacgccaccacacccagctaatttttgtagtttttgtagagacagggtttcatcctgttgcccaggctggtcttgagcccctgagctctttaatcctcctgcctcagcctcccaaagggctgggatttcaggtgtgagccactgtgctcagccccccagccagttttaaggtttacaaagctgcctgcccaggtccatcctcctgagggtacatcctgtccctggaatgtgcattcatagagaggtgacgaagaggtggctgtaggcaaggcgtgtgggcaaagtttgggtgtgtgggctggagtatccacatgcctgagtcctaggccacttgtgacacaagacagagatggagtgtgaagagaagtggagtgggtgggctgagggctagggccaggctatcctcccgcactgccatgttcttgcataaaattctaaagagtccaagaatgctaaatttgaacatggtcttcctggtcattagaaagaacatttgtcaaggcaggagaatacacattttatttcacagtcagttaaatgtttagatacaaggtatctggtccttgatttgcactcttaacttgggctctccatgttcgggcaggtcagcataacaggaccagtgcccaggccctgcactcctacagggagacactcttctgtgggactcagacaatgacagggagtatggcagagattctagaagctgcctgaagactgctctcaatgtcaccacagctgcctctatctctaatcaggagtggcagggcagcaagggatagcagatgggactaatatgagagaatgtcttcatggggggaggggacagtgaggggatccagctgttttgccaatggccagttcccatctgtctgctggagccctattaacttcagtagggatggtactaggttcaagaggctgaaggagagaccagagccagcaactgggacatggggttttattgggaaacttacacacagggacggccggtggcagtgggctggacaggagaactgtacagtcccatggcaggctgggcaggagagccacaaccgcttacaaaaagcatgcagtttatacatcactctcacttagcaccctccccctaacaacccccacctgataaccttcatttggccccaaacaaagagctttgaacccctgtacaccctgcattccacaggatgggccggggttcaaatgttcctcacagataaggaatgaatctccaggttggtcattcccggattccttagctcaaaactccaaacacacattggggtgcatctgccatacaggaccattctcagggtatgcttaagtcaagttattgctgtcaggagcatctgccatacaccatcacaaacacccccagctcggagggagcggggtgtggagtagggtggaataggaggaattttatgcccattttgcatgggctgggtagggtagggatctgaaacccagcccaagacagaatggcacagtggttctcaaagtgtggtccccggaccagcatccacatcatctaggagcttgttaggatcttaaccacttgcaggatagagggtgtctctctgcgggtatgacacactgctgggtttaaaggattctccagcctcacttttctgacttggtgtgggaatgctatgaaggagactttttgctgaaaagagaacattttctgagcatgtacggcattcaagcggtgggccaaatactttatgaatgctgtcacatgtaatcttcaacagctaccatcaagatcggtatgattgttatggctcattttattattattccctgtttaagggctcatcccagaggttaagtatcttgccttgtcctgggtttaaaacgcaaccaggaagctacctaggtctgtgtgattctcagaccaccctgacttctttacagtttgctcaacagtggttcatgcttgaatgtgattcagaatcacctggaggccttattaaaaccaattgtcccacagttttccattcagtaagttgggatggggcttcaaaatacgcactcctaacaagttcccagatgatgttgctcctggttcaaggaccacgctgtgagaactacagtgctgggctgggatccagctcccgcccttactccactcgtacaaagcgctcataatcataccctcccacaacggtgtgttgtgagaggacattgtgataatggaagtgaaagagctttgtcagctgcacaggtgaatgcccctggtcattaaccaggtaatctgcctgaggctagtcctctggagcctgggagggcagagggctgggacgcagggtgggcaccgcagccacctagagagctcttgcagcccacctcaattttgggccactttttcttcagggagaaagccagctttgagggcttaggcccacagcccctcctgccactattctcatcaacccacacctcctccctcacctcaggcagctgctgggcactgccccagcactggttgttctgggctacttccccaggggccagtccaggcaagctggggcagctcaagcctgtgactcaggacctgaggctggatcccgctcacgcccgcctccatgagattcagagccctcgacttcccttctctgagccttaaactgcgcattagtaaaataggcgcaacgagagtacccatgagttgtgggaattcaagggctagaactgtattcagcgcttggcatagagcctggcccctggcaaggattcaatcaatggtagtcagtattttcaaaaagttcctgggcccaggccgcctcctgatagaggccccgacttaggacacaaaccgctcccacgccgttccccggcggcacccggatacacccgccctggaatgccagcgtgggggccccagggctacccgcccgagatgagaggggcagggcagggcaggattaggaaggcgctgagcccaggctggtgcggggaggggcgtggcctcaccctactagggccgggggatggggtgggctcgaaggagaaagtgaaggaggcgggggcgctgggagggcccgggaggagaccgggaggacgaggtaggcgggagctgggcgggaccgttaggcagcgccgtgagtggacagggctggagcggggcgggcttaatccccagtgtaacctgggggcggggctgccgggatagaggagagactccgtagcggggcggggcctcagctccagctgggcccgggggcgaggctggttggggtacggccatagtgggcggggcctggccggcgggagcgcaccgccttcccaaagggctcgggggcggggccggcggagggggcgtgtcttctgggggcggggcctgccgagtccgcggcgttccccggctgcagccgggagggggccgaggagtgactgagccccgggctgtgcagtccgacgccgactgaggcacgagcgggtgacgctgggcctgcagcgcggagcagaaagcagaacccgcaggtgagcaagggggcagcgggccggggtagcctgccggacaaccataggcaaagttagttttagcccccgcttctgcggtccggctcggacaactttcctcggaactagtgacaggtcggggcagctggtgggtgaaaaggagctttagccaccagtcctgaacccccagttctcacactcggccgtgcacagctgcgtgatcctgggtccgtccctctacctggctctggacctcccgggttccagcaggaggaagtgaaccaggtgaattccacgctcccgttgccctttctcacttaaaacgccggaaggtgagagctggcaggtgagagcaggctgcaggtcgccacaggtgttcccatcgcgttgccctctgcagtttctctccctgcaaaatgggactgagagaagcgaattgctttaaagagtgcactgtttcctcggttggggctcgaacccaccaaccctggggaagaggaggccaaagcagggaggttccatttcccgcctcacctgcttcccaccaattctaacagttcaactgagccggaccccctaagacttcaagttggaaactcagtggggcttttccaggtgagctggcctgagcaggaggttggaaactggggaacagttcttacactggtgagtggggaagagaagggaaaaccccaccaatccttgggcccagggtcaagcccagggccccaggggcccttgaagcatacccggggttaatttcttggctgacgggttctgttcctggaggtggtgggtgctctgtgctgggccccagtagcggggcagcatagttctgtggtcaaggcttgggctttgggatcaaactgatttggattccattccccctccaaacttcagtttcctcacctgtaaaatggggataatgacaatatccaatagcaggagcaagcactaaatagaataatgtgtatacactacttagcaaggtgcca

SEQ ID NO: 5261 - DNA, 6000 bp, Homo sapiens
tttaaaaagcaagcattcgacaatcactatattcaaagtggttctgatatataaggtggttgaatctcacatttctgaaatggctttatttttttttcccactttataggggagggaactgaggcccagagaggttaaatgacttgcctgaggccacacagttggtgacagtggcagagctgggatgcaaacacaagtctgtatgagtcaagctgacacctcaaattaaccctcacagtatctaaatcagccaacagtttccctcccacatctgtcttcctaccctcagcctgtcagactcagtatccccccacaccacccacccaccttcccctgacatctccttatccccatccaccccaccccccaccatgccctgcccatcctccttccatcctctcattttctgtttccattgcctgggcttcttgctgcttttatttatttattttaattttttgttgttgttgagacagagtctcattctgtcacccaggctggagtgcagtggtgtgatctcggctcactgcaacctccgtctcccaggttcaagtgattcttctgcctcagcctcccgagtagctgggactaccagttgtgtaccaccacgcctggctaattttttgtatttttagtagagatggggtttcaccatgttagccaggatggtcttgatctcctaacctcatgatctacccgcctcagcctcctaaactactgggattacaggcatgagccaccgtgcccagccttcttgctgcttttaatctcctggaagcacatttctgccctctgatcttcagtggctccccattgcctgtggataaatttcatcatccttggtctggcattcaaggaccttaaccatacaccccttgccttccgtttctgtctcacttcccactctgccccaacaggcgggcttggctcatggtcttggctcatggtcttgaatacccgcccacatgtaggtaccctgtgcctttgtttgccctggtctctctgcctatagtgccttcctcatcttcatacattccaatcttccccttcctccaggaagccttccctggggcctctcactcctctgaattcataatgatatgaggaacccctccttagccacctggaactacagagccataggcatcgtcttctgttgcccataataatgaacagcacctttgaaggtgtaatctgtgcctctctcatccttggtgcccctggaatcccaggtatatagcaagtgttcaattaatgctttccaaatgagtgaatgttcatgttgctcatggtctccaggaaacagaactccctgtcttctctgttgaattcaagaccagccccacgcaaatttcgggaaatacttgtccaagttctacctactttcaacagctcttcctccctccctccctccctacacacttccctctgtcttcctagaattgtcacatttcttcttgatcagtgactcaaacaaaactgttttcctctcttcttccataaaacttacctgtcctgggtgccatttacttggtttactgctgcgtaaatggccttctggtttctggcaaattaattccagctgtgatgttcatcgtggataatggtgaagaaaacgagatacccaggggctgcacaacactctgtttttgagcctgaggattttgtagatgaggaaactgaggcccagaggtggggaaagagggacttaggtaaaggaatctgctgaattctcagtcaagtctccctggggaactctctgctgtttcctgggttatcttgatcactgggattagaactaccactctgttggtggtcactgcactttacagtttgcatgaacttgacctacgacaggcatctcagctgctctgtgagctttcaccaaggctcagagaggtgggttgcctgtgtcaaccacagagccagtgtctagcagtggagccaggggtagaatgcaagtcgggctgtgccacagctgtgctctccccgcctcccccgtggatgccaatgctcactggcttccctacctgctggcagcagccttgtgtttacaccagacttcatctacaggatgtattcccctggttggagcaggtagctagagagtgaaggagacagaaccagggaaaatgccaggccaggcctccacgagagggatctggcctcaacgagtgtgggatcagaagacaggtgacgtgggccaggcctggctcacagccctcagagctgggcttcctgagctgctgtgggatgaccagggccttgtgactgtccactcccagccccatccaccactcagccgtatcctccccaactggcacttctgggcctggacttgggaaaggagctttatctgaggatgacacacacgtgcatttacaacgacacatattcacacactgaatccctccccccgatacacacagatgcatgcccacccccacatgctgccaacagtcatgtgcacacatgggtgacacacgccctcctgaatgtctctagttcacactctattttaaacagtctaggtggcagcatcccacagtgatcgagagcttccgctcataaagcaaataggggttcaaatccagtctatttcacagccgtgtgtctgaaagttacctagcttctccagtcttcagtttctcatcaataaaacggggatgatagcactgttagaatgaaatgggtggacatacgtaaagcactgaccatgggacctttctatctcatttctactcagctcccacaggcagtcttagcctgtggtctcaaatgcctgccccccactcccacatctgggtatctccacgcctatgctcaccctgggcccattgtccacagcaccctgctaccatctccacacacccatatctgccccctcctccgggaagccttcacatgctcacgggtgttatcaggggaattagaggaggagaagctcctctccctttgagttattacaagcacaggcttcaaagctggcctgagagatggcagagactgacagagggtccgtgatcccctttcacagatggagaaactgaggccccacgcaggtgagggtgtgcctgaatgttcacagcaagttagtgtggtgttgggactggaacccaggactcctgcctgtgggtccacagatgtcacctccttctcagagtgaagactcccccctccatggatctgttagttaggtgggtgatctggttctctcagccagtttgagggagcatggaagttgggggagatagatgggggccaagggggtccccagatgagcttgtgtgtgatggtggggtacagagaggagtgggagatgctggggaggagaggccaagagtggggactgggacagggttggctgaagcaggaaccatgggcgaccctggtgagcccgcaagaatggcatggctgtgtatgctgctattgaaacaatctctgttgtcacctctttcctgcagccgtttatttatttctttatcatgcccttttggaaaatgctgggaatgccacccctcctggggaatgcaccctccccccgctccccagttcacaccgtctggtgtgacattcgtgctcaccagcttgcagagcgctaatgacatttgcattttgctggctggtgaaatgtgggctgtgcttggtgatggggggtaaggagatccttaggcaaatgggaggttcccagcctagaaagaggggcaggcttgctggtctgggggcccacgcaggtctctgagacgcagagaagggagcgaaggtgggtgcagaggggactaatgtctggcagaatttagagatgctgtttgtctaaagtcttgccagaacacaaggcaaccccaagtctggtgttccaggtcccctgacatgctcatgcactatcctctgcgtcacctccttaacatttattgagcaatttctagacgccaaatgctcctctgtgggcttcacagacttacgaaagtcattttaattcccggcaatcctcaggaaaagatgctattattattcccattttacaaatgaagagtctgaagctctgagaggacacctgacttgcctcttctggaaagaggttgcaccagcttgtggccaaggtccacctgcctccaaagcccgtgctcttggctactgtgggcaacctcctgttctttgtctgggcttgagcagaaccaagaagcatttgtctgctgaggcccaagactgggtagaggtggtgagcatcgtcccccgtccgccaccacagcatgcaacaggctcctgctatgctcctggggctgctccagtctgacagctacagaagagggtatggccctggagagaggcctcagcatgagtcaggagagacccagagtttaggccttgctctgccaccaacttgctgtgtgactttgagcaagtcagtgcccctctctgggtatcagtctccttattggtaaaaagaggccattggtctggcggcatggagcatcccaggaatgcattttcacacgaggaagaaacttctctccaatctgcttggactcatggacttgccttgcactcagacacacaaattatgttttacataaaagcaaatcatgaaacatttgctgaacctcctctcccttctgcaaggggcactgtgctagatgcaggggttatgacgcttatgtatttttactcagcacatgcaaacacaggcacatgcatacctttgtgtcttagaattatttccaggctatttcagtcggatctagatgttgagtgcccaatcctgatgctcacctgcaggctcctgcagtcttggttccatcacttcgcctcctgcagggccaggagagcctttcaaacagaaagaagagaccgcagctcgggcaggtaatcacggctgcttctgcttccctctcacaggtgagcatctcctggaccaccctcaagcttcaggtgagctgagcttctaacactaccatcaaagcaactggaaccccttgaatttgatttctggagacgcgagcataatccttttgcagacatctcaacgctggctctccaggtaacagaggttaggctcattcagcaaggggatttctgctacttttgttgttgctgttgttgttgctaagggtaaccatcagcagggcacctgtcattctctttcatgcatcagtgtctgtctctcccatcacaccaaaggtccgtgggcaggatagtaaggggtgcagatagtgtgagtggatctgagccaaggttgctggggtctcactagattagccaagaagataaccctcggaggggccagacagctgagaaggctgaggtgcaggctagcccaccaggttgctggcccatgcccctcaagctcaactggggaagggtggaactgttgcccaggtaagcaagaaccagtggtgggtcagaagtaaaggttggctgcagtgggtggtgagagggcaaaggctgaactgaggtcagatgctgcatcatttgggagccaacactcaaactggattaagcaagacaggccatttattagctttttaaaattggtttctaatatattggtttctaataatatatattccaaatatatatattccaaataatatatttggggcctatttattggtttcaaggcaggcagggctgaatccagggctcaaatgatgctgttaggaccgtatctcaccacatccgtgtcctctgcctccctccttgtgagcttcagtcctcggtagccactctccatgtggccgcagggcaggcacctgcagatccagactgacgccttgctcatttcaaatccaatggaaggagagcttctttttcccaggcggtccaacaaaaatcccaaagtcaaggcttattggatggtcttgggtcacatgacacctctgcccaatcactgaaacctggaggataagatatgctgattggccagactgggtcagttggtcggggggcagtcggtgcgggggttggtggggtgcgggtggtgctgagggaggtggtcggggc

SEQ ID NO: 5262 - DNA, 6000 bp, Homo sapiens
caacttctgtccattcctccatttttataaataaagttttattgaaatgcagctgtatccatttgtttacaatactacaatagcagtgttgagtactttcgacagagactatatggcccacagaatctgaaacacttactctctggccttttacaaaaaaaatttgccaactcctgaaatagatgattggtagcatctgccacaagtactagaaaaggaagacataatttttttctggaaatagcttattattttcaaaagagcattccagtaataatgaggaaaaaaaagatttttgctctgcttacatgtattttgtagtttagtgttaatttttactttgaattatatgtgggatgaatgagaagccttataaacttcagggattagggtcaatacggttcttaaattggccctgatttccaggcattcctacccatggtctgacttccattcattccacaacgaggcactaggcacctactgtggcaggcattgtgctaggtcctggataaggacaggatggacagacggatggatggatggttggatggatgaacagttggatggatggatggatggatggatggatggatggatggatggatgggaaactgtgagagataaagcaaaagagagagagaggaacagagaaattagactaagcaatttcatgccttctcaattttgcctagaaaatatgtgtgtgaggaggaaatgccattccagtaggcatgtgggtaaaggccttgttgctgtagcaaagagacccctttagaactgtgtaggtatgcaggaacataagttgatttcccacagtccacagtggcaggtatctctgctccacagaatcagggacctcggctttttccatcacattcctccacagcctctaagacgttgtccttgtcctcatggtcaagactggcttatagatgcatttggtttccaggttatgggaagaggaagaaaaagcatggaggaacacactcctaaagttttaaagacctagaaagtagcatatctcacgtgttgctatagactggaggtatccctccaaaatttatatactccaatggacccctaagccccaatatgatggtatttggggatgggtctttggaaggtaattaggtcatgagagtggagccctcatggtgggattagtgctcttataagaaaagacatgagatcctccccccactccacccccatctatgtgccaggtgaagacagaaggagaaagcagccttctacaagctggaagcagccccttgccagacaccagatccacctgggccttgatcttggacctcccagcctccagactgtgagaaataaatgcttactgtttaagctgctcaatctatggtatttttgttatagcaggctgaactcaccaagacacttcccttcaccatccactaagtcacatggttcatctacttagaaggaaggctgggaaatgtagtctttggctgggcaaccataagactagctacaatccaattattttggatgaatgggggagtgaattttggtagacaactaggagtgtctatcacatagggtaggctcatgagtccttgttgaactcagagtgagacagtcaacatctgtgtgttcccagaagttctcaagccgcacaggtacagatccactgacccctgaacctgggaagttagttctgttcactgtgactggcagaaataatttcctgctgacattattagtggctcccagccaaggcaagaaaatgagactacacccataaaggaactattacagcccttcagctgccacgttgatgatcttatgctctacctcacaccaaattcacaccctggataatcactgttggcaagacctaaaatttcaccctttgtggatggtttaaacaattaacattccttaaagaaaattcaaaagcaaaccatttatgcaaggtacacaattcccaggggccttagaccccctaagaaacatccccacccctcctttccctcataagggataaaatgattagaatccaggaaacttgctgtactggcctgttaacaaccttaatccaagggagtgacactaatgacagaatttcaggtatgatgtgagagattggagacaggggtatactttggcctccatagagagcccacactgtcccccacacacgcagcactgactgcccctgggcctctctcagcgaagtgcatctggcctatatacaagatatatctcttccctccagttcaaggtggcagcagtcatcagacaagttcctgctaatgtgctaaggagaaggcccttccagatcaccagggcctctcagggacaagtttgccctgtctgtcactaaattgtttgtcatggtgaactctcgggcataagagaggagagactggaacagatacgaattgctcttaatgaaccaaaacccacagcttcaaaggaaaatcccagaggtagactctccaggtggggttgaggagaccagctcagtccctcttgagtctttctttccccaaagggatattttagttccaaaagtgacaaggtaaccagatggtatcctccaggtggagaacagcccacaactaggaagcagagtctcattccttgaggaggaagaggggagtgctagtacccggggctagtggaagagggtagggtgtgggcccggctcgttgtggggcagctgtttacttcactgcagcctgcagccctcccatttccctacagcccacccagggctgcgctcagctccagtgaaggtttgtgcagttaggatctgagagtttaagcgtactatataggttttacctttttattctggaaatttgcaaatgtacacaaaagtaaggaaactcttataatgggtccttgtgtatctacgcctagctacaactatcaatggcttatcttatttaatctatcaaccttttaaaaaaaatctttttgaggtcaggcacggtggctcacgcttgtaatcccagcactttgggaggccgaggccggcggatcacctgaggtcaggagttagagaacagcctggccaacacggcgaaacccggtctctactaaaaatacaaaaaataaccgggcgtggtggtggacgcctgtaattccagctattcgggaggctgaggcaggagaatcgcttgaacccgggagacggaggttgcagtgagctgaaatagcaccactgcactccagcctgggcgacggagcgagactccgtcccaaaaagaataaataaataaaaataaaaaatatttttggtaagtattcttagtattttaaaacaaatcccagccatgacatcatcttacccgttaattaaatggcactaattaaatggtgcttgaaatattacaaacatctatgttcgaccataccacctagagttctgggcaagaaggttgggacccacaggtcaagcctagccccttagttttaccatgaagataactcaggccgtcggagaaagtggcctgcccaacgcaggtgctagagcgcgaaccaagagaagtcgatcctcctggtctccccggctgcctggtgagtggcagaccacaggctagacttcccaggccccggccctggaaggggcggggaaccctccccctcactgccagctggaagaatccgagcggtccccgcacgcacttctggaagtgcaagccggtagcgcggcgggccagggatacagccaagtcccgggacgtgccagctgcggtaactgaagccgggtcccgggcgggcgggggtaccagggacaggagtagccttggaaagaggagagggcctcctcccacgaccgtccggatcaccgcctctccgccggcacccccggggcccatgccgcgaacaggccggcgaggctggcaaggtgcccgggcccggggcggaaagcaggaagtcgatcccgcgggcgcggcccagggtgcggcgctgcagatgcagcacggggtcgcggggcgggcgcccagtgcaccggaggaggtgagcgccaggtcgccttcgcggcccggggacacaggcagggacgcgggagctgatgcggctggaccggccggggaaacagtattttctggaaggggtaagagatgctgtcttgagcctttggaatctcggatccgggccgcccagaggacctcgacaggagcacagggaggacaaactgaagtccgagagaggcggcgtggcctccggcctcggggagcgctgccgggggtctcgggcttgggagagggcctgggggcggtgaaaatggggggaaaggaggggaccacaacattgttatggaagagtgagctcggattggcagagggacgcggggctgcaacgcgagtctccggaggtggaggggtccaggctgatgtagcgccgcccgggtcctgggtcggggttccgggaagtggacctgcgagccaagcctagccaagtcgggggacggaggctccggggcggacggagctgagggtgggcaggcgaggttgatggagcccttccaggaagcagggcgaggctcaagcacccagaaaaacctgtggctgccgaggtcccccgccagcagcgggcagcggagcgcaggggcggggctggggactggcgaactccgcctctctggggctgtcgctttaagggcaaggcggggcgtgcgggccctttaaggccacgtgggggcgtgtcaggaagtgagtccagggcccgcctcccggggagtcggcctcggatgtccggaggctcctgggctgagccggcgacagagcccgggaaggcagcgagacgtgggcgccggcccagccccctcccgcgtccttcagccccaagccccgagcccctctgacccttccgcagccctccctccagccgcgcccggcctccggcagctccctgtacgcctccctccccctgcccgcccctccctcccacagccgcccatgacgccctctcggcacctcttcccactctgccacgcgtccttttcctgcaccttcgccccgcgtacctactcctgccccgccctgccattcctctcccctcccttctctctgcgacccctccctgttaggccccagcctcttctcccctcacaggtcttctctgtcctggcctcaccgccttatcctattcctctcccttgccctgtgtcttgtctcagagccccctcggggtgggagtaggttgtggagcagcacaactgggctcaccccaaagcagaacttctcaatccatgaggacaatggggaggcctttaggccagcccacatgtgacaatggagggctgcggcttccttgcggagagcacaagtgagctcactgccctggactccagggaatcagagttctggccgcggggtgacccagctcctctgctaccatgaatagggcccctctgaagcggtccaggatcctgcacatggcgctgaccggggcctcagacccctctgcagaggcagaggccaacggggagaagccctttctgctgcgggcattgcagatcgcgctggtggtctccctctactgggtcacctccatctccatggtgttccttaataagtacctgctggacagcccctccctgcggctggacacccccatcttcgtcaccttctaccagtgcctggtgaccacgctgctgtgcaaaggcctcagcgctctggccgcctgctgccctggtgccgtggacttccccagcttgcgcctggacctcagggtggcccgcagcgtcctgcccctgtcggtggtcttcatcggcatgatcaccttcaataacctctgcctcaagtacgtcggtgtggccttctacaatgtgggccgctcactcaccaccgtcttcaacgtgctgctctcctacctgctgctcaagcagaccacctccttctatgccctgctcacctgcggtatcatcatcggtgagtggcagctggggccacgggggatagagtggtcatggggactgaagcagtgaagaacaactcttctaggcatcctagg

SEQ ID NO: 5263 - DNA, 6000 bp, Homo sapiens
tgctgtctccagctgggccgtggcggccgggtgacgagtcacgtactcctggtagcggaggcccaggagccgcagcttctccatcctgccctcggcaccgacagacccacagaaggaccgtacgacaggctgcggcgccctgcttcctgcgccctccttcctgcttccggtcttaggcccgcctcttggttgcttaacttccgcgggccagaaggctgaggacttgaagaaccggtgaaccacccttcaccccatctcttgaaccgcttcccactcgggtagcccttagcaactgagggcccaaacccggccccctactccctcaagtcattggttagcacgctctccgcccctgacccgcccagcgccgtcagcacccagctcttccgtttaccgggttggctgcccttgcgcctgcgcagttaaagctccggtaaagccgggcggcagtcagagcagttcattctagagaagggagctggagccccgagtctttccaatggaacgccgagagactcgaacggcagggccggattttaaagggctgagagatagcgggtgcttgaaaaaaggagcctcgatcagatttggggaggtgcggggcgtctaaatacagttgcactgtgtctcagcaggcgcgcgttcggccagtatccccatctccgtttcctcaacaaaggtagtgctggggaaactgaggcagtaaggagtccagccctctagtgccgtctcgatcccctagacagcacagttagtgctccggcttcggcctcagctcccgtatggactgtgccccccaaagggctcgcgcctgcattcccacatacgcgaagaaagccctggcccgggcttctctcggctcggtggcccttgggcgggagtatcccttctctgggtctcggatttcccgatctgtaaaatggtttgagggcagacttgatccttgaactcagaatcgatctcagctttctggccctcggacgcacctcgcagtcctcagctgcgcccccaagggaaggggagacccctggggagtatcttcccaaaccaagcagcctccctggaacgggtggcaccgggagatctgcggcgagtggtggagggaacgggcgctctggggaggtagcgctgattggctgcggggaaaggggcgtgacatgggtggagccgtgggccagtggcctgagggagcgggccagcggatttatggtaccctgagaatagtaatacattattttacctaatcctctccaccagatatctccagatgaagaaagcatccttttaagaacgcccagccaaaatttgagtgttggtcttttctgacctcagagactaggcggttttttttaattcattttttttaactttaattttatttttagagaccaggtctaagcatcacacctcaccaggaaaccacaaccttccttccactccctcactccaccctactccacagcttagttttcttctctatcaggtgggggattaaagctgccctcttctcacatcaaagaacgaagacccagggaaaggtgaccaggggcctgaggagaggcaaaggtcttggagaacagaggaggtggtcatgggcatcgtcgacatcatttctggccacgctctgggttccaggcttgcttgccctcctcccagcagccccaagttgctatgaactgttcacagatgggaaattagggcccaataaggaggggaaaggatttgtcccacatggcacagcaaggcactggccaaagaggccacagcgcaggtctccagtggcagtgccctctctcctactgcccacagcccacaaaagctgtgacatgttgaggctccttggtcataaggccagttagcaactgggattaggacctaggctcagggccctcaaggtgaggctccttctcccttcctctgccccaccttgttttttgtttgtttgtttgtttgtttttgagacggagtctcactgtcgcccaggctggagtgcaatggtgcaatctcagctcactgcaaactttgcctcccaggttcaagcaattctcctgcctcagcctcccgattagctgggcctacaggcgcccgccaccacgcctgactaatttttgtatttttagtagagacgaggtttcgccatgttggccaggctggtctcgaacttctgacctcaggtgatccgcttacctcagcctcctaaagtgctgggattataggtgtgagccactgagccctgcagggccctgctgtgcaccaacaccttagtgaacttgttcctcaaacctccagtttggccactcctccagccctccctctgcagctgtggagagggtacagagagagaatttgaggttcttcagcactccttgggctggaggtcctgattctgagagcaaggtgtggaggggagaggggcagactccccaggacagaataggaaggggcttgggctggaaccagtttcttctccctccctgcagaactgggaaggggagcatgggtctagccagcttggcagcagcagggctgcctgaatttcctctctagatcccaggccggattagggcccagagacaaagagttgcggtgtgtgcaggaggcccctcccctgctccctggccccctgcctgggcttggccgtctttgttgggctggaaggacctttgggcagattgagccgtatcctctctccttcagtttgccccaagtcacaggggaagagaggtagaccagtccaacatttacctacgagagtaccagaggcccagagatggagcctcactcgtctaatagggtcacacagcaaagtcctgggcagagctgggtcaaaatgggtcttaggccaagaggaacagcacctgtttatatgcccatacgtgtccctctttctccctccacgcccccagaacaaccccttgggggcctagcaggtatctcagcacttcagtttccctgagtggtgaggttgagccagaagaagggccaacattgtgagtgactacagtgagatctgcagacccagcttcctgcactgactcccccagcccctttattgaagactcatcctgggccagcacccaactatggatcccatatggtgtttgtttgtttttagagacaaggtctcactctgtcacccaggctggagtgcagtggtgtgattacaactcacagcaggcttgacctcctgggttcaggtagtcctcctacctcagcctcccaagtactaggcacatgccaccacgcccagcaatttttgtattttttgcagtcatacagtttggccgcattgagcaggctagtctcaaattcctgggctcaagcaatccacctgccttggccttccaaagtgctgggattacaggcataagccactgttctggcctggtctcacatgtttaacccccacaaaccgtctctgttgagggtcctggagagggaatcacatttccccaccccagctttaggctacagatgaagatcagggaggctggaggctcaagctccagacgcctgagtggccagtgcatggcccttctcaatttctgggtgcacaaggagccaccatcagtctccatagcaaccattatccctgccctccagagacccaaagcctgaccttccccatctcccagagaaagggggtctcaggttgggctgctttccacagcttcttttgagtttgcctcactttttgcagccagaagttgggcaaatgacacagcctgagccccctttccaggtcatgggaggggagattctcattccaatccactttcaacaggtattgagcacttggtatgtgcaggccctggttgggcactggggactggacagacaaggttccagtccggtgagcagcttacattctgggagggagacctgcaataaacaagcaaacaacttcaactttccatgagtgctagccagccctgggaggctccgctgccagaaggaacgtcaagggcaagtcctggggcgggagacccttccggaggaggagcaagaaagctgcttctgcagcgcagagcctggggaacggagtggggccgcttgagacgggaggggccggagggtgttcttgtctaacaggtcacttaaactctccgggggagaattagcccgcatcatgggattaatcgagggtgattaaatccttagcacagggcctggcacgctgtgctggtttagggtccagagcgccccccacccattccctggcctgctatggggtgcgcgggggagagggaggaaagacgagctccaggccggtgcgcccgggcacaatcacgacgatctggacaagagtggggatccccggccctgcccaggcagcctaggccgcccgcgtctggggcccctcgccagctcccgggcgggaggcggccttcacaagggcgctttgtcctggcggcgccggcagggcccggccgggccacctggactgagagtgggggagtgaggcgaaggcttcaggtgctccgcggctctggcgcaggtgtcggccggctccgcccctgtccccagagcaggtgtcccagaccctgcggcctgcattccggccccctcctcctccctcgtgtcgagctcccgcagtgtctttgatcccgggcccggggacactggcccctccccttggggagtgaggggaggagacgcggccccagagcgggggcagggcagggggtcagggcaggtagcggggcccgggccttcgcgggtggctgctcccgctcccccagccctcccctcgtcctggtgggaaactcagcccagaagggggcttcgggggctcctcgcgggctggggaaccgtcggatgccggcccaaggggcggggccaggaccccgggggggtcaccccgccccttcgcgctcagccccgctgaggtgaaacctgagcccaggtcgggggcgggaccggcccgcgcctctcccctggttcccgcaccctggccggcggctgcgagcgcagggcccagcccgggagccgctggagcaggtgagggaggtggctcggcgcgagccgcacaacccggccgtcgggccccgccgcccagggctgagtctcccatctcgcccctcggtccgcagggcctgcgatggagcctgcagccccgggtcgcgtccctccctgagcgcccccgtcggcggccatgctgccccgagggcgcccccgggcgctgggggccgccgcgctgttgctgctgctgctgctgctcggattcctcctgttcggtggggacctggggtgtgagcgccgcgagcctggcgggcgagcgggggccccgggatgcttccccggcccgctcatgccacgtgtccccccagacgggaggctgcggagagccgccgccctcgacggagacccgggggccggccccggggaccacaaccgctccgactgcggcccgcagccgccgccgccgcccaagtgcgaggtaggtgcgcgcggccctggcggcgggagtcctgggggcgccgcccccgagcccggcctcttggacatctgcgggaatcacagtacctggcgtctgtccagcactggccagccggctggggcgcacctcgaacgtgcagctcctctgctcccgacctcatttccccatttgaaatgaagggttggctcctgctgccccctccgcacactgttccgggctctgctgcggggtggggcagctcaacatgggtcctcaccgcctagcggagaaggggggctgctgccgacctgggcgtccctccccagctcttgcatgtggccatcgtgtgtgcggggcataactccagccgagacgtcatcaccctggtgaagtccatgctcttctacaggtacagccaggtgtccgtggaggagggtcaggagtggggaagggacaaagcccgggacaggctgctggtctcagagcttcagcttcctcatctgtgacgcggggacagtgtccccttcctcccttagaagggcagttgtaagaacatcctgccgggcgcggtggctcacgcc

SEQ ID NO: 5264 - DNA, 6000 bp, Homo sapiens
tgcctgacagtaagaattttccaacggctagttaaaaatacagattccctggccaggtgtggtggctcacgcctgttatcccagcagtttgggaggccgaggtgggcacagatcacttgaggtcaggagttcaataccagcctggacaacatggagaaaccccatctctactaaaaatacaaaaattagccaggcatggtggcgggcacctgtaatcctggctactagggcagcagaatcacttgaacctgggaggtagaggttgcagtgagccgagatcgggccactgtactccagcctgggtgacagaacaagactttgcctaaaaaaaaaaaaaaaatacagattcccaggcttcaccctctacagtctatggaaaggcatgggaatctatattataacaagccattgagtttctttttctttttctttttttgagacagagtcttgctctgtcacctaggctggagtgcaatggcgtgatctcagttcactgcaacctccgcctcctgggttcaagttattcttctgcctcagcctcctgagtagctgggattataggcgtgtgccgccacccccaactaatttttgtattttttagtagagacagggtttcaccatgttggtcaggctggtctcagactcctgacctcatgatctgcccaccttggcctcccaaagtgctgggattataggtgtgagctggcactgggtggcttctatgaggaagttttggaatgcatccaggagccctccactccaggttcttggtttattagccttttggtcctctatttatctagccctctgttcagtaaagctttaggtttgtttgaaggagacatgattagaaggtcaaatattgtatattctcaaggcgaatgtgtcctgaactttgcatagtagaatttattcctgaaaagttgtttgcagatggaatttgttttgtgcgtgagagaacaggcatatacagaataccttagtttgctatttaatttaaatcaatattatctgagtgactgttatttgctgaggatacaatgataaacaagatgcagaccccatcttcaagggtcttagagtccagcgaggaaggtggtcaaataaacaggcaattacaaaattgtggttagataaggttaagcacagggagctatggtggatggaggaggaagtgcacccaactcagtgttggggcatcttggaatttctaggtgaagtgacatgtgatggagaaacctatagactggaatatagtctcaaatccattgcaaagggaatgatccttccccaacttatcttcgtggaaaaataaactttctttctttcttttttttttttttttttattgagatggagtcttgctctgttgcccaggctggagtgcagtggtgcgatctcggcttactgcaacctccgcctcccaggttcatgccattctcctgcctcagcctcccgagtagctgggactgcaggtacctgccactgcgcctggctaattttttctacttttagtagacgggatttcactgtgttagctaggatggtctccatctcctgaccttgtgatctgcccacctcggcctcccaaagtgctgggattacaggcgtgagccaccgcgcccagccgaaaaataaactttcacatcatgttacccctggatacatttttgtggccatgcatctgcacgaatattcaatccctgctacaggcaagacactgagtgggacgttgcagggctaccaaggtgaggaggtcccaacccctgtcctcaaggagttgatgtaacacctacccaggattaatttcatttctctcagaggtcattaatccagtgtgatctgtttatggctgaagaggtagtttattattcaggtcttcactccctttcctgaaaaggctgtttattttgtttcatcactgtgcagtggcgaaatccagttccaaccaatacttaagctgggcatacattttacccaggagaaaactgaagggcgtgcaggagttcacagagctgtttgctgacccaagccatgaatctgtggagacctgggtcggtcttcagggttagtagggtctgtagggtctgtgaggatccgaggcagcctgcagacctactatcatcttctttttcttttttataattggcaatcatccttggctacccagtagcatcttttttttttttttttgagatagagtttcactcttgttgcccaggctggagtgccatggcgcgatctctgctcactgcaacctctgcctcctgggttcaaacgattcccctgcctcagcctcccgagtagctgggattacaggcatgcgccactacacccagctcattttgtatttttagtagagacagggtttttccatgttggtcaggtggtcttgaactcccgacctcaggtgatccgcccaccttagcctcccaaagtgctgggattataggcgtgagccactgtgcccagccccctggtagcatcttaaatcaagctttccttccctctgggtatcatggacatgaacaccttttatgtctctgcctcaagaggggaggaggcacagaggaacaaaaatccttgtgaattatgataattacatagtgtttaaatgaagggtggcaaggtgtgtaagtccataggtaaggtttcttttttctttttcttttcttttttttgagatggagtctcactctgtcacccaggctggagtgcagtggtgcaatcttggctcactgcaacctccgtctcccgggttcaagcgattctcctgccctcagcctctggagtagctgagattacaggcacgccatcacgcccagctaacttttgtatttttagtagagatgggttttcaccatgttggccaagctggtctcgcactcctgacctcaagtgatctgcctgccccggcctcctgaagtgctggggttacaggtgtggtgtgagccaccacgcccagcctcttcttttttttttttttttttttgagacaggttttcacgttattccccaggttggagtgcagtgttgccatcttggtttactgcagcctaggttcaagccatccttgtatcggcctcccaggtagcttagtctacagctgtgtgccaccacacccggctaatttttgtagaaactgggtttcaccccgttgcccaggctggtttcgaactcttgagcttaagtgatctagtcaccttggcctccggaagtgctgggattacaggcgtgagccatcgtgcggcctggcaaagtttctttatcctcagtgcttgtctgggtgtgttgtctggtgggaaccacttagaccctgtaagtgaatgtgtattcccatcttgtagatggtaacctgaggcccaacgggtgtctggaggtagtgttggacacctcgtggtctgcatcttgctgcacacagaatccagcctagactcattatcctggcctttgaagtctcccccagtatgaatcccccagcctcccattcctgtttctccgaaggccaagctcgaagcatctgctgcctcgtttctgccaagttggccccacctcctgagacacttctcccctctactggcctggtgaaactcaacacatccttcaaagcccagctcaggtgtcacctctctcctggttggaattaacctcttcctccttagcactctctggtttggccctttctcttgcggcttctcctgggcaagtggcatagcctccctgatcctagtgtcttcctctgtgcatgggcacaggagtaatatctgctgtgatctttaactcctgtcagttcattgacctctttaacaacgtgatgaaagcttccagaagagctaatgtatgtggagtcccacgatgtgtcaggctaggtgtttaggactttactaactactgtctcgtttaatcgcgaatgcagtggacctctctctccacacgtcctagtacgatctttatttcacacgggaggagaggagggtgggtggggtcggccagagaggagaaatgcgtctccagagttcacagggctggtactaccagcagagccccgtccaccatatgccacagctggggttctaatccctggactggcttgtactgggctctctgcctccctggccggcgctcgggggctgggggacagaacacaatgtacagcgtgccttctacaatttcggggttcacgcacccccaagcccacccagggccaggtcaaacgcgccttcgccgggttgctgtctacaatcaggcttggctgcgctctcagtaggggtctcggtcaacctctgcccacccgaacccggcgccgtggacctggtgtgaggctggggagcccgtcctgaggggtgccggctcgaggcgctagagccacggagcctggtcccgggctccaagtcccaggaatgtgggagggctgggcggaggggcgggcgaggcgggagcgcttcctctgcccgcgggaggggatccgcggccggctcggagggggcgggggcagcggcgggcggcggcgaggggctgcggagctccgcagccgccgggccggccggggcgggaggaagcgatgaatattcagagggggaggggaagggagggggccgagcgctcgccgcggctccctgcagcagccccagccgcatgacgcgcggaggaggcagcgggagcagccgcgggagccgggaccgggtagccgcgcgctgggggtgggcgccgctcgctccgccccgcgaagcccctgcgcgctcagggacgcggcccccccgcggcagccgcgctaggctccggcgtgtggccgcggccgccgccgccgctgccatgtctccggggaagcccggggcgggcggagcggggacgaggcggaccggctggcggaggaggaggcgaaggagacggcaggaggcggcgacgacggtgcccgggctcgggcgcacggcggggcccgattcgcgcgtccggggcacgttccagggcgcgcggggcatgaagccggcggcgcgggaggcgcggctgcctccgcgctcgcccgggctgcgctgggcgctgccgctgctgctgctgctgctgcgcctgggccaggtaagcgccgggtgggctcgggcggggggcaggaggctggggcgggactggcattgactgcacctgcccgagcgtacccccccggggggttccggggaagggggcgggggtccggatccccggatccccggaaggcgacttgcggggaccccggccggcctcgcacgccggcgatcgatcccttttccggctgcccaggatcgggggagagaggcgggatccgggtgccgcggtgcccgagcctcccggggaaagcctccgcgcgggctccaggccgtccctggcccggctcttcccggcgctgggcacatctggcgggcacgggcccggcttcctagccggaggcggccggagggggcgtgtttgcggaggtctggggacgcagagccgggcggcctggctgagcctttgccgacagacctccgacccggcctgcaggggcccgaggggcggcgggggcgacagggcagggccaggcgctgggcagtggggccctgggcgaggcgcgggactccgggccgagggccctgttcctggggaaagttcccaggccggggaaaaggtggccgcacgctggcttttctcaaggcagccggccctcttggcgtcgtgcttgatttcatgggtgtttaattcgtgctttgtgggcgctggctccccctccccaccccaccctcaccctcttttctggcttcacttttcagataatgctgtccctggcgttttggtgaccgacctttccccttcctggcatttccataggggctgaggcagagcagctgaaggggcattcccatttcacagatggggaactgagggagagaagtgaaatagcggagcacccagcccgtgccatgggagctgagccagcgggcacgtcctcttagcctctggagcctgttggggtttgaacccgcaggggaagcg

SEQ ID NO: 5265 - DNA, 6000 bp, Homo sapiens
aatccctagaaaatctgattttcccccagggcccacatcacgtgcccagagctgggaaagtggaggcagcatgggatctagctgagaggctccatttttggtagcttctagtttgggagtcacagagacacctggatgatacgaagatgtagctttgcaggactctctagaacatggagtccaagatattcccttcaatgatgggacactgaagcccacagaggagaggtctgtcccagttactcagccattcggaggcagagaccaggctagaactcaggacttttaatttggaccaggattccttttaccacagtgggcagccctagcaagtgccaggtagggtggaactgtgaaggtcatccgaggggtagtacacgtgggtaggaagtcatatctaagaactgacccccagacctggctctgccactcactccttatgagaccacaggtgctgggtgcagtggttcacacctgcaatcccagcactttgggaggccaaggcaggcagattgcttgattccaggagttcgagaccagcctgggaaacatagtgagacccccacctctaccaaaattagccaggcgtggtggtgtctgcctgtagtcccagctacttgggaggctgaggtgggaggactgcttgagcctgggaggcggaggttgcggtgagccaggatcatgccactgcacaccagcctggatgacagagtgagacagaatgacacactgtctcaaaataaataaataaatgacagcagatcatcatttttctttctgcctctagactgcaatgcctatttctccaggtagtcactaggataaaagtaaaaataatattatcagcatttaccaaatacagggtcagctactctgttatgttctttcatgctttgtttcttttaagcctcaaacaactctatgagctgggaacaagtatcgtccttcttcctcccatcttatttatttatttatctatgtatttatctatctattcatttatttatttattttgagacaaggtccttctaagtcaccagggatggcctcaaacttgagctaggaactagtgtcaccaccccccaatttcttttattgattgattgattgattgactgactggttaattttgaggcaggggtctcgctaagtcgacagggctggtcttgaactcctagtcttaagcaatccgcccgcctcagcctcccaaattgctgggattaccaacacgagccaccatgcccagcccctcccatcttctgaataggaaaactggggtttgaaaaggtaagcgacttgcccaaggtcccctccctagctagagagcttcagagccagggcacaaacccatcaaagcctgtgctctcgcccattgagccaccggacctcgtacactaaccgccaagtgttctacacagtgaaggtgacaaagaggtgaagggaagagccagggaggttctgtggactcactcggtgggtatgcccagagggaagggggatcttgggtggcacattgagagtagctgcgctgttagtaagtgagaactcggaagtccagactcatccagtctgtgccaataaacccctccttctacctggtctcctttccaaagccagctgttctccagacaatggggtgggcgggggcgggtgtcctcctccttctcagggaaaatccgacgctgagcccatctccagagatcttggcttcccgtggggctgcagatccacctagagccaccagagggcgggccagcactgcggccaaggcttgaagacccagcacaccaaagcccggccaagcctccagcccagtgtccaagagtccagccagaggccgagtcctcgatctcaaaatgtctaactgcagaagcccaactcatgttcaggcatgatgtgtctgattctactgggacaatcattgccaccaaagaattactgccaaaatagtaacgacattagctacctaccacccctccacacaccaacacacctcattttaccaagcactttctcatgcctggggtgcctggagacttaatgcagcctcgcgatgaccgggtagcctcaccgtacagatgaggaaactgaggcacaaggaaggggagtacattgtctagggtcacctggagaactctgatctccagactcaaatttccaattcgtcccccctccccccaaccctaaccggagctaggtggggtggggacagcaaatgtggatggggggaggtaagaggggtcagagtgctctacagagaagaccaaatgcattgtggcacctactgtaaaatgagaccagccagccacccacccaccagccagccacctaaaagtcttcagtgggcacctgctggaaacacgacaatggatgacacgagttccctgccctcaaaaagctggtagtctagttgggggtggagggggtgagtcagcagataattatgggaaaccgtgacacctgtataaggggcggggatgagcagaggggctgcgactgcctggagccagggattcccggacggggcttccctttcctcgcagctcgtcccaggaggaggagctcccccccagcttcggggttccgcctgccttgggggcccggggtcccctcccacccctccccgaagagcgcgggccccgggaaccgatgacagcacacctgagtcagcccgccgcccacccgcccctcagcgtctgtctccgcatcttgtgatatttcgctccccgggagccagccccactgcgctccggaggcagctcggcaaacaaacccagcgacagattgtgccgcggctcattccggggaaggacgccaaaccccaccctgctacccccaacactccctccccgccgccgcctccaggccctccccccaggcgcaggccctagtcggggtgggtcctggggaaacgcagggtcctgtcctgcctcctggaaatagggggagccctgggtgagggaagacgggagccccagagacttttctttctgtttctacctgatccgaaaacgagaggggcgggaaaggaaatttaggggcacagagaggagctggggggccgagaaggtccgaaaatggaaccagcagggggcacccgagagccgaggtgcccacgggccgggagcctgggaatgaaactggggaagagggggagagaaagggaggcagagacaccgagacacacagagacgagagacagagacgcagggagccccgcggggaggaggagagagacgaagacacagagagacagtgagaaagacagaagaccgggcagggaaacagacgagtagagacagaaaaggtccgagagagagtgagggagggagggaacagagagacagagaccacgaaatatgagtaagagtcgggggagaaaaccagagaaatcgaatgagaacgcgagaagaacgagagaccgtggagggagcagagaatgaatgggaagaataagaccaacatttatcaagagccgactgtatgccaggcactgcattggaccctggcacggataggaaaggaggagccgcggcgcgggcagcggggcgaggggcttctgtgctcgcgggagcggcagcccagggggctcagcagccccggcaccgccgcacctgaggctccagcagccccaaccccgccagcgctgcctggccaccgtacccgaagcggctcccccgagggccccgagcctatcctacgccggggcggctccgcggacgcgccgggccgagtcaagacctgggtcaaccgccctgcagcctttgtagggaagtgcctaggtgatgggtctgctgataccgcctgtgaccaggccatgaagggccagaggggctccagtgagaccataatccgcccctctttaaaagggggtagaggaagttcacgcgaagccaacagtcttctccccagctttgggtcctctcctgcacccccgcgggagataaggtctcccctcccggacacatcatacatacacaaaaaaacgcacacactcgcacgcgcgcccatctcgcacccgcttgtaaatgcactaaggggcatacacacaccgggcacatatttctttccacccatccccaagatcgcaagcgcaaaacctcgcacagcctcacgtttcccaccagctcagacatgcacgctggcggactttcagcggctcacccgtgtgcacactcacgtgcccccccccccgcttccccaagcccgtacaaagggtaacgggcaagcatcctgagtcacacctgcacaagcatccttgcgcgcacgtgcacgctcatatgcactcgatcttgcacgcacaaactcttgcatatactattcttatagtcgcacactgggcttgaggtctgggagtggaaggaaaagtggaatcttggagctgtcccaggggacagaaatgctggaggctgggacactggcgcgagggacgcggctgggggcgggggagggggtgacccagaagctcatcttctcctggaaagttgggaggggggaacaggacaagtccacggcgttcctctaaactaccgcattcccccaagaagggatttctctagaagagtggcgccgcgaggacgatcgaacacagtcctccgggtcgcttaagcgggggggaggggggcggggtggagggggttagaaagccgctcccgcctcctagtggtcgagaaagggttaagtcggcaagccagcaaacgagggaggagccagcgagtgcgggaaggagtgggggtggttgggaagagcttcctcgctgtccccactctccctcggctagcagcctgggcacacggacagacggactgacggactctcgagcggacagcgcagctagcggggcgcgggcgctgggcgtcgacggccagccccagccttccccgccccgtcgcgccccgccccgtcccgtcggggccgatggctcctcccgaggcccgcagcccgggcggcgcagggtagagcgccgcggcccggccacgcagcccggggactcccgggccctcccggagccccgcggggtccccgccgtgcatccggcgggctcagggagcgagtgggagcgccctccccccgctgccccctcccccgagcatcgagacaagatgctgcccgggctcaggcgcctgctgcaaggtaagaacgccagcggcgggagagcggagggcatcctggggagagaagcagggcgtcccctctttcagggattgagggtggggcagttggggaggtggggtaacctggggaaggggaaaagctcagcgctggggccgcgcccccgccgccagggctgttctcagcaggagggcacttggctgggagcccgcgggcgcgtgcgaggagctcgtgaccgaggtgggacgcagggggcaggtggacccggcccggagcggggagggaggctcaggttccgctgtccccgctccacctgctccgggggacgctgaggactcgggccggctggggaagcgccgactcagcaactcctcctgcccggtgcctcagcactttctggccacctgggaagacaggagatgtgggtagggggctgtctggggaggtaggaggcgcagagggaaatccaagtggccctctctggtaggagagatggagggcgctagaaagaggatagttctactgattgagtgacagataagggtgtgggccagagactgggggtggggtggggaggggtcagggggagagggataggaaggagaactcaaagatggagaaagtggtgagggaagctcaaaggaggagggagatggagcgggggagggggagaaggaataaaggttagatgggaaaagcgtggagggaagtgggacccaggtgaagaccaaggaagagggaaggagaggaaagaccagatcaggggagggatgggaagaagactatggacagggacccagaatcctgggatggaggtagcgggaaagagaatcaggactgggaccctggggactggaatggaaaaggagaatggaaagatcagaaacc

SEQ ID NO: 5266 - DNA, 6000 bp, Homo sapiens
tccagtctaggtgacagaaggacactctgtctcaaaaaaagaaaaggattttttatttctttttaagagatagggatctcagccgggcgtggtggctcatgcctgtaatcccagcactttgggaggctgaggtggctggatcacttggggtcaggagttcgagaccagcctgaccaacatggtgaaaccccatctctactaaaaatgcaaaaaaaatttagttgagcgtggtggcacatgcttgtaatcccagttacttgggaggttgaggcaagagaattgcttgaacccgggaggtggaggttgccgtgagccaagatcacgccactgcactccagcctaggcaataagagcgaaactctgactcaaaaaaaaaaaaaaaaaaaaagagatggggcgtgtctcactatgttgcccaagctggctttgaacttctgggcttaagtgatccgcccaccttagtctcctgagtagctgggactacaggctcatgccacagcacctggtttaagaatggattttactcttaagagcaatgggaaccagaggggaggggtagttaagtagagtaattatttgatctttttttttttggggggggacagagtttcattcttgttgcccaggctggagtgcaatggcgcaatctggctcagtgcaacctccacctcccaggttcaagcgagtctcctgcctcagcctcccgagtagctgggattacaggcatgcgccaccatgcccggctaattttgtgtttttagtatagatggggtttctccgtgttggtcaggtttgtctccgactcccgacttcaggtgatccgcccgcctaggcctcccaaagtgtgggattacaggcgtaagccagcacgcccggctgatctcctccctcccttccctctttctttcttcctttcctttcttttcctttcctttcctttcctctttcctctctccctccttcctgctctctttttcttctctcttttttcttctctttttcattccttccccttccttcctattccttcctttcctttccttccctcacctcctctcctctctcctccccttccctccccctttccttccctccttctgagttttgctatgttgcccaggctagagtgctgtggcatgacctcggtgcactgcaacctctgcctcctgggttcaagttattctcctgcctcagcctcctgagtagctgagtagcatgcaccaccatgcctggcgaatttttgtatttttagtagagatggggttttgccatgttggccaggctggtctcgaactcctgacctcaagtgatccatccgcctcggactcccaaagtgctgggattagcctggctgattactttacattttgaaaagatcactgctttgtggagagtgggttatagggcaagtgtaaaagcaaggacagtaattaggagagttttgtaaaagtgcaaatgtgagaaatggtgggggatgaaatactagggcagcagaggtagagctggtgagaggatattctgaaggcaggacttcataacggagtggtgaggaaaacgatggaatcaaggatgcatcctggattttttttaacaagacacactaggttagacatgagattgggaaaactcagggagttgtccccctgagggacaagggaaactcgaggtttttggcagtgttaaatatgagctattaattgtccatgggtggcggaggttgcagtgagctgagatcgcgtcactgcactccagcctgggtaacagagcaagactccatcccccagcaccagaaaaaatgcaggagcgaaggagataggatccacagcacaaagggaagaactaccctttaacacatacagagacatttcacaaggacaggaggaaagagcagtatttaaacacaaagaggttgaccaggagcagtggctcagacctgtaatcccagcactttgggaggtcgaggcaggcagatcacttgagctcagcagttggagactaccctggccaacatggtgaaaccctaaaaacacaaaaattgggaaatgcatgttctagctttctgtgtgcttaggtgcccatgctactgagggtctaagtccaggcagccgaagagtgtggtgagcaagatgaacaaagatgcgcagatgagagaagccattaacatattaaagtaatttaaagtttgggtggtctggatatcatactgttttagcctagattttactctggatacttttcagaagtagctggcactttaaaccatatgttctattaaacgttctttccaagaaatatcttgagtgatcccaaggaaaactggacaagtggaatctctgtctttcaactttgggatagtgattatacctctgttagtgctcatccacctaacaaagcttggcaatccaagttagtatcccaggggagtttagtttggttggatggtggaagactgattttttttttccatttagcactgtctagccaagagacaccactatttacaagttcttagacagctgaaaggaaaataaaaatgcctaatttgtggaggaaatcaggaagtctaaaaatccaagaaaaatattgcaacagaaaaatgaaagctgacttcatcttaaagaaacatggcttacaggtagaaaatgccaatatcaggccgggcactgtggctcacaccggtaatctcagcactttgggaggccgaggtgggaggatcatttgaggtcaggagttccagaccaatgtggccatcatggtgaaaccccatctctactaaaaatacaaatattagccaggtgtggtggcacatgcctgtgatcccagctactcaggaggctgaggcatgagaattgcttgaacccgggaggaggttgccatgagctgagatcgcgccactgcactccagcctgggtgacagtgtgagactccctctcaaaaagtaaaaaataaaatatcaatattgtatcttcaataatttacctttcatatggtctaaagaggtttttgttttgttttgagacggagtcttgctctgttgcccaggctggagtgaagttgtgtggtctcggctcacggcaacctctgcctcccgggttgaagcaattctcctgcctcagcctcccgagtagctgggattacaggctcccccgaccatgcccgactaatttttgtatttttagtagagggagtttcactatgttggccaggctggtcttgagcacctgacctcgtgatccgcctgccttggcctcccaaagtgctgggattacaggtgtgaaccaccacgccaggccaggtctgttttaaaaatataaagtcgttataaagaactctcaagtgtgttgcaataaatgctggattgacgctgttaacaagaataaactagaacttataatatatgccatgtcagagaaggaactagattccagaaaacagaaggtagttctcttttaccttactgcctaatgctagtgtcagaaccacagtaaagccagcaacatttgagaccaaacccgaggacagtcctcaggattttacaggtgaggggcctcggcttcagggaagtggcttgtgaaacacctttttgagggaccattatgtaatagctagagttgctttcgaaaaaagaaatagcctcgagccgaatggggagagaacatggggcattgctattgggttcacagctgtcttgggctaatcagggcaaagcgtagcactatgacctatgcagagttagctcgccagggacagtagctattctagagaaccttttgcttttagctttgtattctaggattgggtgaggtgagggatgcgggcgcccatcccacgtgtgacagtgggaaactaatggaattcagggagttcacttcccggctcgcactccgggggcgggagggtgctgccaccgcctcaggtcgcgcgctccttaggcttccctctcacggttagcgctacggctccaaggctggcgcctgctcttcttcatctccctccccggcccttggcaggagcctcgccctacattggctcttcaagtccgggcgtccccttcatgtgggagacacagcccagaccattccatcgccctggattctgcccggaccagcgacctcgccggactgaagatttctccagcaagattgttttaaataaagtttttgccatcaaaaaaaaaaaaaaaaaaaaaaaaggagatgggaaggagaagagggaggcctagtcgccaaatggttggccaatccgccgcgaaggggctgaagcaggaagcggcgatagtcgtcggtaattggctgcgctggaagcctgtctggactgtaccacctcagtaggagaggggttgctgaattcgagaaggtagctgcttgcttttgagtacttctagtacacacacataattcttttcttatttccgggggtttttgcttggattcagtgggaatacaacaggacgcaggagaagggaagactcgcctggccatttcctcattcctgactcctgtgcattaggccaatccttgtctcttagttgtccccgcaaccccacggccttacgtgcgcgctctcgtcttctcgcgtgcgtacgtcgttgtgttgctgcagccaatcaggccgcgaggtcgccgcggtcgccagggttcgcgcgcacgccccagatcggagtcggggtgggggctatgggtgaatgggagagtgagcggggttgggcgcggcagcgcgagccgcatgaatgagacaaacgtgcgccgcgcgagacgtcgcgcgagcccggactagggagccaatgggaacgctggaagggttcgagacccggcactgagggcaacggccgcgcgccggctccgagacgagcgacgcctggcgggagcgcgcggcagcggggcgggcgtggagcgtgcgggggccgcgcgctgcttctctgaggcaggacggcactgccgggaggcggcggtgacaacgacggcggtggtgacgggcaccgggctcgcgggtgagtgcggaggacaccggtccctgcggaaccggaagtgccgtaccagcgaggtgggaggggagggtgacctctagggaagggggaccgaagacggggagggtattaaggccctatttctcctccgggccgggtcttccaaccgcggcgggacccatgggccttggaaacggacgacgagtagaggccggggatccacgaccgccagggctcggaacgggttagagacggccactcagctcgagaccgcggtccccggtgcctggcgcccagccgccgccccttccgcccccggccctgcgccctcgggctctgcggtccccgcagcccgctctctcaacctcggtgggcctggccgccgtggattccttcttttcggtttcagcggtcgtcagccctgccccaacgggtgattctcctttccccagtcccgtggtggggaccgggtgctgtttcccttttaccgctctgcggttcgagtccctcgctccactctgctgatacttattttggctcaagcttcatcctgttacctgttctctctcacccgtccgcttcctcctcctaccgccaccagccgagtgctccatgcgtttagtactttgtactttttaaagtggagcccgaatgcgtttgtcaatattttacctatatttggggcaggcaggtggaaagtgttttacccacttggccaaatgaaacactgaaataagaagtaagaaagttgctaaaagttaggaaggcagttgtaggatcacatatacgttatacgctagactattttttgccttggattcttcacttcctggttaatgccatcttgaccaagttgatctaacatttgcatatcatccttctatctcagtatacctctgtcctggatcaaatatcttcagaatgctcattatcacccattgtataaacttaatgtttacaaaattatattgccatgtattttgctacctcggtatataatgataacacccacattaaacttcttggctctttct

SEQ ID NO: 5267 - DNA, 6000 bp, Homo sapiens
cccgagttcaagcattctcccgtctcagcctcccaagtagctgggactacaggtgccacaccaccagacctggctaatttttgtatttttagtaaagacggggtttcaccatgttggccaggctggtctcgaactcctgacctcagttgatctgcccaccttgacctcccaaagtgctgggattacaggtgtgagccaccacacccgatctcttttcttacctttataccagagcttattggtctccatatgaatcactggctctgtatcagtctgcctccaaactgttctccccacgactattcattcccctcccctttctcccgcaaatgtgtggtcatgattccctaagctgagggatttattttgcgatgttttccaaactcttttttctttggaggacgtcttgaagtgggttgtgttgttgaacttatgttgataaatgcagcattatgttggagaatgctgaacttatgttggaaaatgctgactctgaataccaagatggttattattttatctgtgaatgaaatattccaggcatttctcagtttcccgtgctctctgaaaaagcagtgcagttataaagggttagcagactttttttcaagttattgaattacggaattaacaattctcgtatatattaactcacttatcttcacaaaaacccatgaaatgggtactattattattatttatcattattagttttttgaaacagagtattgctctgtcactgaggctatagtgcagtggtgcaatcttggctcactgcaacctcctccttccagattcaagcaattctcatgcctcagccgcctgagttgctgggattacaggcatgagccaccacccttggctaatttttgtatttttcttagagacagggtttcaccatgttggccaggctggtcttgagctcctggcctcaagtgatccacctgcctcagcctcccaaagtgctgggattacaggtgtgagccaccacgcccggctgagatgggtattattattatctttgcttacggataaggacattgaggcacaggggcattaaatcaattgccaaaggtcacacaaccattagtggtagaactgagatttgacctgggtagtttggctccacagcctgggcaggcaaccactgccttttgcagcatgtctatcagcatgctatgtgagcttgggaaaatcatcttatttctctgtacttaatttaatttataataaaatggggataataatatgtaccctaactccctccctgagtgattgtgagatatcaggacaaaacaaagttataaaagtgcagtaaaattcagtatggctattcaaacattcaaacgaggaaatacattagatggcttatttctttaattacaaggagtttaaagccacaattatccaattgccctttatctgtgcttcattataaatatcctgttcctctttttaaaggaatagatatacttttaattttttttttttttgagacatgtctctctctgtcacccagcctggagtgcagtgccgtgatcatagttcactgcagcctcaaaattctgggctcaagcaatcctgcaccgcagcctactgagtagctggggactgcatgtgagcaccactatacctggctaattttttttttttttttgagacggagtctcgctctgtcaccaggctggagtgcagtggcgcaatctcgcctcattgcaacctctgcctcccgggttcaagcaattctcactgcagcctccaccccctgggttcaagcaattctcctgcctcagcctcccaagtagctgggattacaagcacacaccaccacgcccagctaatttttgtatttttagtagagacgggatttcaccatgttggccaggatggtctcgatctcctgacctcatgatccacctgcctcagcctcccaaagtgctaggactacaggcgtgagtcactgcacctggctcgatttatgtatgttttgtagaaatggggtgtcactctgttgcccaagctgacaaagaattcttattattattatactttaagttttagcgtacatgtacataacgtgcaggtttgttacatatgtatacatgtgccatgttggtgtgctgcacccattaactcgtcacttagcattaggtatatctcctaatgctatccctccccgttcccccaccccacaacagtccccgacaaagaaattttaacacagttgaaactgtacaactatggaaggtgccaccttgggaatgtctggaaaaactaaaaaagttaaaatggcaaaaactccaaaaattattgggtgtcctgtggcatgctaggccttatctaaagcacctttctggattacctgattttttagtgatttttgccttataaaatcttgcagctattttccaacttggtaagttgtagaaaattcataggaatgccaatgattcttgtccatagagatgcctggtagaagtgcaattgctctcccagcaccccgaggccagttctgcatttattatttatttttattaaaaatataatttttaagacagagttttgctctgtggtccaggctggagtgcagtggtgtgatctcagttcactgcaacctctgcttcccaggttccagagattcttctgccgcagcctcccgagtagctgggatttgtaggcgtgcactatcacgcccggctaattttttgtatttttagtagagatgaggtttcaagatgttggccaggctggtcttgaactcctaacttcaagtgatctgcccgcctcagcctcccacagtgctgggattacaggcatgagccactgcacccggccagttgtgcatttattaacatgttcgtttcagcattcctgattgcctatatatgtgtgtacactttgtgttttcctctggacagggctagctttactggtctcctcattcattaatgaattaaagtctttgatgtgtgtgcattttatatttgtagaggagtcatgattttactcttttcaaaacaattatcctgtaacaggaaccctctgagcagaggcagacaggccacccttgattcctgctgtggaaagagaattttttactccagaccccaatggtccttttcagattcctaacgtgaagggttgttcatatctcggcctctcgcggaagactctattttcttgaagcgcggggaactacgtattcccactaacaaaaatctgttaaggggcagggcgcagtggcgcacgcctgtaatcccagcccttcgagaggccgaggcgggcggatggcttgaatacaggagttccagaccagcctgggcaacatggcgaaaccctatctctacgaaaaaaacacaaaaattagccgggcgtagtggcgcacgcctgtaatcccagctacttgggaggctgagatgggaggatgggttgggcccaggggatcgaggctgcagagagcggtgatcgcgccactgcactcaacttgcgcaacagaatgagactctgtctaaaaaacaaacaaacaaacaaacaaacaaacaaacaacccccaaactccccaaaaatgtgttaggggaaggaggtgggacagtgtgtatttctgatctactcgcctttcctagtatgaccaccagggggcgcggaagccctcctggtactaaggcggggacaacctgcccagcgagcacagcgggcagaaggaagtgtgccggacgcgagagagaactacggccgagacccgcggggccggctcaaagcccgacctctgccatacgcaccgtatctttatgggagccgatgaggtcagcagggagcacgcgttcagatggcagaagagggcaaagtactgctagaattacaaagatatttacagctttttaacctgaaagcacagagcagatcctattcttcagaattaaatcttcggctcgccagtcccgtttatggatctccactctgatgaatgtgccatttgttcccaagaagacaaatagggtagggagaagagggagaggcggggagaagactcgagataaagggacgatctgcttttcggaagcagaagccgcctgggaaccacctgcacaccaagcaggctgcgaggacggggagcgctccagtgcaaagttctgtattttaaagcccctcctcgctcacaggcttcacagcgaactacgaagtgggtaccatctctgatttacagacacgggaacggggtcctcttgagaaacgatgctttcccaaacgtctgcaaattgtgagtgccaagtgtctccactggcactaacaacatcgagctgcttacgtttctcggagcggtcccgatttccaacaagcaaaagatccaaattctctgaccaccctgaccgtcctgtatctccagatctccaggtctttcctctggacacctcctccatccccccactttcactgccagcagccctgaggctgcgcgggatcccgctactcggaatgccttcctcctggcgggatatttttagaacactcgactgccacccaatgtagcccacatcacattgtcttatttgttttcgggagcttgtccccgcctagcaaggagtcggctaagaactggatcctagcgaggagcccggcacagacagcgaatgaccgcagccagacagtcgctcttgctcttcctcggccctgcggcaggatccgccggtgcaggggcctctccccggactccacgcgtgtctggagggctctcgggttagggaagggggctttggagacgccccgggcggccgggcggtggcgggacgcgggccctttaagaaggagcgaggggcgcggccaggtaggggcgggtccagggcggatcagcgctgcgccggcgccggcccgggagccggatttggagcgcgaggcgccggtgggggcggagggggctgcgcggcggaggctcccgtggcctcggacgctcctcctagctagcggccgccgcccgccgccgcctgcgcctccagctccttcgccccggcgggcccggccgccgcttccggcagctcacctgggaagcgctcacctgggacgcgctcacctgggacgcgctacctgcctccgggcgcctgggcttcaggatgaaggaccgtctggagcagctgaaggccgtgagtttcgccgcaggcggggtgctgccaggaggggtgctgcatgggagaggggcttccctttgctccccaagtcgaggctggaggggggcccgagccggaggcttgccctccccaagcccccaccgcttcccgcgccggttccgcaccctcccctcccctcccctgcggggtcatgtgcccggtgattcatcgctaggcaatgattttcctgaacgcctctaactctcccaccccgcaagctggacagtgtctgtccagagctggttcccgaagcgggtgcttgggcccgggaggtcaggggtcccttcaccacctgcccactgctgcctggcactatgcccaggaccagcctccttctccctttcctgtttctctcctgaggtgctacaggcctggctgccccttcccccagggagcagctcagagctctctggtgacctctggagctgtgagccggtcacatgctgggatgggtcagctcctctccaaccggtggtctgtaattgttatccccgggtgtcattgtccccccctcccccgccgtatcttttggaacagctgtggttaggtcaaaggatctgaaggtagactacctccagccttggctgcgcaaaagctgtaaagccttaggttacttactgtgagtctctgtttccttatctatcaaatgggaatgatcataccctaggaatttgttgggaggatcagctgatacaatggaacttgatacagaaaagggttaacgcatagggttttaagccagatattcattgactcattcagtacataattattgagtgtattctatggggaggtccagtgctaagccttggagattcagtggcacaggttctaccttaat

SEQ ID NO: 5268 - DNA, 6000 bp, Homo sapiens
tggggactgttgtggggtggggggaggggggagggatagcattaggagatatacctaatgctaaatgacgagttaatgggtgcagcacaccagcatggcacatgtatacatatgtaactaatctgcacattgtgcacatgtaccctaaaacttaaagtataataataataaaataaaaataaagtctctcttgccataaaaaaaaaaaagaatgtgttcatgtagaactcaatggttacctttcgtgaggagaatgcaaatcaaggcaaaagaagattaaagagctgtaatatttcacatgaagcccatcttgcactatagaaaatgtacttatcaggatgaaatcccattaaaatggctgtcaaaaatgaaatctgtttaactccaaactaagatacaattttacaccctaaaataaagtacataggccaccctagtagaagaggtgatctttcttagagaaatgcatttgttttttcctatcttatttccaactatctcgttataaaggtcttttagacatacccagtagttctacaatctggcttcacattagcgttaccttgggacctttaaaaaatgtttgtgttgggctgagtgcagtggctcatgcctgtaatcctagcaccttgggagtttgaggcgcgtggattacttgaggccaggagttcaagaccagcctggtcaacatggtgaaaccctgtctctactaaaaaaaatagaaaaattaactgggcatggtggtgtgcccctgtaatcccacctactcaggaggctgaggcacaagaatcgcctgaacctgggaggcagaggctgcagtgagccgagattgtgccatggcactccagcctgggcaacagagtaagactgtctcaaaaaaaaaaaaaaaaaaaagttcaccttcatgttgggttcatgacaaatatcctgatttaatgtcttataaacttcccagaagattccactaggtagttgaaagtagaactgttgtattagcattttctatctaggctatttccatgtttaccaataaatgacatgataaattcttccagttttcttaggacctctaaaacaacagtgccttcattcaaatgctaagattggatttctagtccattttcctcgtttatttgaaaacacagcatgaggtcaaaacaagaatgaatcaaaggtagtttctgattgttggttttatttgatggctcattatttcaagacctcttggaacaacaatccttgtccgtcttaatcttttattaatcttacaattatagtaactaatgccatttcaacgtgatttcaacttgtgacttttgcaacattataaactggtaaattatgaattaaacacgtttaatgcaccccaaagtcaaaaaccttaggtggttaagtgttttaagagcttatacatgtgttaagatatataaaggtactgcttcatgaagaatgtgattttaatatgtacacacatgggcatgagtgtgtatgggggggtaaaacagacagtgcaagcaataatatttagtaagtagataagaccagcaagtcttgagaaatatattgctttttagtcaaatggggcacttgtaaatgaatagctagactataggtgaattcactcgaagatttccttttccttttggaaatttgctacttgagttttgaacttgattattctttaaggtatttcagcactgaaagctagtcagtctctccttgatcatgtctccttgccattgggaaatattgcatgcaagtggaaaaaaggtctatgaatcttctatttttccctttttaatttgtttaaaaaattttttaatttatttatttttatttatcagccataaaaaagaataagatccagtcatttgcaacaacatgaatggaactggagatcattctgtcaagtgcaataagccaggcacagaaaaacaaacatcacatgttctcacttgtgggatctaaaaaccaaaacaattgaactcatgaagacagaaagtagaaggatggttaccagaggctgggaagggtagtgggggcctgggaggggaggtggggatggttaatgggtacaaaaaaatagaataaataagacccactatttgatagcaaaacagggtgactgtagtcaataactgtacatttttaagataaagagtgtaattggattgtttgcaatgcaatggataactgcttaaggggatggataccccattcttcatgatgtgagtattatgcatttcatgcctgtatcaaaatgtctcatgtacctcataagtatatacactaggtacttacaaaaatggaaaaaatagggggccgggcgtggtggctcatgcctgtaatcccagcactttgggaggccgaggcaggtggatcacgaggtcaagagatcgagacaatcctgcccaacgtggtgaaaccccatctctactgaaaatacaaaaattagctgggcgttgtggtgtgtgcctgtagtcccagctactcgggagtctgaggcaggagaattgcttgaacccggaggcggagcttgcagtgagctgagatcgcgccactgcactccagcctggtgacagagtgagactctgtctcaaataaatacataaaaaataaaaataatttttatgtatttattttactgttcccccctcagctttaatgaggtacagtcagatacatatgttctgcagatctaatgaacagcatgataactgaagttaatactgtactatgtacttgaagtttaagagaggagatcttaaatgttctcaccaccaccaccaaaaaaaaaaaaagatgattatgtgatctgatgtgatcagtagattatctgctttgtgttagtgacttcacaatgcacacatgtgtcaaaacatgttgtacatggtaagtatattaaatttttatttgtgaatcttcctttgaaagcagtttctcacaatcattctctaaggaattgaagaaagagctcaatcatttttattatttactttgaactcatgtgaagatcttagttattaagacctttacatgcattctgtcatttatactttataccccaaagtgggcactatgatcttcaacttacaaatgggagaaccgaagtcttagagtttaagtaacttcctttcatggctttttctacagctccaaattcaaaaagagcatgttgaaagcatccactctttcctttcatttcttcagatttctttctcttcttcgctgaaggcattttcttgtcatctctttcttcttcagtattccatttgcaatggttctggataaaacggggagggaaggatcttatctttaccaccttccttttggctatttccttctgacttctgtctctgtctctgtcttctctttcatcagtcccttccttcgctcctaaatgtagaccctggagagccgctgccctagggctcaggtgccagctctcttagcagaagcacctgtgcagaaattttctggcaactgggcccctgctcatttcatattcacaatctctgcccacacactatgttttggtcttggtaactggccctctttctctttcctgtgatcacgtccccactgacgctcctgtttgtaggactaggacctcgctttccttgctgtgaacattcttctctgtctcacagactcccctggggcatggatcaggggctgtgccctcattctttctctcaggcctggccctgtgaccttcataaggattgtggtttgaatcttcacgttacctacttccttactccttgtcacttggctctgatctttctattgcctattttaggacatttatttaggataagcatataatttggccacttttgaaactgaaaggaggccgggcgcgatggctcatgcctgtaatcccagcactttgggaggctgaggcaggtgaatcaccggaggtcaggagttcgagaccagcatgaccaatacggtgaaaccctgtctctactaaaaatacaaaaattagctgggagtggtggtgcatgcctgtagttgcagctattcaggaggctggaacaggagaattgcttgaacccgggaggcggaggttgcagtaagccaagattgcaccattgcattccagcctggatgacagagtgagacgccatctcaataaacaaacgaaacaaacaaacaaatacaaaaaacctaaaaaaaccaaaaaacaaaaaagaaactgaaaggaggggttttaacaatcatattaggataacaggcacacttcgggcttcaccattgtacaaaacagagattttgcacagggcttttccagttaaattttaggaaagctgggtaacatttctataccatagttttctctaccataacatcgggttaatagtagtacctgggtcctgggttattgtgaggatgagatgaattaacatatgtaaagcattcagaacaatgacctgtatgtagtaaccatttaatacatttaaacaataattagcattattattatatctgtgatattgggcaaagtaattaacctctctaagcatgtaagaattgaatgtcatcacgcatataaggtacatagcaccgttgctggcacatcatgtaaaataagtgcctgagtgaccacctccctcctccagatgcttctcttacagtgtgactttgtctcttcttgctatgcacctaacactgttctacctccaacccacaacctcttcccacttgtctacccatattgttgcttgtgtttcctgttccagcaatgtgttaagcaacatctgaaagccagaagacagttatccctcacaccagtttcctaatcatcactaagccctggggaaacacaatggatcagcgaggccccaaatgcagatgtgattagcacactggtcagtcagcccgcaaaacactttcaccaagtcctctaaagtgttgcataaggcaaagataacgttaagtctgtggaggcttccgttatcgggaaaagatgctgtagtgatcttttctgagtgtctcctacttgcgacaaggtggacttgggaggaaagccgtctgccaaagcctgaagcctccaaggtatagattccctctccatagacattcccctttcttttatatctttcgttaaaatgcctcccagtggactactggggatgtctgcaaaggtctctgtttggttgctatgtagaggtttggaacatttaactgtgaacatggcttctctttaggatgtgatgattcctttggagccatgataaaaagtgttagacataataatacagcaatttctttgggaaaatgtgggtatggatacacacacatgcacacgcacctcttaggtacattaaatcccactggctgcacctgagtttgtctgccagctctgatgatgaggggtggtctcgatatgcctgaagtatggggtctgcaaagtgcattttagcatagctcaggggacagtggagtgtaatgatagcttgaggttctgatttttagcttctcaaattgctggctgtgtgggcttgggaaagctacttaacttctttgttcctcagcttcttcatctgttagatggaaaggatcatagcagtagtacccattcatctgatgttgtgagaactaaattagtaaacatggataaagcccttagaacaaatgcctgccacatactaagagctggagagatgaacttaactggcagtttcctagaaaatctacatttctctgattttgtgtgtgtgtgtgtgtgtgtgagagagagacagagtctcgctctgtcacccaggctggagtgcaatggcacgatttcggctcactgcaaactccgcctcatgggttcaaacaattctcctgcctcagcctcctgagtagctgggattacaggcgcgtgctgtcacaaccagctaattttatgtgtttttagtagaaacagggtttcaccatgttagcaaggatgatctcaatctcctgaccttgagatcctcccgcctctgcctcccaaagtgctgggattac

SEQ ID NO: 5269 - DNA, 6000 bp, Homo sapiens
aattgtgggcctttagaaggcatgtgatgaaataaaaaaaagaaagcttttgtttcctttgataacttatatatttgttcaatttgactgacttgattggctgtaagtcattttctaagagtttcagattaaaacttaatttcattagttggcaaaaatggttgcagagcagtaaattggtcagagctaagagatcttgtaatgataaagaagagaagaatgtgatttgtatacactactttggtgtcagcatagacgagttgggctattgtcattaaacagaccctgtccttaggggacactggcatttattttgcatattaatatacataggcaccagtatctgaggttaagtgttaagaattttaagagtgttttcttaagaataatacctttctttgctacatatgtactatttgaagaaccatttcttaagcacaaaggaaacccatatgggaaaaaaaaacattttgtgcttttaatttagaattatataggcactggaaaaatatttttattaaaaggatacaaaataatattttttctagattcaaaatgaggaattacagtgcttagatctatcacctcaactttacatgactcctacttcctaatatatttgttttcacattttccctctgttctaatcttttattccagatatctctaaggcttttaccaatctctttagctgagattgtaatataattttctctgatactgtatctcagttcactgctgactgatgtgccacctacatccattctctgcattgtttctattttacccacccaatagcattcaacagaaatgttcctacctggtgtcagacattgagaaatgttgaaatcaaaaagataaataagatacattatctgtcctcagagatacaatgaactggtaagaaaaacacttataaaaatataattttcaaataatggctaatcttggtggattaaacacatctatttcctcatgaaacccaactaaatgactataaagggtctgggagaaagtcataaatccaaaaattcaaaaataatatgagagaaattggatcatttttttaaatgttagaaaccagctagacaagcaataaatgacttagcagcctccggaaagtgaaaacctgactgacggaattggaagcttagaaaaaatttgattctctttgtagaaccccagtaagtctcaagaattataagtgctttcagttgaatatgtctggggacacagctaattgtctgagaaggtagttgtattagtatgttctcacattgctaaaaaagacataaccaagactgggtaatttacaaagaaaaagaggtttaatggactcacagttccacatggttggggaggcctcagaatcatggtggaaggcaaaatgcacatcttacatggcggcagacaagagagattgagagccaagcaaaagggaaaaccacttataaaatcatcagatctggtgagacttattcattaccacgagaaaagtatgggggaacacgcccccatgattcaattatctcccagtggttccctcccacaacatgtgggaatgatggtagctacaattcaagatgaaatttggtggggacactgccaaaccatatcaatagtgaatacttaagtaagtgaattccctgagaatagtgaattaagatccctgaaggcctagagtataaccagtcctaactggaataggagaatataaggcgccaggaagggagagtgtatacagaaaaatactaatgaaacagatcaattacctgtgggtctatagacactgagatttacatttatggtggagtatttaaaacaacttattttcaggtatgtagaaaacagcatatgaaacatgaggcagttactaacttcagagagaaaaatggtcaaaaggaagcgtaatcataacactcataatgaattagccattaatgatttaaatactataaattgagttaactaaaaaatcgtgataaaactatatgggagaatgagggaaaaggaagtgttatggtgggaaggtgtgtccagggtaaaaatgaaggatataggggttagtctattgtcttcagtagtaggaggttagtgcataatatataaaaccaaaaattagaacagtatttaaaatcattcacttagaaatatggagtcaacacaaaaagaaacaattaaaatttaaatacttgcttctggagaaagaaaattgattgggaactggggaagggggcactaatgatttctttcaggctaaatccagtgaacattttactgttgttagcttgtctctctgaagtatttaataataattgaatgatttcttcctactgaaatatttctgtgctcaaaaaatgataagtaatttatttatattacctaatataaccctttcaacaacgctatgacatattactatctatattttacagatgagtaaactgaggtgcagaaagcctaagcaacttgctccagctcacatagggcataggattcaaaatccagctcaaggccgggtgcagtggctcacgcctgtaatcccagcactttgggaggctgaggagggtatattacttgagatctggagttcgagaacagcctggccaaaatggtgaaacccagtctctgttaatatataatataacatattatatagagatacattctattatatatataatatattctattataatataatatatattctattatataatatatattatatattatatctattatatataatatatctgtatatgatatataattatatataatatatagatattctattatatataataggatatatattctatatatatagaatatatatatttctctgtcaaatttcatgttattgttctcttgaaattgttatctgctaataataacctgatactgtctcatttcataccatatggagtgggaggagagactgatgcctgtccttagtccagaatttcaacctctcttaggaagtcatgaaactctgtacccttgtcttctgcaatgccacattttccgagtttgcctgctatcttccttaccctctttttcataatcctctgggaaatcttatttctgattatactgtctctatcctctagaaaaagggtttgacgttttctgcctccacccacaagcctgggtgacctcatccctctgggcgaagagctgttgggtttacctctatagccatgttctcattccctagctcctgccagttatccacttcttgtcaactttatttgaaggtccctacacaactctgatcaaatacgttcaaaattttactatttgttcctgcagttctgtcctggtccatgtctattgccttactgaatggctctatcactcattcagtttcctaacccagaatctgagtgtcatcctttcctgttttttctcctgatttacacatccattataccaacaagtactgtcatttcttgttcctaagcatctttcaaatccattcattctctccaacttcactagcatcacaggtagttcagtaaccatcatcccttccctagagaactgcctctaccttgagcctaattctctgattttattattatttattcctgttgtctgaaaccaggacaatatttctgaaatataatctattttaattttgagaatcgtaatttcagattatagaccacatagtttttggaattaagtaaaactggatttcaatctcatctataccagctatacgaatatctctgagtttcagtttcttcttctgaaaaatagaaataataatattaccttccttcattccctttccatttgtgtgtcttttgctcattcatcaggtctccaattagatgtccccttatctaggaagtctcctctgcctacccaatgttgggttcattgatcctcctatgagctctcttaggatatcctactttaccttgcagatcactgattacaatgggttgtaatgatgtatttactcatctgtattgccactttaccttgcagataactgatagtaatggattgtagtgatttatttactggtctgtttttccaagtagtctataaactctttgagtgaaaattattttttaccattttttcagaagcacacggcacactgcttggcttatagtagtttttctaaagaaaatgctgaatgaatgaaaactgcacaccactttgctttcctcctccatgtaaagtaggcattattttattttacaaatgaatcttaggttcaggagattaacagggccatgcaagaaatgtttgccattggtttgatcttagtcaaagaccagctcgttctatgataccagctgcttccttcacttagaaaggtgttgttttattgccatacaaccaacttgttgccattttatggccactcctgatgaatctctaaaggtggaatttcatgtaaataaaacatttaagttgtgtatattaaggttggtgcaaaagttaattgtgattttggccataaaataatggcaaaaactgcaattacttttgcaccaacctaataaaatagtaatagtagtgctccaggaagacaagagtactgtggaaatgtgtgaccctgtgaaagggggtatttacaaaataccatttacttgtttatataacgacttttgaagagagtctggcatacagtaaatcctctaccactgatatccacagtaattagcagtattattttcataggaaagactgtatcaggcagcccctgctttttcagcaaatttcaaaatagacatccacacccatattgggaacacaaaatcagttaatgcttccgatataaaagaggaactagctgtgcgtctcagaaattctcagcacagcctttaaggttccaaacatctgctagaagaggaatgcagatttaaactgagtgaggtgtggagtgggggaagttgattgggtctagaccaaagaactttgaggaacttgcccagagccctgcatgcatcagacctacagcagacattgcaggcctgaagaaaggtaggtccagggacttgccttcctaggctttcgggctgatggcttgtttcacttcctgggttaagaatttctgggaggggaatgagaagaataatgaggccacttcccatgacccaagctggtattcagggttggggtgggttgagtgcacctttaaatgtgcattcggtggggggatgaggaacagtttttgctacagtcgataggagttagaaaagcctcctaaaggctgacattggaggctggataaggttgtttagttacttttgtcccctgagtcttcaggatatcaaaacactgaaagcaacattttaaacctttgactagttacctcatctactgttaatgcccttcttctgtggtctttattctctgtgtctgactggttatttttataactcaggatttaagaacagatgtatcacatgcagaatttggtgtacatggagtagggcacaggcagggtccccagccttgtacatttagatgggctgtggcctgacctagttctccagtggtctttggcactattcatggggcacccaggcagtaaactgaggctgctcatgataaaatctgctaatgaaaaacaccttgtagacttttagcattcttaggataagaaagaagcttgtaagtggtcgtggccattgtaatctttccccagatgaagtaaaagaagccaataaaagggaaataatgtacccagaatcacacaagttaacaaaagggctgggagaaaaacaaaaacaaaaacaaaaacagaattcttggttcctagcccgggcctttcccccttttcccttcccatgccaccacttctgcatccccatcatccttctaaaaccatccagattcaggcctcattttgggtttctagtctatttgacaactttgccaagaaaaacggatggctgtttgtaccactctcctcatgctctctccttgcaattgtgacccatgaggaggatggtgacataaaaa

SEQ ID NO: 5270 - DNA, 6000 bp, Homo sapiens
tttgttgtatttttagtagagatggggtttcaccgtgttagccaggctggttttgatctcctgacctcatgatccatccgtcttggcctcctaaagtgctgggattacaggcgtgagccaccgcgcccggcctccttcacccactttttgatggggttgtttgtttttttcttgtaagtttgtttaagttccttgtagattctggatattagccctttgtcagatggatagattgcaaaaattttctcccattctgtaggtcgcctgttcactctgatgatagtttcttttgctgtgtagaagctcttttgtttaattagatcccatttgttaattttggctctttttttttttttttttttttttttaggcggagtctcactcttttgcccaggctggagtgcagtggcgcgatctcggctcactgcaagctccgcctcccgggttcacaccattctcctgcctcagcctcccgagtagctgggatacaggcacccaccaccacgcccagctaatttcttttgtatttttagtagagacggggtttcactgtgttagccaggatggtctcgatctgacctcgtgatccgcccacctcggcctcccaaagtgctgggattacaggcataagccaccgcgcctggccaattttggcttttgttgcaattgcttttggttttattcatgaagtctttgcctatgcctatgtcctgaatggtattgcctaggttttcttctatggtttttatggttttaggtcttatgtttgaatctttaatccatcttgagttaatttttgaataagctgtaaggaagtggcccagttttagttttctgcatatggctagccagttttcccaacgtcatttattaaatatggaacactttcccgattgcttgtctttgtcaggtttgtcaaagatcagatggctgtaaatgtgtggtgttatttctgaggactctgttctgttccattggtctatatatcttttttggtaccagtaccatgctgttttggttactgtagccttgtaatatagtttgaagtcagtagtaaccattttattctctatatgtatctcataatatcatgttgtatactttaaatatgtacaatgaaatttattttacaaaatgtaagtgcttgatatcctgatacttaatgtctaaatacttaagacatgtcccctaagaataatattctactatatagctttaatacaattattacatcccaaaatttattaatataataataatccaatatatagttcttattacaatttcctccattattccctaattataaaaatatgaggataatggaggggcttatgtgtttatatataaataaacacataaattatggttcactcatacatttggttctcttgtcctttgagtctttcataatctactcatagagcagtttctcaccattttttgtttgtttgattttgcatttattttagtcttttatgacactgacttttgtttttgtttttttagtctggagcatttgtttcatataatgccccatatcttggacatttcttcttgttttccatgagttcaagttaataattttaataaaaacacaacatagatgatgtgacttaccaacttttcattgcatcacataaggatgaacataataacagtttatttcaattttggtggtggttactttaatcaattgattcgggtggtgttatcagttgaatgtttatgtcttcccgaaattcatatgttaaaattctaacccctaaagtgatggtattaaaaagtggggcctttgcaaggcgataaggtaacaaaggtggagtcctcatgaatgggattggtgctcttataaaagagaccccacagagctctcttgctcctttcgaccatgagaggacacagcaagaagacagacatccttgaaccagaaagttggccttcatcacacttgaggatatgccagcaatttgacgtcagatgtcctggcctccaaaatcgtgagaaataaatgtttgttttttcagccacctagattatggtatttttgttataacagtctgaacagacaaagacaggtggtattcacatgctattttcattttaaaggtatatttttaacttcataactaaaaaggaatcagtagtcttatgcttttaagacaaagtgaatattatgtttcaaaaaatattttcactgaatggtgttagtatccattaaatttgtcatctcatcctctattctcagcctaaatgtattagtctactttattactcaagttacaactgaaagacggaaactcggatatcaaggtataaaagttttgcatttcctgggaacacataattgtagtaaactcttagataaattgatcctaattatgtgtcaatgctcattattcatgaggaagttagagaataagaaggccttaactctttggacccaaaacaactatctgagtttttgtttctcagctagtcctgtttcccaggtcccatctgcatctcagctttcatttcccactctccaactctctccttcacgaccaggggaatcttctattccctaaggacatctgtccttctcttatttgatcttatgtcagtttgacatggcatggtttaagtcaatgtttccccatgtagctgaggtgctaagtgcaaatattaactgattcagagaaccatcaaccttgtcaaaaccataaaactgctctttattagttgacccaaaatcataatttggacagagatatttcaagacattttcagatataaaccataaaacaaatataccaaataatatatgtaagacacaaagagaaagcaattgatccgaggctactatgtatataacaaataagattttatcttgttaaaacacccgcatgcccgcataaatcagtcagaaccagatgactctttctagctgttgattcctcctcctcacaaagagcccacacgcttcattttgcttaattgtcactttgaggaaaatgtttcttcctttctttccttcacacttccctcttttccttcattataggaagaaacttctcacttacatatgagaaatcacagtcacttttgtgaaatagcttatgctgaacattagcccttccttctctggatcccttgaatgctggaatagttaccaggctgtgttttcaactgaggacttcctgttgcccaatactaatgtatccaatgcagattacaagaaagattaaaagtcttgcaaacacatgaatttttttctttctatcccaagcatttaagactttcttagtacttttcttaagataatatatgcaaagggagagataagtggaggagttagaggaatatagtaatggaggaaggaaaaggagattttgcttactagtttctagcttttgttttccagcaatccaaagaacaatatctcactaaaaagtttatgatacatgctttagaaagatatatcaaaagagaagagttcctagagtacagggtatgagaggtatcatggaatggagggggaaacacgataaataagagaaggacacatgtccttagggaatagaagattcccctggtcctgaaggagagggttggagagtgggagatgaaagctgagatgcagatgggacctgggaaacagggctagctgagaaacaaaaactcggatagttgttttgggtccaaagagttaaggccttcttattctctaaggagggatccctagaactagaaatgccagggagacagttttgcccatggacctgcaggaacaagagatattttatggagaatgtgcacagagagttgtatatattgttagagaaacaccaaaatttatctccaactcctttgttgtcaaacataaatatctgtttctgagctctgccacgggaacttgggagcacttcaggtgagtgcagagccaggaaaagacgcatcaaaatgagtagaaaaagtcgtggcattttactcgtcctggcctctttcaccctgatacagtgagactcgatctggagaaaaccctgaagtcccagcttctcccttagggaagcaacaggagtgggccatgagtccagcattctgggtttccagcggggttgcccaaggcactggtttctgtcttacatgactcagagtgcagagtttggatgccatgttgggggcctctgagaacaaaggcaagcaccctgtttcagcactagggagattgtagtactgaaggcggacaccagggggagaaagaggttacaggctccagacaagaaacaagcaaacctctttaactgggaaattacacacacaagcccataaaaagcttgaagggcccctagaatctctagctatgctaaccaataaaggtcttccaatgtatgaagccactctgtaatgactggaggaggttgggtgtatttttcaaatattaaaagcactgcaggataaaaactaagagcatgtctagtaaaatatgataaacatatctaagatgcatgctaatagacaaaaaataaatgattagagtgcatttgtctaaaaaattcatcaaatatatggcaatacagttgttgtcagtaggactgggcaaagggacattgctgcatattgcaaattttgtgtgaccctttgcctctggatattgggacctctcaagattcatgctgctgccaccctgtgatgtgtttattatctataatggactgtgtcaaacattatggaaaaatcctcatgataccaaggttgtgtggctttcactgctccataatatcagtttctttctctaacacacaggccaagtctggactaattggcagaaactgacttaccagttttgcagccagaacttgggagctctgtacttttaagagctaaatctattttttcttccgtagttggcaacaccattatgacatcacaacctatttccaatgagaccatcataatgctcccatcaaatgtcatcaacttctcccaagcagagaaacccgaacccaccaaccaggggcaggatagcctgaagaaacgtctacaggcaaaagtcaaagttattggggtaaatctaattcagaacatgttggagaggggttaggggaagtgggaagagatgatgtatgttttgggactggtcatccttgtgagtgtggagacccttaagttttgctggagggactttggggtagaagccacttggagaaaactgtcccagaacttttccacaggagattgtcttagaaacgttttttcccttattctgaatatgaggagttgattttctgttgttgtctttgtatttttgcaatacagtacttctctatattttcttttacgaaagtaatggtggtaaataatgacatattgtatatacatttttctgtatttcacaactgcatgcttaacaatccacactgattctttgcaaggaatttttcccttactgcaaattacagaaaaaatatacctcctctccctgttttcttcttacctttttgagaatggaaatgatatttaccttttatttgtctgtttctcctctcatccagagtttattaaagaagctgtattgcatgaagggaggagagaaagaagggatctatcttggattgggagggaaacacagagttttggtttctagaattgcctctgcacttatgtgatctgaggtgaggcactctgtttgactggatttcaggacctggtgggactggtttccttgcctcatgtacaatcatatgggtttctatgaggctcaggtgacaaaaggtctaggaaacttcttggtaaatgataatagagctgtgaatctctgaggtggatgtcaggaaggaaaactacctcctaagacagagcttcagttatacatgagaacatgcagtatttggttttgttagtttgctaagggtggtggcctctaaatgatgagaacacatggacacgtagaagggaacaatgcacactggggcctttcagagggtggagggtgggaggagggagaggatcaggaaa

SEQ ID NO: 5271 - DNA, 6000 bp, Homo sapiens
tgggagaggggcagggaagtgctaagtagagaagggcagggtccctggcgaggttccaccctcggcctttgcccacaaacccaggtgaggacaggcactcctgttttcatgccaaatgttgcatttccaagccagccatgcccctcctcctgtgcctataaaaaccctgataccctagtgggtatacacacacaagtggctggatgtcaagaggaacacactggcagaagaacacaccaacagttgctggcagaccatcgatggcagaacaaagcagataccaaaggaaattcagctgagggtggttggaggagagccaggctgctgagcagccctactccagagaagaccaccttcccactccatccccgttctggctccctgtccatctgttgataactactatcaccactcaataaaaccttgcactcactctccaagcccacatatgatctgatttttctgggacacttgggcaagaaccctgggatacagaaagccctctgtccttgcgataaggtagagggtctaactgagctcattaaagcaaggtgcctgcggacggctaagctgaaagagcacattgtaacatacacccatttgggcttcgggagctgtaaacactcaaccctagatgctgccatggagtcggagcccacgctccccatgacctgcccgtctgcatgcttcccttaggggtttgagctgcggggcaccaaagaagtgagccacacccccatcacgcaccctgcaagggggataagggaaaactcccctcgtttcaatatgttaaagcttattcaccccatgagagccatttggttggtaggctattaattattgcctcaatttcagagcctgttattggtctattcagggattcaacttcttcctggtttagtcttgggagggtgcatgtgtccaggaatttatccatttcttctagattttctagtttatttgtgtagaggtgtttatagtattttctgatggtagtttgtatttctgtgggattggtggtgatattccctttatcattttttattgcttctatttgattcttctctcttttcttctttattagtcttgctagcagtctatcaattttgttgatcttttcagaaaaccagctcctggattcattaattttttgaagagttttttgtgtctctatctccttcagttctgctctgatcttagttatttcttgccttctgctagcttttgaatgtgtttgctcttgcttctctagttcttttaattgtgatgttagggtgtcaattttagatctttcctgctttctcttgtgggtatttagtgctataaatttccctctacacactgctttaaatgtgtcccagagattctggtatgttgtgtctttgttctcgttggtttcaaagaacatctttatttctgccttcatttctttatgtacgcagtagtcattcaggagcaggttgttcagtttccatgtagttgagtggttttgagtcagtttcttaatcctgagtaaaatgctattcttaacatcagttctgttccattggtctattcaccttgttactaggcttattactaggactatgtagtatgcttcctcactgttctatttgaacattctaggagaatgaaaacaccatagaggaaggtggttttttctgttctgtccattgatgcaatccaagcacctagaacacagcctggcacagaagaagcactcaaactgtggtatttcaatgaaaagtgaggaatatttttcatgtggaattttttaaaggaatgttgtgccctacaccttttcagtaaggagattttctgtgaagtactacgcgaggcctgctgtgtgcatggcgagatcagcagaggcagagaccaagagaggcagaaacctggcagagctgctgaggatggtgtagaaagagactcccccatgcttagtcatcccatcatgcccattgtcatgtgtagcctccagttatacaaagctagagatgctcagcctcatccccatttgagataattgcattcttttgccctattcatcatcactgaatggtgagtcccagcaattctgatatcaagagcaccaggaaataaccatttgtttgtatttcacttggaaggtagggtctcacaccaggtttggggatttactgttcaagtccagatgaccagtaaagcaagttcctggaagtaataatatagcagttaagagcacagtcccagccaggcacagtggctcacgcctgtaatcccagcactttgggaggctgaggcgagcagatcacgaggtcaggagtcgagaccatcctggctaacacagtgaaaccccgtctctactaaaaatataaaaaattaaacaggcgttgtggcgggcgcctgtagtcccggctacttgggaggctgaggcaggaggatggcgtgaccccgggaggcggagcttgcagtgagcagagatcccgccactgcaccccagcctgagtaacagagcaagactccgtcaaaaaaaaaaaaaaaaaaaacgatcacagagcacagtccctgaattaagattacctggattcaaatctagacttcattactttctagggtgtgtgacagggtaagttacttaacctctctgtaatttaggttatcagccaaaagacagaaaccttctgttattttagcagagaatacttgctagaaagagtcattacctgtgtattaaagaactgcaaaggcataaagaaaacactgaaataatacagacatagaaactgcatgaatcagccacagcccagtcactactaactccctaagcaatccctggcctttagtttccccacctgtaaaatgctgaagttggggggaaaaatcgtttcactttcattccggtggcgtgatacgagattctaagaaacagggagaaaattccgtgagtggagccaataaccaagtcaaacatcaggggggtctatgaacactgctccaaggaatctctctctggataaccagaccttgtgccctagccccagcccgtcatctccactgctagagaaaaaaaatacagttagtctgtccaaggctgttagagtcctccaacatataagacgcatttccattttactagcttcatggtctgcttggggtggggatggcggggagatcgtatccttgaagtaggcactaggactgtgagtcacttgcctgtctagagcaccaggactgtttgcaaagggctgaggagatttccatcaatggaaaagagcatgaatttagagtaaacatagattacacttagagatcagagatcaatctagagataaaatacacttttctctaaagggggtgggagaagatgttggacaagaaataccagattttcttaatggttcatttatgtcaggctctatggtggggacttttatgttatttgacttaatcctcacaacaattctgaaaaatcttttttcaaattttatgagaaagtgaactggatatttaactgattttctcacgaattccttctgaggctcagaagtgtgaaagaagcccaaatgaccaaggttctttaacaatttggtcaaaacaggtcatagacccagaggaaggtctggatcctggaagttttcttaagcaaagacagtgcttgttgtggatatgaagatgttgactaagctgggcacagtggctcacacctgtaatcccagctttgggaggccaaggcaggtggatcacctgagatcaggagttcgagaccagcctgaccaacatggtgaaatcctgtctctagtaaaaatacaaaaattagacaggcatggtggtgggcacccatagtcccagctactggggaggctgaggcaggagaatcacttgaacctgggaggtggaggttacagtgagctgagactgcaccattgcactccagcctgagcaacaagagcaaaaaactccatctcaaaaaaaaaaaaagatgttgaccaaatggcagactcttgccatgaagcaagcccagacctcagtgccaagagatgtgaattagattcctgcctcttccacagactagacatgtgactgggggcagattccttcagcaatatcacctcatttggagaagaactggactaaaataccctccaagtagtttatgagttatttaaatctcccaggcttaggtttgctcctctcttaggggatagccttgccacccttcaggaaatggagactgtatatggagcatgttgtgccgccagctgctgcatgtcccagagccatcttaaaccctacccttctgaacaatggctagtctacaagaagccttaaaagggatgtgaaagtggcaacagtgtcccctcaacaacaaatacttccccaaatatgagcttgtgtggagcctgatgactctgcctctgaggccaatccactggcatctttcccaagatgtgcctggacttccctgagcatgaggccaaagatggagaatggaaacacccaaaagaagtaacaaggagacacggaattttccacaggttgctttcagcttaccaagagcctggaaagtgagagaatagattctccaaaattcaaaactaacattactattatcaatatttattgtctactttttgtaaactctttgcatcttttttctttaattctcccaacacccacagagtggaattattattatccatccaccatttatttaatagacaagaaaactcaggctaagcaaaactagatgacttaaataattctatgtaggagtagggaaaatgaattttaactgggaccgtacaaatcactagtctgcacaaaggtctttttctcatgtgtcacttctatcttgtgtcattttgccagacctcagaatttagaaagaggaagcagaggcactttttatatatcaactgtctgtaactacagcaaaattcacatcctgtgtaatcataaatactgctctaagaaagggacaggaagtctcagaggctggagagcagagcaccaagatcgttctggcaggaacagccagtgggaggttccagctgagcgctccccagaggtgagctgatccccagccacagcacacaggaccaggctgcgagaacaggtagacaccttggtttagatcatgacttttggggaagattgtgtgcttttgaaaagacagccagggaattggattatcatcctgtctctgattctgaccacctgtgtgagttggagcgtcagctcagtcccctttttgggtctcagtttactcacttgtcaaataagaaaattgggtaaaaccattcttaggtttccctcattgaggtgattttcctcaatgttctgcattctcctggtgtgtcactcagtcttacagagtctactctcaacaaatactgtgcaattagactgaatcttgcattagaaccccatggtcctactctaattctgtaatacagaaaattgctgggcagagctgttgacctccatgtcatgatttatcttcaaagcacggattttagagctgtcttgaaagctgtgggtccctccagtctatctcctcaaggcgaatgtggaaggacaaagcatcctctcagactgtggtgtttggagatgatagcatcagtctggagacttttgtgaaacataaagaatcttggttatataggattccttctaaaagtagcaacgtgtatctaaattcaagtgtcatagatttaaatgtaataattccacttccatacatcactgtgagataattaaatgcaggaggtatcacaaaagtgcaaagatgttcattattgcattgttcatagtggcaaaaagaaaaaatagaaaccacctaaatagtcatgaacatgtgattgattaaatgaatctagagacctccatttatttaaatataccatttggctttttggttgtagtaaaatatgcttaaaataattgtagccttttaaccatgtgtttttttgttgttttttgtttgtttgtttgtttgttttttaattgagaaagagtttt

SEQ ID NO: 5272 - DNA, 6000 bp, Homo sapiens
caaatggggaaacatgaaagtcagaagctcaagaattggagataacataataatttgaacaaggctattatgaaaatacattttaaatcattaaagatgtttaaaaagtaatagaaaccaggccaggtgcagtggctcacaactgtaattccagcacattgggaggctgaggcgggtggatcacccgaggccaggagtttgagaccagcctggccaacatggtgaaatgctgtctctactaaaaatacaaaaattagtcagggagggtggtacatgcctgtaatcctagctacttgggaggctgaggcaggggaatcacttgaactcgggaggcagaggttgcagtgagctgagatcacaccattgcactccagactgggtgacagaatgagaccctgtctaaaaaaaaaaaaaaaagtaatagaaaccaaaatggaaaaaaaaaaaaaggacagtaaaggaaaaaaaagatatgtgcatttgagaaaaaaatgaaatcacatacttggaaatgaaaattgtctttgaaattaaaaactgagcagatcagttaaacagcagattcaatatattcaaggaaacaaagagtgaaatggaatttagatttgattaaatcacacagaacacaacacattatgtgtgtttggaaaagatggatgaaagcctaaaaggtatgatggatgcagggaagtggagaggttcagtacatatctagtaggagtcccagtgagagattataaaagagagagtatatgcaaaagtaaataactagaaattttttagaatttaataaaaacatgagatttcagattgaaggaatgcattgagaccactgcaggatacacagaatcaaatacacacctagaaatatcatcatgacaataaaaacaccatagtcaaaaagaaaataataaaagcaaccagagataagtggcagattactctcatctatcattaggtgggataccaaagttctgagatgatgccgttgctgcttatttcccttcatctattaagaaatctgaaaaagaaagcagaaaagaggattaagcaattttccctgtctccttttctctgcattgctggagcctcatcgccctgtctcctcttagccaggcacaagggctagcttgtcttgggtaccagccattcatgtcctgatttgcagggtgtcctagtggtgatgctcatcttcactgtgctggagctcttattagctgcatacagttctgtcttttggtggaaacagctctactccaacaaccctggggtgagtatgctgacatgtcgcctgatacctgctgtgtctcaggtccaggctacaataatccaacctcaaaaagtggcaaaaagaagaatcaattattgttcatgaggtgcatgtggaaggccacttttataattaaaaaaatgagtttaacagtgaaaccccatctctactaaaaatatgaaaaactagccaggtgcagtggcacacgcctgtagtcccagctagttgggaggctgaggcaggagaattgcttgaacccaggaagtggaggttgcagtgagctgagatcacaccactgcactgcagcctgggtgacagagtgagactcagtctcaaaaaaaaaaaagagtttgtataaatgggctccttctggaggacactctggtcatctgggatcagctggtgtctactgggaagcagaccagttagagaattgcttaatatgaagctagttggttttagaaatcacatagcccaacccctcatgaaagaaccacggcttggataaaattacatagaaaatgaatgacacagactattgggctgagaatgagaacgcgtatcccctcacttttatcgggaacacagctacctgcctcccgagagagtctccctagccaagtttccttgttaatgtgatgagactttactagaatgtctctgtcctgtttatgcttccctgtgctcttccttacatccccttagctcttgatgttataattttaaaatattttcatttcccctaaaggctacaacaacaaaagaaatgtttatagaatttggatgaattatgatttaactatgatcctatttaaaatagtaaaataattagcagactggagaattgcattatttttaattaatattgctgcaattacatattatggcaaagttggaagaactagtactacacaaaacttggggaaaaggtattatgagttatcttttttaatctccgaaatcaaagtttaaaaattctaaccaattatgtattttctagagttcattttcctcgacccagtcacaagatcatatccaacaggtcaaaaagagttcttcacggtcttggatataagtaactcttggcctcagaggaaggaaaagcaactcaacactcatggtcaagtgtgattagactttcctgaaatctctgccattttagatactgtgaaacaaactaaaaaaaaaaaagcttttgttttgtatttgtttactatgagtcgttatttaatttctcttgaaaataatttcctcaaagcccaagtcaataaatgttatcagccagtcttccaaaatggtcataaactttataaactgctttgggtaaactgagcagaaggtgatacacagaagggaaaatgtgcactcatgctagtgtgaatttggtaagttgcgtgactctgcaggctgtttctgtattattttcacactcatattgcttaaatattacatattagggattgtaagaaaactttaattaaaaattaaagactatatataattaaactactctgccctggacactctctgagaaacagatctactgggccctttttcatgagccattaggtggaagacagcaaagagatcttctcaagtgcttaggattacctctcaacacacagcaagcatgtccctgcctcccatgaatcttaccatgtaaatccaaatctctgcaatcctgtggcaccaaccagtggtgctcattctattgtttaaaaatggccttcttggctgggcgcggtggctcactcctgtaatcccagcactttggtaggccgaggtggacggatcacccgaggtcaggagtttgagaccagcctggccaacaaggtgaaaccctgtctctactaaaaatacaaaaaattagccaggcatggtggtgcgcacctgtagttccagctacttgggaggctgaggcagaagaatcacttgaacccgggaaggggaggttgcagtgagcggagactgcaccactgcattccagcccggcctacaagaacaaaactccatctcaaaataaataaaaaaataaataaaaataaaaatagactatatatagtctttgaattcatttattttaaataaatgaataaaataaaataaaaaagaatattcagtcgttggcacataaactatgttctcttctgtcatttcagggtaggagtcaatgaagacatcttagtcttaacaagttacagataatctctgactggcatgttttctgcttctagcttggagctaaatgctgctcatgctgaaaagaataatgtctatttctttgtttgggtattagctctattttgatctatagcacagttttgtaattcagatcatcacccctgcactttgtaccacatgggcgtattctttcttcccagtcattgctgcaattatcttgtctgttctttgtgtaatatgttctgtgtgagcctctgcattaaactcgatttcttgggcaattatggaaattccagtgtggctgcagtttaactttgcactctctatgcatatgaggtttcctaaataaatgaggagtagcatagtttaaaatatatatatcttataactttctacaacaaagaattattgagtccaaatgtcatcagtgctcattttgagataccctgctatcgatggtcgctacaaaccaggaaatactcaagttattatgtgtatacattggttttagttttatgaaacaatttaccttcatgatctcatagttaaaattgtaataaatttaggaatataaaggatcaatatgggaagcaaaatttctaaaggcagtttctgttgttttaattagtatttgtgtagttcaaaccaggaaggatttgactatcattagattttgcttaactttatgaaagctaaaatattctctgttataaaggggcaactccatctggtcctatagcatctttactactgatttttttttgtttaatttgaaaatgcaaagaattgttaaatgttcttaaatgttctcactacaaaaaaagaaaaaagataactacgtgaggtgatggatatgttaattagctggattgtggtaatcattttggaatgtatatgtatatcaaaacatgtagtacaccctaaatatatataatttttatttgtcaaatatacctcaataaagatggaaaaaaatcgaaattcaaagttatctactgatttttataatacagagaaatatggttaaacagtaagttagaaaattcatcaagtaaaagaaactcctttcaaaggagggcagaagcgtggctgagtttaaaaaacatagattttggagacaggtcaagttgagtttgccccttccctgtcctgtatgtctttgggtgacataaccttgctgttcctcagtttcagtattgtagaactgttaaaagaataaatgttagtgcatgtcaacaccttctacacagttcccagaacataaggaatattccataagttttagttcctttataactcatgaacatatgtgtaaggacttgtttcgtatataccatctattctttgtttaccatatgtttgtaagcaaattgacaagagagtaagtcttctggatacagtacttttcaccaggaagatggggggctgagcatgctctagaattctaaaactctgtgactcaactatgattctgagattctactactgagtagagtcatcactaagggctcatctctgagggctccatgtgactctggtggagaggtagatcatgatttgggcggcaatgtttgctcactctttcccttactagagttctgccatagaatcatggagtcaacatcccaggacagaagggcaactcacgtcatcactataaaaccaaacgaaactgtattgactgcatttccctacagacctcatagctctctgctggattttctgaagggagagccaagagtcttgggggtaagtcctctccagtcaataggtcttccagaaggggagaaaagaagtttatttattcatgtatgtctgcagagatatgcagagattattttcagggagggagttaattctacttttcccccttcaccttacatgagaaattagtactgatctttgaatcccagcagagggggaagcaagaaactagtataactttttaaaatatctcattgaggaagtgacttcagggtgtggtggcacctcccttgaagctaagaaaccataagtggagaggtttgacttccccttcatgctcttaaaggaattgggagtgcttcaaaacccatattcaaagctccacagtgaaccaaatgataaggcatgcaaaacgtttttcatcacaaatgcacccaggggagagctgtatgcacagcctccatcctttgtacaacagcaaaaatcattacttggtgtgccacagcccagagatgtggcctggggacaaaatctagactgccagagaagttgcgccctgagaaccactgctgctattcttttccctgcagattcctacaagctgataggcccactgggctattctcatccctagttgggtccatggatgaaggggaggtgaaatgcaagctcatcccaggttctccactctatgtcatcaaactttttaaatttttagacaactgggatgagccccaattccaaaagcctatactgagtgctggaaaatgtgggggtgggggctgttaggataataataggatactggtgagacagacgaaaaaacaaatgtaaaggtgaatagt

SEQ ID NO: 5273 - DNA, 6000 bp, Homo sapiens
aaatattaatcttatccatacccaccctcacagacacagccaaaataatgttttaattaagtatttgagcagtctatgacctggtcaagttgacacataaagttaaccatcgtattttgtttatactcacagtcttggggccacaatctggaatgagtcttagtcgaaatcacctgcacagatcagaggagctgctgggatgcaaatgtatactaagcaagtactcattgagatatagcattagcaggaacaaaaatgtattattttaaaacatggatccagagatcttctctggaaaataataatctatatttatgcaacctctcacttgtggttatcatgcctagaaaggcatgcaggcccatcacatttctgaaaggctgttactgttagtgaaccacacagacacaaagagtcctgaggaaagtgcagatctcctttgcagccataatatcctccatcagttcacaaggtactctttggacatttggaaattctcatctctcactctgcttcccccactaacacatacacacatacacctttctttccctgtggtccctgtgatttttttttttttttttacttctctgacctaccctaggattcaaatgtggagtttctggtcagagagttaaagttttatgcatcactggagaaagctttagttgtcaaggcaaagctctgaagcatcaaattgagtacatggaatctaaaggtaaagcaactggatcataattttgacccagcaccattactagtgggatactttgggaaagtttcttaaaatttccgtgcctaagttgagtagtactcagcacagggttgtcaagaagattggataattaaagaatgtatagtgtttaaaatatctgtcacggagtagatgctcaattttgttccataataaaacatctataaagctaattcttttactagtcggtattacttcttatggcataaacttgatctaatttatgccaccaaagtatctctctttattctgaattatacaaattatctccctgctattgagtgaactgcatcccactctaaattcatttgttgaagttctagctcacagtgtgatatctggagacgggcttttgaagctgttgggtttagatgaggatatgagagtgaatccctcatgacgggattagtgtccttatatgaaaagacaccaggcctctgtctcctgctctttttctgtgtgtgtgtccttgtgtgtgtgctcacatgcctgtgtacacacaaaggaaagatgatgtgaggacagaaataatacagtcatctgcaagccaagaagagagctctcataaggaaccaagttagctgacactttgatcttggaattcgcagcctccaaaagtatgagaaataaatttgtgctgtttaaatgaagcagtcatggtaatttaccatagcaccctaagcagaataatatacaccttttcttcttgcaaattgggaaagggagtgaaggcataaaaatcccatctgaccacaatgaaacaaagaaactttttgttctttaaacataaaattcctaggtagtcacaaagggaatatctaatacctatgtgtaagtccgaaattagtaattagagtgtttatgtcggaagatacagtaggaaatccctgttgctgcctttgtaggttctgtagaatggtcttctaatcttatttttaaagtatgctatatatgcaagactgtgctactactaccttagaggagtgaagaatcagaatgaaaaccagcaggacagtgcagtgagaaaaacagtcatcacttacagaagcccagacatgcagagaaaactaagaattcaatagatgcagaaaatcagagcttgagaccactccacacgatagaagccccagtggttccccttccctcgtattcgcttgctccttccaagaaatgtctggagacattaagagtgacactgggttttaccattattcatggaataagatttaaagacactattattatttataaactttaaaaacaaaagaaaactagaggatttagggactcctaagcgggtgacatctggccacaacagttgactgctctaattctgctcccagagttgttctctccaaagtatggatatggatctttttaaaggagggctttaacaacagagaaaaataagagaaacttaaaaacaaagaaaattgactttcagctgcagtaagagaagaacgatagaaagaatacagtgtttttcttggaactttccagcaagggaatcagacgagaggctgtgaggaaaggcctaatcccattgactatggttcagagaacttggattcctcagatcatcataacttctctggaatacttagcaataagaagcttgaaattaaggctgaatttcagaacattaatgaatacaaacatattatatattattccataaaccacattaagactagagtaatttgcattaaaagagtaggttttggcagattggaaaataagaagaaatatgaggatatggaaaatttttgaagtagtgaacagatacatgtcatcaatgtataaaggggcctagggcatttattagcaggaggccatggagttccacagccaccctgaaatggagaaattgtaaaataacgtctgtactggggccgggcacggtggctcatgcctgtaatcccagcactttgggaggctgaggcaggcagatcacaaggtcaggagatcgagaccaatctggctaacacggtgaaaccctgtctctactaaaaatacaaaaaaattagccaggcatggtggcgggcacctgtaatcccagctactcaggaggctgaggcaggggaatggcgcaaacccaggaggcagaactttcagtgagccgagatcgcaccactgcactccagcctgggcaacagagcaagactccatctcaaaaaataaaataaaataatgtctgcactgattcagtgtgacatttccagtattatagctaagctcatagaaacacatttaacctataaagaatcaacaaaaaatgaactttggaaagagtgcaaacataaagcaagacaaagtatctgctcaccatgctaaaaatggcaataataagagaaataatacttattactcttatttttattactactacaatttacttagcatctactacactccaggtactttaaaatttactcacaataactgtataacaatttttattctcataaaggaaatgtaatattttaataaatatgtaaattaatagataacttagcctagaccccataaatagtaaataaaagggcttggggttcattctaggtttctcttctccaaagagtaagtcttccactgcatcaccagattgcatgaattaaagaataataaaaaacaaagaacaataaaaaattaaagttatatttctgccatttgtcagatagctattataacactgtgctagtcatcatgcttagagggagaaaaaacaaaaactggggaaggtatagagcaaagttaaaacctgagtaattagggtgaaatggtgttttataaaagtatgttgcaacatagtgtgcttaacttagggaatgctaacacaacatcagatgatgttcatgaaggataatcaccattatgattcaacgtccatagaaaactgaacaagagatggatacgttcagagaaaagaaattgtgagggaggggtggccttttaaaatattctaactggcaactggtaagtggctagaggctgtcacatcatgaggttcaattaaggaagacctgatctcaataggaaacaccagaaaatgacaaggtacagttaaaaacagacacaaattgttcccttccctttctttcttgtcctttcaagatgaaagtacagatcctcccatgaagacattagggggcctattttcttacccctcgaatctgggttgtctatgaaatttgattggccaatatgacattaacacacatgactcagcagaggtttgaaaagtatttgtgaattggaagagaaccaagagtctgccaactgccagagacatgactgaggccatcctaattcatgtaattggacactccaccaggtgaccacagttgcatgagacagcctggtagagaagtgctgagcagccttagatgagacagaccacacacaggacccacagatgtgtaaacaaaagccgatggtggttgctggaactaactacattttgagggatttgttacacagctaaagctacttaaatcaggtggcaaaaccacaaagtgacaggaaaaatggatgttatctatacttcaagaagtggttaatttgttccgtggcctgagagattttgcgttctacctgtgtctgaagatatggaactggaataaatgtgtatctagttgccatttggtaactaaaatgtccttttttttgagacagagtcttgctctgttgcccaggctggagtgcagtggtgcaatttcagctcaaggaaacctccggctcctgggttcaagtgattctcatgcctcagcctcccgagtagctgggactacaggcacgtgccaccacacccggctaattttttatatttttagtagagatggggtttcaccatgttggccaggctggtctctaactcctgacctcaggtgatccgcccgcctcagcctcccaaagtgctgggattacaggcgcgagccaccatgcgcggtccctaaaatgtctttatatgtagatcatctagtccaatttggtcaatgtatatatgaggaatcagaaaccaggagagggggatgtgacttgccaaaagtcacagtaaactcctaactaaaccaggactacttgtcaggttctctgatccccagtcccaggcattttacttatagccatcttgggatcttgagcagtcctgagattctatgactctgtgactctatggttctataattccaagacaaagcaaacaattccagtgctccaggcagcctcagcacaagaaaagaacatggtctagactgaagtaccaactaaatcatctcctttcaaattatcaccgacaccatcatggattcaagcaccgcacacagtccggtgtttctggtatttcctccagaaatcactgcttcagaatatgagtccacagaactttcagccacgaccttttcaactcaaagccccttgcaaaaattatttgctagaaaaatgaaaatcttaggggtaagtaagacttgcccctatgtatattttactgaggcaggggaaaggctagggaaattatctgttggcacatgtttgaaggtaggagcctattccaattcttctttaagacaatgtgaatatagagtgttggtgggccatttgagagaggatgtttgagaagaacgaatcatgtgggtctggacttgacaaaaaatgctatcatttaggactcacctacttaaaaagtgatagttgctatggcagtaaatgagattactcagactgagaaggtggactgagaagaagagagcagagcacatagactcacacgtttttgtatattgtataccttccatttttgtatattgtcctcattagtctttcccagcacttgtcaaaccactgcttggtgtcacagtgcatcacatgagtggctcagagagggagagaaaaaaaaaaaaaacccgaagagatggagagtcctctgggcctgagagtgtgacaatacctcaagaggctcagagaattggccatctccaggcagggctcctcacagtccaattctgcttgaggccagcctggtatactcatttagaattcagtgtttctcagacattcacatttatgggctaaagaactgaagaacttatgaagacacaggtttcccagcctcacctggagaccgttcagtaagtatgggatagggcctgatagttcgcatttctagctcccaagtgatcctgatgttgccaatccatggaccacattttcaggagcactgatttagatcattttacctatcaccaaat

SEQ ID NO: 5274 - DNA, 6000 bp, Homo sapiens
gacggggtttcgctgtgttggccaggccggtctccagcccctaaccgcaagtgatccgccagcctcggcctcccgaggtgccgggattgcagacggaatctcgttcactcagtgctcaatggtgcccaggctggagtgcagtggcgtgatctcggctcgctacaacctccacctcccagccgcctgccttggcctcccgaagtgccgagattgcagcctctgcccggctgccatcccgtctgggaagtgaggagcgtctctgcctggccgcccatcgtctgggatgtgaggagcccctctgcctggctgcccagtctggaaagtgaggagcgtctccgcccggacgccatcccatctaggaagtgaggagcacctcttcccagccgccatcacatctaggaagtgaggagcgtctctgcccggccgcccatcgtctgagatgtgggagcgcctctgccccgccgacccgtctgggatgtgaggagcacctctgcccggccgcgaccccgtctgggtggtgaggagcatctctgcccggccgccccatctgagaagtgaggagcccctccgcccggcagccgccccgtctgagaagtgaggagcctctccgcccggcagccaccccgtctgggaagtgaggagcgtctcccggcagccaccccgtccgggagggaggtgggggggtcagtcccccgccaggccagccgccccatccgggagggaggtggggggtcagccccccgcccggccagccgccccgtccgggaggtgaggggcgcctctgcccggccgctcctactgggaagtgaggagcccctctgcccggccagccgccccatccgggagggaggtgggggggtcagccccccgccaggccagccgcccagtccgggagggaggtgggggggtcagccccccgcccggccagccgccccacccgggaggtgaggggcgcctctgcccagccgcccctactgggaagtgaggagcccctctgcccggccaccaccccgtctgggaggtgtgcccaacagctcattgagaacgggccaggatgacaatggcggctttgtggaatagaaaggcgggaaaggtggggaaaagattgagaaatcggatggttgccgtgtctgtgtagaaagaagtagacatgggagacttttcattttgttctgtactaagaaaacttctgccttgggatcctgttgatctgtgaccttacccccaacgctgtgctctctgaaacatgtgctctgtccactcagggttcaatggattaagggcggtgcaaggtgtgctttgttaaacagatgcttgaaggcagcatgctcgttaagagtcatcaccactccctaatctcaagtacccagggacacaaacactgcggaaggccgcggggtcctctgcctaggaaaaccagagacctttgttcacttgtttatctgctgaccttccctccactattgtcctatgaccctgccaaatccccctctgtgagaaacacccaagaattatcaataaaaaataaataaattaaaaaaaaaaagaaaacacaaaaactaagcaatatgtccgtgtgaaatgtaagcatatgtggaaagtcaaaatacaatgaaaaggaagagagtgataaacaccaaattcagcataattgtgagctctgataaagagggtggcttggggaaggataacctgagagctttcaaaggtatcagtgacactcttgtatctctaatcatggctgtgggcacatggtttcttgtctcactgttataagtactttttcatacatattatttaattttttgagaaatataattgagaaagcaaaacaacatcttattttcattaaattttttatcacataatgatatttttatagtcaacacctgcagaaaaatgttaccgttacatatcagtaacacttcatctccaatgatagcatatttattggtacataagagaaaaaactcttttcaataactatgaggtcataattgcatttttttcttcagctatattcccacgtcacaaaagcaaagggagtgatccagtaatctgcacatgggagtacatcagacatttttatatcttaaaacgaataataataaatgttttgccatttaaagctgtgtcacttgaacaaattaatctttgcgggcttaaaatttttagactagaatgcaataatagtaatacctacctaatgggtttactgtgaaccttaaatgaaacatggaaagtgagtttatcagtgcctggaacttaaaaatcacttagtaaatgctagtttttgaaatttataattgagattttcttgctctaaacatcacttattttaccatttaccagctttccaacttgggaatggcttcctccatttcctgaaatttagtttccacaattataaaacagaatcaatattatatgtgtggtaaggcttatatgtggacaattcttgacataaaaggaattatttaactaatattaccttcctagctgttccaaatgtatagtcccttagaagagaaagaagaccctatcaactataaagttcttaagtatttcaatttacattttccttactatgaattatttataagtgcaacaatgggattttctgacctgtaaccaagttctatttgcaattagatctttagcctcacctctgacgagccctatgtctcccttaccaattctttgacaccagaaccctccaacagcagataattctgggtgccagggccttgctgagaagttgagaacgtggcataatgttacttcctaatattggagagcctggggacaatcacctgggtgaaagaaaaagccaaacagaaccattccttctcagcactgccagggacacagcaatcacaaaaactgaccctgccttcaagggacaaggagacaatggctgattaaggcaaggacacaaataattatgatgtagcacacagttttcatatagaaggcaatgattaaaaaaattggagtgctgggacgtgcagagaataaaaaggaaattcacatcaggaaaatactaactaaataaaagttggcatacttttatgtagactttaagattgtcttttggaagcaaggtcactagataatgaaaataggcttaattcaaagagaaatattttaaatatgttatcaacctaataaaatattctcaaaccttgggggaagagtgatggtgatacatcaaataagatgctattgacaagtccaaattgtagtgagaatttcaacacactcaagcactaaaatgttgatcattcaaatgagcaaagacaaggtaaatgtttatgcattcatacaaattcaaattcaagtttatttgggaagaatcatacatagagccacctaagttatctcattggccacaaagtagcaaacaacctgagactgactggggaaatacagggctcaaacagagaaaaggatgcaaaagaccaggttgtgctgccacaactcaagcccctttgctgccatacatttgccaagtcctgaccctgttcccatgccaactaaaatgaaggcacatgcctctaaccaccccaccatccaggactcaaacctcaggtttcacaatcatccacaactcagaccctaggtaattgtcctcccatcaccaatcactcaagcatttcagcagatatgcatagaccctcaattagaatgttaaatggatgatggatcttctgttcccactctccttcactctacagcatctctgagaggtgactgcatgactttacttgagtattcttgaagaagtaaattctctattgaaatggtagccagttcccctaatgaacggctccaacaatttttttttttagagtggcatctttttaaatatcacaccacaatcagcctccccagaactacttctacccagtggatctaaccctatggttccaaactatcttaaatttaaaaagagaggcagaaagagaaagagagaagagatgaaagagagagacaggaatgaacctcgaattaggcaacagagctgcctgccatatttcatccctttagattaaataaacaaataattacctaactatagctctgtgtctctaataaaatgaagcaatgaacagggaaataaaaatgtaattaaaaatcccacatatgaacataaaagttgaatattgtagggggagagagaggacattatctttgggcaaaactttgattcacatcccaaatatttagactctcctgacactaccaacttcttccatttccctacttgatctagtactgtgcttgatgaccctgcagctccagactagactaaaaagagaggggacacaagggaacttgacagacagaagaaaaaggtgggttcagaggtaaaagtgctatttcaatttatatttccaaatatggaggctaattcttgctttgagtggctgggtacatgtactatggcactaaagtataattttaggccatttctgctaaatctgacacaagatatatacatggttcataagaaacttaagtgtgagccaatgaggacaatatttggggacccctaagtatagtgctgccaagtgtacagcctcagtgattcttgaatctctgcatggatgcctcctgcccacctactcagccctaaaagtgaagccagaaggtaaaagtcagtgctaacggcccatctttgaccaacttctagaatctttcttgtcctcagggacctaccatccacacctgcttatagggtgggggctgcagaagttcttctaattaaggtagcatgagcatgccaggcagtcccctggggtctttttcaagaagtgaaacctggtaaggcagaaactttttttgcacctccttcagctatggtaagtgttaaaccaaagtaattggagcgaagcccaaggtagcagaagctactgatttcctgtcacctgatgtctatcagcgatttcatcttcaggcctggactacaccactcaccctcccagtgtgcttgagaaacaaactgcacccactgaactccgcagctagcatccaaatcagcccttgagatttgaggccttggagactcaggtaaggaatcaatttgctttctttaaatgacttaaaggaggtgatggataaggtatagaatggttttgaagactggaggttcttgatcttaattctagagtttccctagtcagacttcctaatagttctatgacttaaggaggggtgacgatatcaaggcttgctgcccactcactcctctaatcagtctccctctcaacaattaccctatgcagtcaactgtgaatcattccacaaaagtagtagattgcagcatatatattaaatcatggtttctaaaccattgggttcaaactggagctctaccactaacaaacaatataaccttgggcaaattactaaacctctaaagcctcagcttcctcatctataaaatgggggcaatggtacccattacattaggaaaattggaactaaaatcctgaatcccttaggacttcccaataccaaatgagaaaataatcagtcataggcataatgaaaaaaactccatttgtcttcctgtaaatgcttttgtctacattaaatgtaaatatacctagaagtataggtggctttacaggctaacattttctggaggggatttgtggacaccaagttgagcatgaaatcctgcctcaaatctatcacatgggaaaccaagagtaagagggggcgctgcagatgtgggggagctctaatgaaggaaaacaaggattaattttaatcatgccattactgttttctgaatccagtatataagtgattccctttccctgtttcccataaaatggcttaatctcactgagaatccggtggaaagaaatgtttaatccagcattgtgagcatttttgtgtgtgtgttttgtttgtttgttcattttttagtggagacaaggtttctccatgttggccaggctggtctcgagctcccgacctcaggggatc

SEQ ID NO: 5275 - DNA, 6000 bp, Homo sapiens
cattacaattttattacttaccatcctcatagtgtaccttagatctctagacttgttcatcctacatatctgctactttgtatcctctcatctacatctcccatttcctcccccagccactcctgctaaccaacattttgttctctatatctgtatatttgaaattttttagcaaaaatgatatcaaaagagaagaaccaagttagaggactgacactatccaacttcaagacttacagtaaagctacagtaatgaagacagtgtggtattggtgaaagaacagacaaatggatcaataggtgaaatcagccagacacagaaaaaaatatatcgcattatctcaaaatccattttttgatcaaaaggaaaaaaattatagacaggataaattgttagcagtgactaccgatggactgaatatgtactttgaaaatatgatatcacttgttttgttatatataagaattttaaataaatattctgggtttccagccgggagctgtggctcacacctgtaatcccagcactttgggaggccgaggtgggtggatcacttgaggtcagaagttcgagaccagcctggccaacatggtgaaaccccatctctactaaaaatacaaaaagtaactgggcgtggtggcacacacctgtgattccagctactcaggaggctgaggtatgagaatcccttgaacccaggaggcagaggttgcagtgagctgagatcatgccactgcactccagcttaggtgacaaagcgagactctgtctcaaaaacacaaacaaacaaaaattatgtgtttctgaaattattccaaaatttattctgttcctgtcaacatacctctgtgagactgatttctctattaggggtattgttaaaacaaaacatagaaacagtttaaaaatgcattatcctctgcaagtagcactgccatcaatccgagttaaacaaattaataagcaagaagcaagtttatttaaatagtggaaatttaaagagtgatgtacacaatgtttattccaagtgtgtattatagacttttaatgcaggaaatcagtatttcctttgtaatttttgtttagctacagttttggaagagccaaaagctatgtgtaatagtgattataatagttgtggatcgttgtcagatttgtaattcttttctgttttcccatgttgagatgacatttattaaaacaattttatgcctacagattctaatgaaaactctgggcttgaattattgtctatcttattttcctagttgtttatttttattatattttacaaatgtgttggtccacaataaattgaaaattttaatggaaaaaatggcctttctccacagactgtaaagcattcagctttacgagcatgttcctaagctagggatacaaaagagattatgaaatggtactataactcctgcccttagaagttagagcatgtttgaagaaatcacaaatcagaacacaacatagaagaatcacactgttaatggcactaaccacatgattacaggagagaacagtgcagaagtcttaccaagatttgctgcatggagatgggtctgaaaggccaacaggagaaggaaggggattctaggtttaaaagacactatttcttttttctttttttattttttattttattttatttttttgagagggagtctcgctgtgtcacccaggctggagtgcagtggcgcaatctcggctcactccaacctccgcctcccaggttcaagtgattctcctgctgcagcctcccaagtagctgggattacaggcgtgtgccaccacactcagctaatttttgtatgttagtagagatggggtttcaccatgttggccaggctgctctcaaactcctgatctcaagtgatccacccacctcagcctcccaaagtgctgggattacaggcgtgagccactgtgcccagcctgacattatttattttcaactttctcttcctgctgcctggataacatgaataaggttgatcatgttatacctttccagacagtaatcatgattctgtgggctttcaaaaacaatgcttacttcattttcctttaaataccttcaagcctttcagcaatattattgcctgaaattgtcattttcttaagctcataacattaataaatcttcagcatcttttttctattttagaaaaatatataaaaatgtaaacccacaagagaaagaaaactctcaataatacacaaaaaaagaaaaaagaatctgcactcatgccaccaactcttttaatgtatatttaatgagccttaacatgtgtgagacactgtgccatacatggagttggaggtggggatagatatcagcccctgccccaaggatctctggtctcaaggtactcatttgtacctgagatacaacctaaaataaataactggaatgtgacaggacacttccaaaaaataaaacagcacgccactattaagaattacaataaataggccaggtgcggtggctcacacctgtaatccagcactttggggggcctaggcgggcatatcacaaggtcaggagatcgagaccgtcctggctaacatggtgaaaccccgtctctactaaaaatacaaaatattagccgggcatggtggcgggcgcctgtagtcccagccactccggaggctgaggcaggagaatggtgtgaacccgggaggcagagcttgcagtgagccgagatcgcgccactgcactccagcctgggtgacagagcaagactccatctcaaaaaaaaaaaaaaaaaagaactacaataaatatgtttatcgacatgaaaagatatttataggacattaagcttaaaagcaggttatgaagtatatatacattatgatcctaacttgattttactatgtaaaatacatacatgcgcacacaaaagtttacaaatcaaaatgcaaatactatcattaattatgtctgcgtggtgagattgagtgctttttctctcctttttttattatctgcattttccaattttgtccacctaatttaaaaggcattaaaatgcagtatggctctccctctccctctccctgtccctctccctgtccctctccctctccctctccctctccctctccctccctctccccctccccatggtctccctctccctctctttccacggtttccctctgatgccgagccgaagctggactgtactgccaccatctcggctcactgcaacctccctgcctgattctcctgactcagcctgccgagtcgccacgcctgactggttttcgtatttttttggtggagatggggtttcgctgtgttggccggtttggtctccggctcctaaccgcgagtgatccaccagcctcagcctcccgaggtgccgggattgtatacggagtctcgttcactcagtgctcaatgttgcccaggctggagtgcagtggcgtgatctcagctagctacaacctccacctcccagccgcctgccttggcctcccaaagtgccgagattacagcctctgcccggccgccaccccgtctgggaagtgaggagcgtctctgcctggccgcccattgtctgggatttgaggagcccctctgcctggctgcccagtctgggaagtgaggagcgcctcttcccggccaccatcccgtccaagaagtgaggagcgtctctgcccagccgcccatcgtctgagatgtggggagcgcctctgccctgccaccccgtcaaggatgtgaggagcgcctctgcccagtggcgaccccgtctgggaggtgaggagtgtctctgcccggccgcccagtctgagaagtgaggagcccctccgcccagcagccgccctgtctgagaagtgaggagcccctccgcccagcagccgccccgtctgagaagtgaggagcgtctccgcctggcagccaccccgtccaggaggaaggtggggggccagtccccgcccagcgagccgccccgtccgggagggaggtgggggggtcagcccccgcccggccagccgccccctccgggagggaggtggggggcgcctccgcccagccgccccttctgggaagtgaggagcccctctgcctggccatcaccccgtctgggaggtgtacccaacagctcattgagaacgggccatgatgacgatggcggttttgtggaatagaaaagggggaaaggtggggaaaagatagagaaatcagattgttgctgtgtctgtgtagaaagaagtagacatgggagatttcattttgttctgtactaagaaaaattcttctgccttgggatgctgttgatctatgaccttacccccaaccctgtgctctctgaaacatgtgctgtgtccactcagggttcaatggattaagggcggtgcaagatgtgctttgttaaacagatgcttgaaggcagcatgctcgttaagagtcatcaccactccctaatctcaagtacccagggacaaaaacactgcggaaggccgcagggtcctctgcctaggaaagccagagacctttgttcacttgtttatctgctgaccttcccttcactattgtcctatgaccctgccaaatccccctctgtgagaaacacccaagaatgatcaataaaaaaaaaaaagagactataaacataatttgagtgtttagaaatttaaaaataaaatcccagtaaaaaaaataaataaataaaaataaaaataaaaaaatgcagtatgatattgcaatgattgagcattagaaagctggagaaaataaatactaaagtgtttgggagggtcacaataggcttcccagtaaaaattagaggaggatgtgaaagcacagcgtattccaaactttacagttgcatttacatctcttgaggtgaaagagaaataaccataaaaggactctggaactacataaagatacaagacaaattggtttggagaacggaaataaaatctacctataaaatccaggtaaatatctgatactggcacacaggttggagcagagaaagaggaaacatagaggtgccaaaggaacaaagtaagtccattgatacgttcttgcctatctctcctccaaatcaatgggcacaaactgtggctggtctacctgtgtgggttctgttctctagattggagggatgaagacaagttcttgactctatgttgaggccagttgaaaaatgagggagaataaaaccatgaacgaaacaagaaagaaacaaaacagaagaggaatgaaaaagtaagttggttgctgtacaagagataaaacggactgcaaaaagaaaaaaaaagctaatgctcgctgggtgcggtggctcacacctgtaaacccagctctttgggaggccgaggcaggagaatcacctgaggtcaggagttcgagaccagcctgcctaacatggtgaaaccccatctccactaaaaatacaaaaattagctgggcgtagtggcaggtgcctgtaatcccagctactcggggggctgaggcaggagaatcacgtgaactcgggaggcggaggttgcagtgagccgagatcgctccattgcactccagcctgggtgacaagagtgaaactccatcttaaaaaaaaaaaaaaaaaaagctaatgctaagaaaggtgaataataggttcaactgtatgccattccatgaacatgggcccaaaaggacgaggccatgccccactgggcacttgatgattatgtggctaccacagggacaacatagaacacagaagtaatactggagcccttggctttgtaacacattttaattaaggtacttctttctgacaagaaaacaattaaaattaaaataggtagggaaagaacattcattttcaccagatcagcattttgtgaaaggtgatataagtgtatacctgtggatgtactgggtgattttgtgaaaatgattcggtttcatgttttgctttatgctataaagtactcttgaaaataataatcatcttcactctgtcaaaagtgaagttagc

SEQ ID NO: 5276 - DNA, 6000 bp, Homo sapiens
ccccgtctgggaagtgaggagcatctctgcccggcagctgccccatctgggaggtggggggcagcccctgcccggccagccgccccgtccggaggtggggggcaacccccgcccggtcagccgccctgtctgggaggtgggggccagcccccgtccggccgccgccccatctgggaggttggggggcgcctctgcctggccgccccgtctgggaagtgaggagcccctctgcccagccgccaccccgtctgggaggtgtaccaacagctcattgagaacgggccatgatgacgatggcggttttgtcaaatagaaaagggggaaatgtggggaaaagaaagagagatcagattgttactgtgtctgtgtagaaagaagtagacataggagactccattgtgttctgtactaagaaaaattcttctgccttgggatgctgttaatctatgaccttacccccaacccggtgctctctgaaacatgtgctgtgtccactcagggttcaatggattaagggcggtgcaagatgtgctttgttaaacagatgcttgaaggcagcatgctccttaagagtcatcaccactccctaatctcaaatacccagggacacaaacactgcggaaggcggcagggccctctgcctaggaaaaccagagacctttgttcacatgtttatctgctgaccttccctccactattgtcctatgaccctgccaaatccccctctgccagaaacacccaagaatgatcaataaatactaaaaaaataaaaataaaaaaataaaataaatgagcagatgtacagaagaaagaaaaaaaaagaaatatgatattgcaacatagaggtcacatgcctgctgtggtattatttaaagcccttatggtattttcattctggaaaatcttttttaaatgttcatttttttcattcatttgcttaaaaagaagtattacactactactttgtgatgaaaactctgctattccatcaaatttaggctttacatattttttcatgtagggtaatataaaatgaaatggagtaggatttatctagatgtcagcgaacacatgcttttttcatgcacaattaacgctggatttgcatacagagactttgcctacgaaatataacttaagctacacacacacatacacattacacacacatctcaagtacttcctatatttagtctcttccgtcctcagaagagcacagatcattattagatctctaggcctctagggtgtcttctaattctagattctaaggctttacagaaggtcggtcgatcattcatcatgaaacacatgggctcaagaataatctttcaagaatctataaatatatcttagataaacatgtgtcattgattcatgcctggccaaaacaaaatttctgaaagctctctatcccagaacatctttgcatttgtcacaaccctctaataatcaatcacaattgtccccttttcccacagagcagatgctggccaaacctaccctgagtttggacaactgggggtggggtgcagagtccctaggcatctatttgcaggggtgatttgcatcaaggaaaatatgccacagaaattttgagttcaggtatctgatactcaagctgaaagatcagaatccagtagccagcctcacctaggtgaccaggtctaatccctatggagaaagggctgtgctcctcacttgtgcatggactataaccaggctccttctctgtaaggaagactgaagatgatgcaaggctgtttgaacacctccagggctctgatgcttggggagccctgggagacagcatctggggtaaggcagccttctcccagagaagctgcagcaaggcctgagaagactacagtgtatctggaaagtggctgccccatatactcagcaacagctcagccaatgcctgctggagaacaaatgtgaaaattctggggactcccagaaatgctctggaaattgggatttgcagataagtggggtcattcttcaacagatgggggtggaaaccaggccacctgggccataaggctaacatgtcttgctaattcccacaggctggagaggccttggatatcagtgttttcctaaaacttgctgctttctgcctttttctcttcattttgcatttaaaacaaaccaagcaaatttataatttataactgttctctcttttctcctagctctcctcctctccctcagttctctggtttcactcttataaacaaattgctgttactaaattctagcagcctagcagtgctcaacgggcttcattcaaactctttctccacacacacaccacaggggtctctatttcatttaggtctcactcacaatttcactttatatttcacaactcttcctactctcccaagtatttggcaacgcttaaggatatggtatggacttttaggccaaatgtcatttcatatatttatacaatgctacaatgtgtacttcaagaccctaattttacagatgagaaatgaattcaaagagtagaggagtggagtacacacagccagaactggagctggaaaccatccctagatcttgtgattgcttcaacaatattctttatgcaattccatgacagtcacaacatagagctctttctgaaggagacttagaggaagaaaagtgggtaggaggatgggctacaaattctggagctagacttacactgctggagttagaatctcaactcttaacatttataagctgtgtgactcttaacttcgccaaaccttagcatactcatctgttaaaatgaaaataacaatggtatgtacatcattggcatgtggtgaagtttaaataagcaatataaggtacttaacatattgcctcaacatagtaaatgaaagggaaaaaaagcaagataagtttaagctattaattagcattttactaaagaatagtatataagtgatatagtaaacatatgaaaactgaaatctactatatatatgtgtgtgtaccagcatatatatatatacctacatacatatagattataccttacataaatatacatatgtatggacattgcatttctacaatgaattcaattgtttagtttccccagtttgcatagatttccattttactttactagaacaccctagtgtttacacagaggaaacatctgttttctctagtgtataaataaataaaattcctcaaagaaatctggacaagttattttatcagggctcacagccaacagggtccttgtaataatccccaacaatggttttaacaacattatataggcattgtggttccagcacattttcactaatgtcttttgtatactgggaactaattcaagagaaattaacaatatgatccacatggagaaataaaagtcatattggatgtcaaaccatgactgattgattgcctcttcattgctgaagaatacagtttttaacaaccaaaggataaaaaattaaagtgaattctgaatttccaaatccagtttataggtactgagaaaatcaatgttgcttttactgatctgtgatattagcagaagaaataagatgtaccaaggaaccatgcctgtctcatagtttggctcactcttctatttttgcctatgtttatactgaaaacacattttggccccagtccaaaaaaatgaccaaatccatgataatttccagagactgttggccaaagcttaaatgaagaaatatgtcacttctctcacaaataatcaatcagtcttggcagcaagttacaatagcggtccatctcatcagaactggctcttactactatggattctaaaaaatccataaccctgaggttgaagacacagttcctctttctacagcaaagagaatgcttaatattatcggagccctgtctgctcatagacaaggaactcacaaaataataataatgctagaaactgaagtggtatattacttaagaataaaactattaccttcaatgacatactgaccaatacagaatgtaaagactttagaagaggctgggctttttttttttgtttttttttcctttgatttgaggggactttggagtctcaatgtaaggaagctagctgtgagactaaaaattaagattctcaatttacagttgatttttcaggctataaaagatcttgatggcttttagacacactcatgatttagctttttgcaaataaaggtgttgaaagcatagaaaatttccttatgaaagaaaaatctgtcttgttttctgcgtgttttactcactggctatcattgactaaaaatttacactacaagctggaattttaactattccacaatgtcaatttaaattttccatgaataaatgagaaatgccattgagtggctgttctccaggtactttaaacgcctcagtaagtcatgatagctgcctaagaggatggtctgtactgctcatctaaagcacctcttcataaacactgttttaactactgtctacacctcaaacagaaaactaacaccacgtgtcacctaaaaggtaaacccgcctcagcaagtggatcaaaaagtcattctggtgtcttgttaagtattactttcatcactaatttccttcttcagttacttatgtttaaagaaaaaaaaagtgagccattgatttagccacttcactcgaaagtgcaccttccaaaggtgctcttgtggtcaaaatttttctttgaagacagaaaaggtgaagggcggacttctcctcagtgatcctggtcactgtgcagcaggtgggtgtataagaaatgcaccaatatgggcaatctcagaatagaggtttgcagaaaccgttcctagaggcaccaaaacgtagttaaccgggtgtctgaccacatggctgccaggagcctagtgagtctgcgcacacgcactacctccgccccggcagttcctgagtgggtgcgcaggcgcaagaggagcacaccgttgccattgcagaccgtcactccctgaggagcctgagagccggccgggtgctgggctcctggctatccctgtgatggtagctcagcgagatctggggacctggcgctgagcgcgttgccagccgggatcttcctcttcatctaggcctgggcgctggcgtgagaactcggactgggtcctggacgagcgccccccgaaactccttggaaccttgaacaagtaaaatgcagggtagtgatgtcgctttgctggagtgctttcgtgtcagaagccataaagggacacggaggctgattacggtgttcctctccctatcatactctgtaaacagtaggcactatttactactcagagatgatagctgtaaaatgccgatatgttttagtcatagagagagacttttcagttatgaaggctgttattcagaacagatggatgaaagttgatgcctctaatattaaggcctagaaagaagaaagaaggctattgcttctgaatttggagaggtggtgactgaacaataaggaaaggatcaaacttacgtattttcttctaagaaaataatgtatatgtgctttgtactgttttgtagaagtttgctaataaagacatcaccaaaggttaaagagaaaatcatctagaggaaatgctggcagtatggcatgtgttctttaacaaatctctacagcagattctctcgttttaggggtaagatttcactttgactaactaaatttaagatcatgaactatttcatttttttaacggatatattggatctaaagggggacagacttggttaaatcaaaagggtaaaagttttttttttttcaaatgttgattgtcttctacaaattttgactgatctcatgttccttcatgtgctgagatatggggatacagactaaaccaacacacacaggataatagagaaatccaagtaaggtttaaaaggaaaaaagagagtactgcacttacatttatgcagtaggatgattataaatttgtctcttctattaagttataaacatgtgaa

SEQ ID NO: 5277 - DNA, 6000 bp, Homo sapiens
ggtgggaggattgcttgagcccaggagtttgaggttgcaatgggccatgattgtgccactgcactccaacctgggtgacagagtgaaacaaaacaaaacaaaagcttagaaaacatatttgaggaaataatcaataaaaatgtcccaagaatatcaagagagttagacataaagatacaggaagtccagtgatacccaggcaaacacattgcaaaaaggatctcaccatggcaatattatattcagaatgtctaaagtcaatgagaaagaaagaattttgtcagtaacaatacaaaagtttctagtcacctataaagaaaactccattagactaacagcagacttttcagcagaaatcttacaggccagaagagaagggaatggtattttcaaagtgcttgaacaaaagaactatcagccaagaattttgtgtcctgccaaaataggtttcataaataaagtcctttccaggcaagcaaacactgagggaatttgtcacccctacaaatggtcaccctacaggaaatgctcaaagaggtcttaaacatgtgaatgaaaagtcaatatccatcatcattaaaacccatggaaatataaaacttacagtttgtataaaacaatcacacaaaggaggaaaagaaaggaatcaaatggcaacatgacaaaattttactaaaccacaaagacaaaaagacagaaacaaagaatctataacttgaaatcgatcaacaatatgacaggaacaaagcttcacatatcaatattaaccccgaaagtaaatggactaaatgctccactgaaaagatgcagattggcagaatgggtttaaaaaataatccaagtatatgctgcctacaagaaactcaccttacccacaaaaacacatataggttgaaagtaaagaggtggaaaagatattccaagcaaacagaaataaaagcaagcaggagtagttatccttatgtcagataaaatagactttaaatcaaaaacagtaagaaagaacacagaagggcattacatagtgataaagtgatcaagaagatgtaacaatcctaaatatatatgcacccaacattggagcacccaaatttacaaaacaaatattactgcagaaaaccaaataccacatgttctcacttataagtgggagctaaatgatgaaaactcatcaacacaaagggaacaatagacactgagatctatttgagggtgaagggtaggacgaggaagaggagcagtaacataactattgggtactgggcttaatacctgggtgatgaaataatctgtacaatgaacccccatgacataagtttacctatgtaataaaccttcatgtgtacccccaaacctaaaaaaacacacacaaatattactacacctaaagaaagagaaagacgagaaaggcagcaacacaataatagtgggggacttaaccaccccacttgcagcactagacagatcatagggagaaaaaattaacaaagaaacattggccttaaattggactttagaccaaatggatttaacaggtatttgtgcagtggtgcaatcttggctcactgcaacctccacttcctgggttcaagtgattctcctgcctcagcctcccaagtagctgggactacaggcatgcaccaccatgcccggctacttttttgtgtttttagtagagacggggtttcagcatgttggtcaggctggtcttgaactactgacctcagatgatccaccctcctcggcctcccaaaatgctgggtttacaggcatgagtcactgcgcctggcccagaatatgcattatttttatcagcacatggaccattccccaagatagactacatgttaggccacaaaactagccttaagaaatttttaaaaattgaaatcatgtcaactatcttctcagatgacaatgcaataaaggtaaaaatcagtaccaagagaaatttcagaaagtatacaaatacatggaaactaaacagcatgctcctgaacaatcactgggtcaatgaagaaattaagacagaaatttaaaatttttatgaaatgaaaagaaaaacacatcttaccaaaacctgtgggatacagtgaaagtagttctatgagggaaatttatagcattaaatgcctacatcaaaaaaagcagaaagatgacaaattaacagcttaatattgtatctcaaggatgtagagaaacaaggagaaatcaaacccgaaattggcagaagaaaaaaaaaaagatcaaggcaggactaaataaatcagaaatgaaaaaagaataaaaaggatcaacgaaatgaaaagtttgttccttgaaaagataaaattgataaaccactagctagactaataaaagggagagaagattcaaataaacacaatcagaattgaaaatgaagacattacaattgataccacagcaatacaaaaggctctgacataaggatttgggtgcttacttgggaagtgacccaagactcactgtgaaaaaaaatggaaaagtgataccaaaaaaaggaagaaagtcaatagactatgtattaatgaatgagttctgttatagggaactggtgcttaatcctgttggagactctctaagagacagttgaaacacacttcaaaattatttctcttaggggacagagaagctagggtagttatccagcatatgcacgttacactggataggaaaaattcttgtgggattaacttcccagcacctatggcctgccccatacctatgcatcctcggaaaagaaaggagttgtccatagatgtggagactggctgaagatgcagcatcaatacagcatttgctgcagagtttgctcagagtttgaggctgcagtgagctatgatcacgttactgtactctagcttgagcaagaccctgtctcaagacctccagagtggatcaaggggatatagatgctgcatcaacagcatttgctgaagtaggtttggacaataataatctcccttgtatgtctccggtcccttctagaaagttggcaccacttctataaactcaattaaaaggtgacaaatttcatcttctacaatatctggttaaacctggtcctgaatgtcccacgtgcactagggcttagccacctatatgtcctcattcagatgcctcttattatttctgtcaatacagtttggttcatgttattcgtctttacaaaaagctattgagttactttatagagttagacaaatgctaaagttcatttggaaaaacaaacatgcaagaatagccataaaatataatgaaaaaggaaaaattacacaggagactaaccctacaggacattgaagtacactggaaagcctctataattaaaacattgttgaaataacacatgaatagacaaatagaccaatagaaagtaaaagaaagaccagaattagaaccaaatgcatatagaaatttaggctgtgacaaaggtggcatttcaaatgccgctgaagagaagatgagctatttaataaattgccctggggcagccaggtagacttttggaaaaatttaaaattagacccacatctcatagcattcacaaaaaaatacattttacatgtattaagaatcaaaatgtaaaaagtaaaacaatacaagtattagaagaaaacacagctaaattcctgtttaatcttagtgttaggaaaggctttcaaacaatgactcaaatgcataggtaataaaagataagactgataaattttactacaaaaatttttaaaatttttcttgacagaaaaccaccctaaacaaaatcaaaagacactgtcaaaattggagaatataccaaagacaaagacctaaaatccctagtatgtaaagaactctttaaaaattaagggacaaaggtccaggaatctgatagaaaaaatgggtaaagaagtaaaatttgggttaggcatggtggctcactcctgtaatccctgcactttgggaggccgaggcaggagaatcatttgaggccaggaattgaagaccagcctgggcagcatagtgaaatcctgtctctacaaaaaattttaagatttagctggccacagtagtgcgtgcctgcagtcccagctattcaggaggctgaggcaggtggattgcttgagcctgggagtttgaggctgcagtgaactatcactgcactccagcctgagcaagaccctgtctctaaaaaatacaaacaacaacaaaaaagtgaagtctgactccagctaccttttcatcttttttacattcaatgtccttcactgtgagccattcccaacatatctctaccttctcttccccaagacttttccctttccataccctcaacggtgttctttttgttttgaccatcttacaatgttctagccatcccatcaacttcatttgttcttcattgttcaccttcttcaacggtaaatctgtcatggactattacatgcagctgtttttgtactgtgcaattcacacgatgtatgtcatagatatgtggaatgccctcccatggatggcttctgattttctattggctctgacttggatgaaaatagatctaagttgattacaagtctcatttcactcgctgtgattctatccctttctggactgcagtttattgatttcatatgccaccttctgtttgaagtcttccctaatctcttcaagtccaacaaatcattttctcctctgttctcctgtggggacatttatctctcttctgtggtgtttatttcatcctgtctcatgttacagctaaatacagcacaccctgggtgcccagttcatttctgtgtctcccagagcaaccagcccaaccctttcttctccatggagattataccatagactcttgtcaaatcaaaccatatttaactggctcattaaccaaaacaggaaataaatacgaatgaaactgagctctaagcagcatgtaacctggcctgcatccaggaaatagaggacttcggatccttctaaccctaccacccaactggccccagtacattcattctctcaggaaaaaaaacaaggtccccacagcaaagaaaaggaataggatcaagagatacgtggctgctggcagagcaaggtgagtctgcttaatctggtggttggtaactgggagttggtgataaggtttttctaccaagtgagacttacggcgaaccagtgtggatgagggatagacagagtgtattgtactagctttattgagtctgctccaagagaaagaaagagaaagataggacatggagggggatgggagaaacaaaaagaaaaagaatttttaaaaccacattagaatgtataagtagcctagaaaattgagcagtggaagccacccaatgaacagacactgccttggcaatggggcttcccttgagaaggataatctccatttaactaatattgacatacctgggaccttggaggattcttgtccactctctcaccctgtttccttttccagaaaatgagagaattgaactcaatgttgtccaagagattttctagttctgaacttttgctttcagccagtactaacatatgcaaagcagcactctaaacactatgagaggccgggtgcggtggttcacatctgtaatcccagcactttgggaggccgaggcaagcggatcgcctgaggtcaggagttcgagaccagcctggccaacagggggaaaccccatctctactaaaaatacaaaaattagctgggtgtggtggcgggggcctgtaatcccagatactcaggaggctgaggcaggagaattgcttgaacctgggaggcggaggttgcagtgagccaagatcgtaccactgcactccagcctgggtgacagagccagactctgtctcaaaaaaaaattaaaaaataaacactatgagagacacaaagatggaaaagatggaccccttgccctctggtagcctttagcctctttgagtcttagttttctcatctgtaaaactgggcgggtgagaggatgaaag

SEQ ID NO: 5278 - DNA, 6000 bp, Homo sapiens
ctgactgtcattaccctcagcccctagaggctgtgctaagctccttgccaagggagcctcataacatggacatttacttgtttgaaaccagctggggagtgatccctatagcaagttgactagcaggatgaagatttatataacaacataattatggaagtgccaccccatcacctttgcaataggttactggttagaagcaagtcacaggtgctacccacactcaaagggaagggttattgggaccgccttagaatttgtctgcctcagttacagttctgctcatttaaatttgtaattttgaaaatgcaaattcaatgtatttaattttctcccagtttaaaaagccctatctataccccctaaaacccttcagctgcaggttaatttttctcctctcctttattttcctcactgtcactcaacccattgaaatcactctctgtaaggttattgcattgaccttgtcaccaaaatcaataggcttttaaaaatccttgttttaataatagctctctccatttcttaaatgttgcctacccatagatttcctctgtgtacactacctactctctacatgatctcatccaccacttcaggttcatttcatcttttattcagcaagtgctgattgggtgtgtgctgtgtaagctctggagacaccagacattagccaagatctctgttctcatggagctcacattagccatctatcaccatcctgacagttttcaaatcactgtcttccacccagatctcttttgctgagacagcctcagcatctactttcttgtctcacaaaaaggaatttacatcttctcttccaactcaagccatttcccctcctgtgttcctgatgtcagttgacgtccctatagactttgggccacccaagactgaacccaagcatcattcttggtttcccctctctctaagccacacagaatcatcctccactgattctccttgctctggtttctcaactgagtccactctccttatcctcctcctttgagccacatcacttttcacctgcatctttgaaccacaccacctttgaaccacgtcacccttcacctacatcaggcgtcagcctcctgccacgtccccagctctgagcctgccccatgcatctcttgactagatgacagccagagggatttttctaaagtacaaagtcatcatgttactgttctgcctaaacttattcaggctctcctttgcccttgggctaaagtccaaatgctctagcaacacttacaaagccctggagatgtagcagttcacctctccagccccatccctcctcaccctccacttacacttgaccccgagccatcctgagtctccgtgagctccatctgcctggaaggctgctctctgcctgcttccaaccctcctatttgtcctgcttagctcccaaccccacttcagaccttcatttagataccacttcctccaggaagccttatctggcctcatcccccaaccccttctagattaggggaactcctccaggctctcgccacacccacatctcagtatcacatcactcacccgtccacagcacagttacctgtctccctgttcatcttattcaatggacttcatattctttccctattgctgctgtaacaaattaccatgaacttagtggcctaacataacacagacttattattagacagttctgaggtcagaggtcctaaaatccaggtgtcggcagggctgagttccttctggaggctccagggaggccccgcttccttgccttttccagcttctagaggccacctgccttgcttggcttgggaccttggcctccacctgccaagctcttccactcactctgaccctcttgcctcccgcttgggaatacattgggcccactgaataatctatccctatcaacaactttgacttaatcatctgcaaagcccttttcactgcataaggtaacgtattcacagattctagggatgtggacattgttgaggtgccattgctctgactaccacaaattctgagctcctcaaggccaggggcagcctcttgcccactcctggatccccagcatgtcacacagcgcctggcccaagtaagtgctcattagctgttttatcaatgaacggatcagttaatgaacaagggtatcaggggggtggggggctgtcttcctactcagcaaaaaagcactggtcctggaaaaacactcaccccatgtttgaggagctaaagtcgtgggtgatgaacgggtgcaaggcaaccaatgacagtgattattggcctcacgtgtctcagcattacagtgggcaggcaagtgccttcagaagaaacaggtctctctcaaagctactggctgctgctcagcctggccccctacccctcaggggaagcctgcatagtccagcaggtctgagaggggtgagtggccttttgcctgattgtgtgtgtgacatcgaagtctatgccacattgaacatgcatgacagctgagcacgagcgaccccggaagcacacagcaactaaaataattaggcacggccactgacacgtgtgaggcgctgcttttaagcattttacatattctaactcatttaaccctccagcaacttgatgggtactattatccccattttatagaggggaaaactgaggcccaccaaagtcaaataacttgcccaaggtcacacaacattaagaggtagaatcaagatttgaactcaggcatcccagatgcagagtcagctctgaagtgctatgctgtgctcagcaagtcaaagtcagtcagtcctggcatcagggactatctgtacagccgctggctctgcctcgcgcttccctgtccaccctcagcagagcgatgtggagagagaagccagatggaaaaggaagagcccaaggcgggatctaggggtcgctggatctgggggtcgctggatctgggggtcacaggatctgggggttgctggatctgggagttgtgggatctgagggttgttggatctgggggttgtgggatctgggggttgctggatctgggagttgtgggatctgggggttgctggatctgggagttgtgggatctggaggttgctggatctggggtttgttggatctgggggtcgtgggatctgggggttgctggatctgggggtcactggatcgggggggtcactggatctggggtcataggatctgggagtcacaggatctgggggtcacgggatctgggggttgtgggatctgggggtcatgggatctgggggtcacaggatctgagggttgtgggatctgggggtccctggatctgggggttgtggtacctgggggtcgctggatctggggtcactggatctgggggtcatgggatctgggggtcactggagcccactccacacctcctccaccagaacagcctcacggaagaccttcacacttcccagagcagcaccgtgctcatggaaagatcagggcacaagatgtggcaactgattctgtcagatgcaatttgtgggccatgcctggatcctggatcctgatttgaacaaatcaaaagtaacaagacatttgtgagataatcagaaactgaagctccgactagttatttgatacccggtaagtaccaaaaactagataagaacaggtttttctgactcctagggttaagcttgtcccccacaacaggggtccccaacccccaggccatggagctataccagtctgtggcctgttaggaaccaggcctcacagcagaaggtgaggggcaacaggcaagcatgacctaccacctgagtgccgcctcctgtcagatcagccgcagcaatagattctcaaagcagaacgggccctattatgaattgcacatgcaagggatctaagtggtaccctcatgagaatcgaatgcctgatgatctgaggtggactaatttcatcccagaaccatcccccatccccaccccggcccatggaaaaattgtcttccacgaaactggtccccagtgccagaacggttggggaccactgctctatgaaagtagtttcttttttcctttcctcttttttttttttttttttttttgagacagggtcacactgtgttgcccggactgaggtgcagtggtgtgatcacagctcactggactcaagtgatgctcccacctcagcctctcgagcagctggaaccatagacagggaccaagacacctggctcatttttgaatttttgaatttttgtagagatgaggtctcgctatgttgcccaggctggtctcaagctcttggctcaagtgatcctcccactttggtctcccaaagagctgggattgcaggcatgagccaccgcccggccctttaaaagactagtttccaaatgttcaacagagctctgtggggctgcagggttaaactctgagcgtaaatagacctcagtgagcaccaggactcggttttaatttttttgttctgatcatgtggtcacactttttttttaaagagtccatatcttttagagataaatactaaaatgcttacaaataaaatgggaagatatctgagttttgcttacttctgggggagaataagattggccaagagctgctgatggtggctgtagctcgcgaatgggcacaggggtgtcatggaaccattctctctacttttgtgagtgcttgaaattttccagaattaaaagaactctttcaaaaggttcaacttcttactccactcccaggatctaagacgattacaaccactttcactccatcagtcatgccctgaaaacagattaaattatcaacatttcccttgccaaaggaaatttacaactgtcaaggagagacataaagaagggcactaagattttcacctgccggggtttggcgggagggggaaggactttgacagcttccatgcaaccggggcatgaagcagggcgtgggtccaggagggagaagatccaaagtcgaatgttgtaaagatgtgctgatttcccagcgctgtctctggggagctccggcagcgcaagagggcaaagcacagctggaagctcagagctgcagtcccaggtcctggggtgagtggtccccccatggcaggaacagaggggagtgattttgtgtttccatgtggagttggggggttgctcaggtgtacagacctggtccccccttgaagccaggggaccggcctcttatacccctagccaatcagttgttggctgtagggttggagcggtgttacttaaactcccagaagggaggagatgtgagcctttagcaatgaacaattataccagctggagaatgggtggcccacccagcagaggggatctgggaagtagggggcaccgtcggcctctcccctgcggagccccatcctgctgccagttactgacccttattgctggaggagccccagacacttttcttgcagtctggaaatgcatacacacagagagaccagttcaagaaaacagagccccagggaggagaagggacttgtcgagggccacgagggggcaggactagaatccagattcttgactccctccttggacggaggcctctgtttcctgcaggccttccagctgctggtgggtgagctctctttacaccaggcacactgtctggaagcaccaggaggaggctggttcagtacagtcgtaggtggttttctaactggcattcactgaaacgctgatcctctaaggcaccccacccccaacaccagcctgcctgtcacatgttgtgacactcttgtcactcagcacctctcaattcctgcctttctgtccttgacatgcatgcacatgcatgcacacacatgcacacacacacacacgcacacacacacacacacacacaccctgagaagctctctctgtcctctagggctccactgcacagtctgatgagggtcatattattcatgccacgtttcctctgcctgctcagccacagacctcccatggacacatcttactcactcctgcctcggtcc

SEQ ID NO: 5279 - DNA, 6000 bp, Homo sapiens
cttctccctgtacttagggtgggggtcagggggcaagagaaggttagaaagtccttggttctaaggcagcttctaagaccttcccatttcttttcattcaaaagtgctcagcatgctgtaacctcaggaccaatccaaactgggcctactcttttgataacagaatgtcatgttctcttgtaggtatgacagagccaaaactccaagtcatgtcagtagggcatgcccaatagaaaatgctttgacatctaacaacacccagaaccaatgattcctccctgtggtaccaagaagacctagacatgatcggaacctaaatgctggaactctttcaggagcaaagggtctgttgaccagaaagatccaggggtaaaatccacctcaacatacccgtgtagtcaaatttgacaccctccaatcagaccctgccaagccaaaattcctaatacgtttccttgccatctgtattagtctgttttcacgctgctgacaaagacatacctgagactggacaatttacaaaagaggtttaattggacttacagttccacgtggctggggaaacctcacaatcatggcagaaggcaaggaggagcaagtcacatcttacatggatggcagcaggcaaaaacaaagagcttgtacagggaaactcctgtttctcaaaaccatcagacctcatgagacttattcactatcacaagaacagcacaagaaagacctgcccctatgattcaattatctcccactgggtccctcccacaacatgtgagaattcaagatgagatttgggtggggacacagccaaaccatatcaccctctgaccccttaaatcttgccccagaccccaaattaggagacagatgtgagccatgcctccagtctccttgctgggtggccctgcaataaagcctttctgttctcaaaagctggtaccatagtattggcttctatgtgcatcaggcagtgagcctatttgctcagaaacaatactaaagcaccatactttggggtatcattctctgagccccaaccaggggtcattcctgaggccatgaatgagggagagagtttctggctgaggaaacttgcccgtaagtcttgcaccatctggcccatgctgaccatcacagtctcactttatcttctttccagccacattggcctttcagttcctcaaacatacccgcgctggctggtttcagaacttctgcctggatcactgtcctctcccccctccctcttccccctcctgtctcaaaccctccaatgtaaacttcagtctcaccttaaatgtcacttcctctggagcccttttcatggtccctggtttaaatttagtccatacagcaaactgtgattgtcctccaaaccacttcaaagaactgtaatcatttaattatctatttataagtatctgatgtctgggttcttcactagactgtaaacttcatgatggcaggaaccataattgttctggttactcttgctctcaagagtgtaagagtgccacattgtgcctggcacatagcaggaactttatgatgattgttggttggaagacaggttgcctgacaggccagtcatctcaactactgtacttggatgtgtggttggaaataaaatggatccgtttaggagaggccttgaacccaaggtggtaaaacttgggtggtgattgggctggcagcacaacagcatgtgtttgcatttgagctatggagtgataaccatactttcagaagtttcctctggaagacacttactggatgggttggagtgggacagactagaaggagggagactcagtaattaattgttgaaccaatctttattgagtacccatagcgtgtcagcccggcacgatactaggtgttggtagtatcacaatgagcaaaaccagaggtgtccctctactggggagtttatggctatgatagcaggatgcaggaaaaaggaagtcctgtcaaggcttttccgtttcataagccagcccacagggaatagaaaaaattcagggcacttggtttcagagaaacagggagagttaagggaaaagagatatatgcattggtgctggtgggtccctgaggaaggaactctatgccttgttcctcccagaccaaagctgctgttgctgcctggggagcatggggacacattggccaaagacccaaaagaagcttaatttcccaggtatcttcagtagcaatctgtgtggataagtgacagaagattagtcagggagaagttgccagcttaaacaactgacactgataattagatgaattttctttttttctttttttttacatggagtctcactcactgtcacccagctggagagcagtggcgtgatcttggctcactgcaacctctgccttctggatttaagtgattctcctgcctcagcctcctgagtagggattacagcacacaccaccacacctggctagttttgtttggtatttttagagagacagggtttcatcattttggctaggctggacttgaactctttcacctcaagtgatccctctgcctcagtctcccaaagtgctgggattacaggtgtgagccattgcccccggccaggattagatacattttctcccccaactttggccctatattcattttccaaaaggtgtctacgacctgaaaatcaaggatgggaagaaccctgaactgtctgagactgtttctactacccacatggaaaagagagttgaaaagaaattaatttgtcatagaaaaaaaaaaaggttaaatttctttcccaggaaagtctgtgacctgagattgttaatcttagacatcagaaaggatcgcacaagcaaatgtaaaattgaaactgttagaaaagctggaaggtgaggtttaggatgctaccagagcctgtcctggaagaaggactcttagctgaggggcaggaagtgacaagagctcagatgaagatggatgtgtctgaggaacatctgatggaaagaaacaactgggtgaggtgacagattgggagcctacagagtgtgtactctaggaggaaggcagaactggaaggctgaatggttgggggtgggagggaagagttacgttttagagggttgagtttgagaaacaagttttaacatcaaaaggaagctctcctatgacagctcttgatggtgataaaaacattcagtcagcaacctggatttttttttttttttttaatgttcatgcttgttgcttccttgaaacttcacacctactgtgaagtggtatttttaggtcctttatagttcttgaacgtcaagcaatgaaggctcagagaaatgaagctgtgtgctcaggatcacacgacaggcaagagatcacctcattctgaagccctgttcattctccttcacggtgctgctgaagcaggatattgccctgacctttcacaggactcacaacaggggtgccccgtttactcagcccgctgctctcaactcctcatgggagggagtacgcaagtgaacaaggcgggaactggagtgcacaagcgctggaacaagccagccgtttttcagcaccagtgggatcacactccactcactcaagattcaccgcgttccacccctcataggagggagcgtgcaggtgagtgggtgcaggagccagagcgtgcgcttttggacaccggcaggagcgaactccgtgcaggccccggggcagtgtccaggcagagtgcctgaggctcctgaagccccagagggcatgttacagtgttcttttggctctgtcgtccgtggacagcttaagtgttaacagctccgtgggcccgcggttgccctccaccagcaagggcagagggccagcgtgacagcttttgtatccgcactcgtggctcccgagctcttgtccagcgtccaagaaaaataaagctgcacgaacaaattaaaggacaaatgcctgggattttattgctgatcaaagtggatttcagagggaaggtgagctgaaaagaggggggtgggacaggccggtatgtagtcttcccttgaagtccagctatctccagccagattcgtctcagaagttacgccttaagctgtccctctgaagacaagctgcttctctctgacatccagccatggtcgtcccctcatccagctgcttctcctctctgccagatgagtctggggtctttctaggcacaggatgaggcagggcagagccatgggtggcttaggaaaaggcaacattcaactggaaaaacatggatagaagttctcactttgggccatggtttcaggctttttggcttgagggtggggtttcaccagggacccgctcttttctacctagcatttatctgcctcctgtccctatgcactgcctttgtggcagaaaaaggagagtgagagttggttcctctctttctctgaaattctgagctaacatttgggagccgtctacagtattcaggtatgaattttctctctgggggagcgcattcgttttcctagagcagtgtgcttttaattgctcctttaatatctttctcttttgtgcctttttagcgcgaaaagtgtatgggaagactaggtgctcgttagcggctcggttagaactacattgcccacaatgccccagggaacatttgtagctctagaactacatgacccaaaatgccgagtggtggcaagaggaggattagcttccactccgatttcaaagatccagtttacccactctacagcccagatatagtcacttatttcccctttccagccagagacttccgttccctgctggaacttccgatcccattcttctctcggtgggaatgcttgtggggggaaaaagaaacgcaatagataaagcggggcgcatgcgctcccggcacaggcttcgattgtgaggaaggccggctagtctccgagctcatcccgccttgcgcatgcggagaaggtaaaccagcgccccgagttgaggcgcgggtttggtggcgcgtttcagcgaagtcgcacgtgaaggatagcagtggcctgagaaaggtgagagcgggccgaggtcggaatgtggggcagcgcacgggaaggggagacagcagccgctgcaggcggcaccaggcggagccgcgaggcctggagagtccgagtggggaggggtccgcgcgcccagcgtgcgaaacaaaccggggacccggatccccgttgctatgcaaccgggggcgtcgtttccaggcaacccgggaggcgcacgtttccggggagaagagggttgcggcgaggttccgaggtccggcagaggtggagcggctcccgggcgtggggaccaggccagcgccaagcccgagcccccgaaccccgacccacggcccagcctcctgcagcctcggctcgagcccttcggggggccccaaactcatgggtcgcgccacgttccttgccagcgacgctacccctcagcgcttggcaggggacgcgccgttcgaaatagcacatgccactgacaccctgtctccgggaggctgcgccccggttagggcgcggagcggcagggaagctgcccctttgccgtcgccctgcccccaaacagttgctgggcagcagctgtcaggggtttagtgggagctgcccccaacctgccagggcgctgacttcattctctgcagtggcggcttcgccttgtttaggaccttcctttagactcagctgtgcttctcgtgtggctgctgtatatttggatctactattaaaataacctccctcctcacctctccatggctttctcgttcgaccctcacggtttcttggcaggttgctaatattcatttaataaacatttattagtcatctttcctactaggcgctggggattccaacatgtcaagtctaaccgggagtcgctcggtctactggggaaggcaggttgataaactgctaaattatgctacgatatatagtcagtggtaatgtgtgtgctgcaacatttctatagatgtttagtttacaaagcgcttgctgcag

SEQ ID NO: 5280 - DNA, 6000 bp, Homo sapiens
tatgcttgtaccacaacccacccctgtggttaagagcccagggtcttcatccaaacagacctgagttcagagcctacccctactacttcttagttgtgggatcttgagcaaactacctctctaacttcagtgtcattatctgcaaggctgtgctaaggacacattctacttggttgagttgtaatgagaactgagggttaaggttccatataaagtgtctggcacaataggaagtgctcactaagtacccgtcagcattaaactttcccacgtgccacatggtgagggtggcggcctttcagttctaggtcctctcttccttctggtgggagagtcgggcttccctcagtaatgttgcttattccaatttgttgggtgaaggtcagaagagagatacagtctggatgaaaaactcctgagttctccacagggtgcagagccactgggtgtcccttgcaaattgagttcacaaggtcctgctccaagagttctaaataaaaatgagctcattgatttggacacccagctgggtgcacctttcagcttcatttttgaaacttcgagtctgtgaaacatgggctgcctggggtgtatcatgtcaatccagccccagcaacactcacatcatgctgtcttgcctctacttaccctgtgccctgtcaagagcacccttcccgccaccctacacctgagctacctgctgaaacctaccaacgcttctgtttgtcctattctccctttcatttctttcttttcgtttcctgccctctttggctttacagcaggcttctctccccaacaagttccattttattgttcaactagtttaacatgcatgtttaattgaacaaggtcaaatgctagtcaatattttgccctcccaccaaataatagacctttcccactctgatcactcctcaccaatttgttattgttttatggttctttagttttatctcattttttttttcttttttaatttttttttctttttttttttgagacagagtctcgctctgtcgcccaggctggagtgcagtggtgcagtcttggctcgctgcaacctccacctcccagtttcaagtgattctcctgcctcagcctcctgcatagctgggactacagatgcgagccaccacgcctggctaatttttgtatttttagtagagatggggtttagccgttttggccaagctgttctcaaactcatgacctcaagtgatccaaccacctcagcctcccaaagtgctgggattacaggcatgagccaccatgtccagcctatttcatttttttctaactccacaaagtggacatttttgtaattattttatgctatcagtgcttattaaatccacttctgtgtttacatatttctttgctcaccattcttacttgaatcttagacttttttttctgagattatttttcttgtttttgaagaacatcctttagaattcccttaggtgagagtctgttagctataaatgctctcaattttcatctgaaaatgtgtcttttaaaccttatacttgaaagatagtcaaggttgacagttatttttttattagtactttgagatgttgttccatcgccttctggctttagttattggtattgacatattagctgcccatctacttcatcattcatccatcttctgtctagtgatcagcagttttgctaccaaaaatgtttggtgtagatttctttttatttatcatgcttgggttgggggagcttccagaatctgaggattgtgtctttcatcaagtctagaaattttccattttcttctagaactctaattagacatatttaaatccttgttccttgtctatgtctcttagcctctttcatattttccaccactttgtcctcctgtgctccatcctgggtaaattcttcaaatctattgttcaccccagtagttgtctcttcagccatattaatctgctgtttatttttatgtatgtatttatttatttatttttgagacagagtctcactctcacccaggccggagtgcagtggcacaatctcgactcactgcaatctctgcctcctgggttcaagcaattcttgtgctacagcctcctgagtagctgggactacaggcatgtgccacctcacctggctaatttttgtatttttaatagagacagggtttcactgtgttagccaggctagtcttgaactcctggcctcaagccatcagactgccttagcttcccaaagtgctgagccttaatctactgtttaatctgtacactgggcttctattttcaaaaattatgtttttacataactgcttgctttttttccctcaatcttcctggtcactttaaatagtctcttgttccttatctatactttcaattaccaacttttaattcttgaagcatatgaaacatccttattttatattatatatactgcaattccaacatctgagatgtgttcgaaggtctgcatttttagtttattgcttggtgctcctctcacctaaagcaccttgtgtcctgtgttttatgatttttctgttttacaaacatgtgaactcatgttccatgggagtttttctgtgggatttctttgagtcatgaatataggatgagttactccagagacaatttttatcatttgtttctgccacgtgcctaaggagctattatttaccttactttaaattcttatcttatctttttgtttgtttgttttttgtgtggttgtttttgccacaaagtcaccatgagtttcacctccaggcctattagtgggtagacttgtggtgaggggcattcagggttgacatttatttttctcccactcagagtccatactgagttgggcaagctctgtgtcagctcgctttaaggaatttttctctccgagttctccactgtggatgttgtatttcagtgctctttgtttaaggcagaaattttggattttgtttttcacttcgattttgtttctcagctttaacttttgtccatgttcataagactgaagctcttggtcaactggatcaacagatacttctctgctggctgtgatctctttggatttttgttgtctttatatattaacatatacaaggtctcactctgttgcccaggctggagtacagcagtgcaatcttggcttattaaagccttgacctcctgggctcaagcgatcctcccacctcagcctcctgagtagctgagaccgcaggtgtgtgccaccaaacctggctaattttttgcaccttttgcagagagagggtttcaccatgttgcccaggcttattgtcgtttttgatctctgatgattttcttcatttctcaccacctcagctacacattttaaaagatggtttacaatatttttgtggtgttttgtattaggagaattcttcagcatctgctgtctaccatattgtcagaaatggagtctagccatccttcccggcccatttcaaacgggttcctcttaggaccaggagacctcacattatgtgtgtcctaccttggcctgtggtttggtcacttgtgtgtgtgtgaacttcatcctccttgagggcaggaatatggtttcctctctttcacttccacagagtcctgtccagagttctgcacaccaagactgtgtaaatgaatggaattgcatctgggagctcgaggcacccatgcaaacctgtgctgccagtgacttccaccagagggcagcggcagcaggtgccggcgctggggcaggactgggaggagtctcactctgggggcgcctggttccccgtggctctaatacttgccgcatcaaatgcatacacccacatttaggaccgaacccaatggaggaggaccgctcctcattccacatgttggggaaatgaagacaagcaaggatgcaggaagtggagggccaggagaggtggacctgggatgggaccaattgaggcagggccaggatttggaaccaaaccccttctggatttgaccacttccagggccctgcttggacaaccaaattatctattccttttctcattcaataaacatttattcacctcctaccatatgctccacagggagtaccatgggaattaaacacgcttggcccctgccttcttcctatagcgtcagtctgctgcagtgcaatggggcaactcggggtttctcaggcagccctgggcttccttccttcagccctttgctcctgctattccttctggcccagaggcctcccatgattgctgtttgtcaaaatcctgctcagccttgtagacccagctcccatgcctgactcccacggaggcatgcccagtctggtacctggagatgggatagctggccccactgtgccatctgacggggcggctcccacaaggccttggcacccttccctgtagaaggacttgtgggatggccatctctcaggcccttcccaatttatatttctctgaggggagacttaggctcttatctccaaaagtgcatcaagaccacaccctccttcccaaccaccattgcacctaaggttaagataaaactcaggatttaatccaagagagccaaattacacggaccgggacaggcaatgggtcattcactccctcttccaatatgtactgattgagcagctactacattatcaattttttcttctgggccaccagaaatgaggcatggctcttccacttcccttcttcttagaagaccctcggggaagtgtgtctgcatggatgcgtgtgcatgcgtgtgtctggctccgtgactcttggggtgcagcctggatgggtgggctcccagcacaggcagctggggctctccccaccagcccctgtaacagcagcccagcttcctgcagaccaaaaccacaagcagaacaagcaggcgtgagacactcacaggttgggtttgatcgcatgcgtgtcggagaggagagagcagagagagacacaggaacaagaacagcaaagggtagagcagacctgcgccaggggcgcacaacggccgtgtccacctcccggccccaagatggtgcttcccacaggcagccacgcgtagcagccagagacagctccagacatgtggctcttcttcgggatcactggattgctgacggcagccctctcaggtaggcccccttccctcatctcctgccactggtgctggaggagccgggtccggccctctcagtcccctttctggttgtttccttgtggtcacttttctaggatcttttagccaagactacactcaggtaccagggaggtccagcatctggggctaggagaggacacaggagcccctcgaggggctggggctgtgcctggaagcctcctggagtgacagaatgtgggaagcatgctttgtgccttaccaatgggtccctagggtgtgaggagggaggtgcctctcccatccttaagctcaggaactcccccatttcctatttcttgccaactcttaagaaggaaccgttcaccttccagagaggcaggaccactgatggtggtactttcaacgccaaagctgaggcttggggtccagcaggcgtaggccaatcacaggagagcacctcccgaaacaggactcagggaagccagggagagttctggacaaccaggcgctgatggcctcagcacaaccagctggggtagtctagggcataagcgagcatgaaggccacccccacgtctcaagctgcccccaagtgtcaaggcacctggccacctgggccagggaatcagatggccagaaggtttggggcactagactgtgctccccagatacttgctggcccctgttgagtgcagggtccaagctggccagagcggggcaggggcctggagatgcaagagatcctgaccccatcgagctctcacattttgggatttgggaagactggtatggaaacagaattcgggccaggggagtctgggtccaccttgcagccagagagccaagtgctttcattttgtgatggaggagacccaggaagacccagtcagga

SEQ ID NO: 5281 - DNA, 6000 bp, Homo sapiens
acccggagtcccaccaggactggacagcccccactggattatactggatatgtgggcatagagcttacgccaaattacctgaccactgggcaggtagttgtgttattggcactattaaaccatctttcttccaactgcccataaaaacaggtgaactcctgggcttccctgtctatgcttcccgcaaaaagagaagcatagctatagaaaattggaaagatgatgaatggccgccccctgagagaatcatacaatattatgggcctgttacttgggcacaagacggcttgtggggataccagacccccatttacgtgctcaaccgaatcatacggttacaagctgccttagaaataatcactgataaaatcagcagagccttgactattctggcctggcaagaaactcagatgagaaatgctatctctcaaaatagattggctctcgactacttgctagcagctgaaggaggggtctatgggaaatttaaccttactaattgctgtctacacgtagatgatcaaggacaagtagttgaagatatagttagagataggacaaaactggcacatgtgcccgtgcaagtgtggcatgaatttgatcctggggccatgtttggaaaatggttcccagcactaggaggatttaaaactcttataataggagttttaatagtaataggaacctgcttactgctcccttgtttgctacctgtacttcttcaaatgataaaaagcttcatcgctaccttagttcaccaaaatgcttcagcccaagtgtactatgtgaatcactattgatctgtcttgcaagaagacatggtagtgaaaatgaaagtgagaactcccactcatgagtgagattctcaaaagaggggaataagggaggagaccacccctcatactgtcttatgcccaatttctgcctccaaagaaagaagaagtaaaaactaaaaggcagaaatgaaatctgctcggcaccacacctgggcttggtagttaaagatcgacccctgacctaatctgttatgttatctatagattacagacattttatagaaaagcactgtgaaaatccctgtcctattctgttccattctaattatcagtgcatgcagcccccagtcatgtaccccctgcttgctcaatcgatcatgaccctctcaagcagactcccttagagttgtgagcccttaaaagggacaggaattgctcactcagagagctcagctcttgagacaggagtcttgctgatgctcccggctgaataaaccccttctttctttaacttggtgtctgaggggttttgtctgtggcttgtcctgctacaggtctaagtggaatctaagtggaggcatcactgagccagcctctccagcccagggatggggaggccccaggccctagtggacctggaccagtgatcacgtccttgaactacttcctacctgcctggggtggcccagagtacaggaagcccaaggagccaggagctttctcatctgggagcacaaaggatgtgaggaaaaaacggaacccagcccagcccagggaaacacagggactttcccctgccccgggcttcccatcttctttgcagagaccctgcctcttcttcaagggggatgattccagaccctctaagagcaacagggacacggagctcacatacataccccacatcaacatggagatcacacacctcaacacggagatcacacacatcaacatggaaatcacacacacatatcgaatggggattacacacatcaacgtggagctcatacatacaccccaacatggagatcacacccacaacacagagatcacacaagtcaacatggagatcacacacacacatcaacatggaaatcacacacacacatcaacatggaaatcacacacatcaacatggagatcacacacacacatcaacatggagattacacatacatcaacatggagatcacacacacatcaacatggagatcacacacacacatcaacatggagatcacattcgcacacatcaacatggagatcacacacacacatcaacatggagattcacacatatcaacatggagatcacattcacacacatcaacatggagatcacattcacacacatcaacatggagatcacaaacacacatcaacatggagatcaaattcacacatcaacatggagattacacacacatcaacatggagatcacattcacacacatctacatggagatcacattcacaacacaaacatggagatcacacacacatatatcaaatggggattacacacacatcaaccccaacatggagatcacacacacagcacagagatcacacatgtcaacatggagatcatacacacacatcaacatggagatcacacacacatcaacatggagatcacacacacatcaacatggagatcacacacactcgtcaacatggagatcacattcacacacatcaacatggagatcacacacacacatcaacatggagatcacacacacacgacatggagatcacacacacacatcaacatggagatcactcacacacatcaacatggagatcacacacacatcaacatggagatcacattcacacacatcaacatggagatcacacacacacaacatggagattacacacacacatcaacatggagatcacacacacatcaacatggagatcacacacacacaacatggagatcacacacacacatcaacatggagatcacacacacatcaacatggagatcacacatacatcaacatggagatcacacacacacgacatggagatcacacacacacatcaacatggagatcactcacacacatcaacatggagatcacacacacacatcaacatggagatcacattcacacacatcaacatggagatcacacacacacaacatggagattacacacacacatcaacatggagattacacacacaacatggagatcacattcacacatatcaacatggagatcacattcacacacataaacatggagatcacacacacacatcaacatggagatcacacacacatcaacatggagatcacacacacaacatggagatcacacacacacatcaacatggagattacacacacatcaacatggagatcacattcacacacatcaacatggagatcacaaacacacatcaacatggagatcacacacacacatcaacatggagatcacattcacacacatcaacatggagatcacaaacacacatcaacatggagatcacacacacacatcaacatggagattacacacacatcaacatggagatcacattcacacacatcaacatggagatcacacacacatcaacatggagatcacacacacatcaacatggagatcacacacacacatcaacatggagattacacacacatcaacatggagatcacattcacacacatcaacatggagatcacacacacacatcaacatggagatcacacacacacatcaacatggagattacacacacatcaacatggagatcacattcgcacacatcaacatggagatcacacacacacaacatggagatcacacacacacatcaacatggagattacacacacatcaacatggagatcacacactcatccacatggagatcacacacacacatcaacatggagatcacacacacatcaacatggagatcacattcacacacatcaacatggagatcacaaacacacatcaacatggagatcacacacacacatcaacatggagattacacacacatcaacatggagatcacattcacacacatcaacatggagatcacacacacacatcaacatggagatcacacacacacgtcaacatggagatcacattcacacacatcaacatggagatcacattcacacacacaaacatggagatcacacacacatatatcaaatggggattacacacacatcaaccccaacatggagatcacacacacaacacagagatcacacaagtcaacatggagatcatacacacacatcaacatggaaatcacaaacacacaacatggaaatcacacacacatatcaacatggagatcacacacacacatcaacatggagatcacacacacatcaacatggcgatcacaatcacacacatcaacatggagatcacacacaacacagaaatcacacacgtcaacatggagattacacacacatcaacatggagttcacacacacatcaacatggagatcacacacactcaacatggagctcacacatacacctcaacatggagatcacacaacacagagatgacacacacaacacagagatcacacaagtcaacatggagatctctctctctctacacacacacacacacacacacacacacacacacacacacactggcacaagcccagcattcatggcgcagccatctcttgtacttgctagcaaaacaccacctgtggaaagtcagctcaaacttccaacctcatccctcacaaagggggaatggagggtttggttttggctttcactggagtctgcaacaagaactggcatcatgctgcccatttcccgcctctccccacccagacccctgcctcagggacgcctgtcctcagcccagccctcagctgcagccaggccttcagcctccgtaacccccgctcagggtccccaccccctgcagccctgtccctccaggatgcatggccttgtcctgtgtgggggtggccgagagcactgccccagccctgggtaccttgggcaggaagctggcagaggccagggctgccattcaaacaggggcaggtggttttgccaggaggaagttgacagttcaacttcaaacatgggtgacgcaggccccacactgcctgctccccgtcccacccctccctgagcacgccaccccgccctctccctctctgagagcgagatacccggccagacaccctcacctgcggtgcccagctgcccaggctgaggcaagagaaggccagaaaccatgcccatggggtctctgcaaccgctggccaccttgtacctgctggggatgctgggtgagtacccctcccaggtgtcctgcgaacacccgggctcgctccagtgcaaggaaggagttcccagttttacccaaggctgactctgggatccacatgtcagccctctggagcgttgtggagatttggggccactgggatccctgcctgcccccactaagccgcagcttggccctctgtcctgcatgtcccacccgccaggagcacaaccttgcctctctcatgcgctgttgagaaccctgctttacccttccagtgcaagagagactgcaggggggacccgcatttgatggggcccagacaacttgattcctaggctaagttggattttagcagagcattcaggcctccctctgcgaggtcccccactgacagcccagcctttacttggtcgcctccagagacatggaaactcgccgtctccgaggcagctctgatgatgctctggacagacagtgggccgaggcagggtggagccgcctctgaggacgatgtctgagcaaatgtcaaggactcatagcggaagtcctaggccctctcatgcccagtcctgggtcagtcccagaggggcccagccaggccggctgggatgagtacacgctgggcctgctctcactccagccctgggttgtaagcccaaccctgtgtgacctcggataggtccccaagcctctccaggccttgatctccccatttatgaaatgtgggggttgggggtgtgaactggatgaggcctgacccacttcctgaggatttagaaggtctggcagggtgacagaggtgcgtgactctgggctggaaacaggaggatgcgagcagcttccaggctggcagggagagggtccggaggccttgcctgcctgagcagggagcctcagcagccttctagggaaaccg

SEQ ID NO: 5282 - DNA, 6000 bp, Homo sapiens
atcaatgtccacctagagataataacccagcttattttatttgagttttgagacagggtcttgctctgtcttgcactccagctggagtgcagtggcacgatcatggatcactgaagtctccacctctgcggttcaagcattcctcccacctcagcctcccgagtagctgggactataggcatgcaccaccacatccaactaattttttatatttttgtacagacagggtctcactgtgttgcccaggctggtctcaaactcctgggctcaagtgatcctcccaccttggcctcccaaagtgttgggattacaggtgtgagccaccacgcctggcctaacccagtttcttagatagggtccccagcctgtcatttaaggcatctaaatttgatgcacttactaagttgatgccatttttgttgttgaaaattattcattttttaaaaatagttatgactttcaccacatattaataaatcattatctagtgagcttggttaaagtttgacctcaccaatattgctagttaagaaaatacatgtatggcactttcacataccttgtgtcctttgagcctcgttattaaaatagatgagataggttagaaatcactatctccgctgggtgcggtggcttatgcctgtaatcccagcactttgggaggccgaggtgggcagatcacctgaggtcgggagttcgagaccaacctcaccaacatggagaaaccctgtctctactaaaaatacaaaattagctgggtgtggtggcacatgccatgtaatcccagctactcgggaggctgaggcaggagaatcgcttgaacccgggaggcagaggttgcagtgagccaagattgcaccactgcactccagcctgggggatagagtgagactccatcttgggggaaaaaaaaagagagagagagagagagagagagagagagagagagagagggagggagggagggagggagggagggagagagagagagagagagagagagagagagaaagaaagaaaggaaagaaagaaagaaagaaagaaagaaaaatcactgtctcctttttatcatgaggaaactgaaggtcagagacagaggtctaacatcacatggtaggtatgggaaaggaatactgtagcggtctgtaattgcttttggtttgtgacttcccacaaaaaggaacagaccctgttccccaaagcccaggtctgctgcttggcttatgacctacacctaatagagtaactcagccgtctgataacagtggcccaatggttagcatctgatgcagagcccattaaactggaattaatccttgggagcagggaatgggggagaattatttctgctagcgtagcttagcaaatacagccatatttttttgtcacatggaggagacccttctgcagtaagagagaatcaggtgttggccgggtgcagtggctcacgcctgtaatcccagcactttgggaggctgaggtgggcagatcacgaggtcagaagatcgagaccatcatggccaacatggtgaaaccccatctctactaaaaatacaaaaattatctgggcatggtgccacccaccacggcctcctaaagtgctgggattataggcataagccactgctcccagcctaggtgtttcaaacataacgttaaaatagaatttttaatttttcacccctgtactaactctgttccctcatcttggtaaatggtcccattatctattcatttgctcaactcaaatgctagaatcagacttatttctcttattccttcatctctaccatcacccctgcccctgtacctccaactaatgcggtcttgattctacctccaaaggatattctaggctgggcagggtggctcacgcctgtaatcccagcactctgggaggctgaggtgggcagatcacctgaggtcaggagtttgagaccagcctggccaacatggtgaaaccctgtctctactaaaaatataaaaattagccgggcatggtggcgggtgcttgtaatcccagctactcaggaggctgaggcagtagaaccatttgaacccatgaggtggaggttgcagtgagctgagatcgcaccactgcactccagcctgggcgacagagtgagaccctgtctcaaaaaaaaaaaaaaaagaaagaaaaagccctttgggaggccgaggcaggtggatcacgaggtcaggagatcgagaccatcctggctaacacggtgaaaccccgtctctactaaaaatacaaaaaaattagccgggtgtggtggcaggcgcctgtagtcccagctactcgggaggctgaggcaggagaatggcgtgaacctgggaggtggagcttgcagtgagtagagatcgcaccactgcactctagcctgggcaacagagtgagactgcatctcaaaaaaaaattagagggcagggaggcacatggcagtgtccagtgtggggtcagccccctaaagttctctcttaattcaggcctcccctcccctctcctcgagcactgccctcatctttgaactcatcactgttccccagtttctcccgtacatcccagtccagccccagcctctggagttatctttctacaccatggatctgatcacagtacacctgctttacggatgtccaagcctcctccatggtaaagtcctcccttcctaccccttactgaggctgctggggcttttctcaatttgagccccatctaccgccggcctcattggagccattctttgaacttcattcattcatttgtgtcttcaacacatgtttttatgttttttcaggacctaccctggctggtactgtgctgggagccgctggggaccccaggccctggccggtccacgcttctcagccaccctacacaggccacccatacgtgctcccttttagggcctgaaccttcaaagcctctgtgagatactccctggttctgcctttcagctatcactccctgctccgagctccacaccctttacaaatgttcattaaagttatctatatggtatgttaatccatttctgagaaaataattttcttggttccatttccgtcaacgtttgacagtcctcaaggccaccatactctctggaggtcttgcttcatcctcttattttgtacagaaggcttttgtttgggatgtctgctcacactcaaagacagagaggccttactgtctttatgtctgcagtctgtggagtgaatgaaggatgctcagggctgacaccagcatgaaatgtgatgggagaggttggggactgtgtgaatgtgaggaaagggagcccatctgcccccccaagtacaaccccaccagttgggcagagtgatccccccaccacccctgcattgctgtgaaatttagattgggcagggcccgtttgaccatctctctcaatctcaggctctccattttcaagtgagatgtaataatatgcgtcctgtttacctctcagcctgtgatgagaatctaatgattagggtgtgctagcacacaggcacctgtaaatcccattgaaatctgagggccctataactcctctagtgattcccaagcctcgtgcaccccaccctctctgttcatccttacttcccacgtgtcccgttagccctccggatgcagtcaggcccatttcccccaggacgcccggcactaagccgccccatccagctggggtctgaggggcctgtctcttgccccacgcctaaaagacctaaccctcctcctatcccttcgatacggcagtctttatttgctggagtctgcacaacatcactgcccaatgatgtgtctgcttccacgattcccaaagagactgagcttactgagaccagggcaaggaccgcgccagttcctcatcgcccccttcctctgccttcccctcccttccccctcaccgcagccatggcgcccagaccaagaaagcagagcagaggttccgcaattcttttctaagattgtctgactagagggttcaaagccctctaatccaaggccggcttgtgtctctagggaggttgcagaaaggcgccagaatgtggatggcgcggacaatgtgggatactggagtctcgactgccgcgcgccaaggaagggcgtcacctagccaagccggccctggagttgagtgccccgcagcccgccggtccacccgcccggccgcttgctggcaccctggtggccgcgccggctttgtgtcggcatcaggtgcaaacccccagagcgccgggcgtgcgcgcacgcgccccggagcgcgcggagcccattcgttgcccccaccgggatctcctctaggatctcctccggcgcccggggccggagagtgggggagggaggaggtcggacacgtagcctgcctcgcagcagggctcgactccacgcgggagggcgggggagccggggacccgccgctccagcccgctggccttcgaaagatcctcctgggccaatggcaggcggggcgacgcgaccggattggtgcaggcgctctgctgatcgctgtggaaactcgggcggcggggaacgcgggaggatgtggaacccgaggcggggggagccggaggggcgggcagaggaggtgtcgaggccctgagctcccggggagtttttactggaggcaaaagtccatagcgggagggctgagggaggggcggaggaaggggaccgcttgggggcactgggaagccagggatcctccgccaggaaggcagggacactcccgagcgcaggcgagaaggctgggggagggggcgcggtgggaggagtaggagaagacaaaagccgaaagcgaagagggcccgggctgcacacaccggctgggaggcagccgtctgtgcagcgagcagccggcgcggggaggccgcagtgcacggggcgtcacagtcggcaggcagcatggggaagggagggaaccagggcgagggggccgccgagcgcgaggtgtcggtgcccaccttcagctgggaggagattcagaagcataacctgcgcaccgacaggtggctggtcattgaccgcaaggtttacaacatcaccaaatggtccatccagcacccggggggccagcgggtcatcgggcactacgctggagaagatgcaacggtaagggtctgggggcgccccagccacccttctctgctgcaggcggagtcaggatccctggctccccgtgggccaaacagacctccggcgctgaatggagcttgggacgtcctgtagggaaggaaagtgcatctattgcactcgtaccccctccccaatcctcctcctcctctgggccgactggggtggagaccggatctgggacccggggaggcggcgctgcggtgaaagtcccagcggtggagaacagggcaagcatctaccgcgcgcgccgggacccacgcgtcctccccttcctcggggtttgtctggaggcagggactccccaagaggggcgctcgggccagacggctttggcgcccccagcggggaagatggccgcccctgcgcgccgctgaaaggagcgggagcgcaggcagccaggtgtgggactccgcgcttgtcccgcactctccatccagactgggtggcgagaaggaaagctcgtccccggccggagatcgctcctgctgggactcttgtctaagaagttcctcaatggccacctgggaaaaaccgcccagcagctcgggttcccacgctccagggattatctagactcaccccaagctcgagccggccttcttggggaccggcgtccgggattggtggaaggagaacggcctggggtttgcaaagcccaggtcgagtgaggccttgagccggtggatttagcagcactagactggcttggcaacaggtccgtctgcactcgaggttactctcgggcgttcaactcaatggctctctctttttaaatcctgccaagaacacccttccctcatcttgcactcctaaaggttgtgggcctctctggagccattgctgcccaccttacccccacc

SEQ ID NO: 5283 - DNA, 6000 bp, Homo sapiens
cttgatctcagccagcttcattccccggctgcagtcccacaccgacagcatgtgctcattggaatcatccaccacacaaagaaaggcaccctgatcctgaagaagggtgacacataggaggtgcagagtgaaccctggaggtccaggggttcatggtcattaggttaagaggtaccatcacagatggagagggcagaaaaagttgacacacatggccctttctcaagagaaccagctgggtggggttcaggaaggccagaacttccaaggcttcctggtgacatgcaagagtggggttcctaggcaagaatgggggtctagaggcttcagggccagctcaccgcagctgaaaaggccagggccccaacaccccgctcgaaggcccccagtccaatctcctgcagtttcaacagcgtctctgagtcccagatgtgaaccacaggctgcaggggctggtggaggaagagtcacaagtgtgaagcaaaattggagtgcaattccagcatgtctgcctgctccctgactttggccttacctttccatccttatccactccagctgtctgtcccgaggctacccgaacaccatcagggtgaacagcaaggctaaggcagggggaagacactctagggaaagggtctctcaagaccatccaagacaccttctccaagcttgcagagcagcaaggcaactcttttctcctgcttctccatccccccagaccctcttcctgccaagcccaccagccccggactcctcaccatcgaacgcagtctgtgtgcccccggtaatgtctctggccgccacctccaggaccccctgggcctcctccaggccggtacagcaccaccacacaggcgataaagtagaccacctccccagagcgcaacacaaacagattagagcgggagtcacgacccctgtacccataactggggtggagatcacggtcaaggaaagggttagatcaagggcaggaggaggaagaggggagaaagacagagcttctggctggcagggcctagagcagaatgatggtaggagaggatctagaaggctccttgtccccacagacccaggaggaaactgtaaaggtaagaggggtcccaaggtgagaaaggtggttctcatgggactggaaggggcaggatacacccagtcaaggctgagggtctctggcggtgggccactcggcagctcctcaaggctgcggatgccagacgggatgtacatggtaatggggcgccctcgaaggaacatcttcactgagatgccttctacagagaaaaggggtggtgtcaactacccccttccaggaaagacagagcagaaccctacccaccacacctacccaaaatagctcctggggctacagcccaaatcctaaccctgccatccaagttttcctctctgtccctctttacatacccaaattgtaattgctcctccgagatccagggcccccagggctggagagggggtcttttcccccacggctgttgggaagagagaaagcacagggattggggtcaggtcccaagacctaagcggggaggggcaggacacaagaaaagaggtcactgcagaaaccacagtcacttctgcaagcctgtagtttgcttcgtgagtatcagggccctagtagatggagacttctagttccatttaagagataagaagattgaggctgaaggggctgagcgcacagcacaaggccacaaagcttggaagaggcagtgcagggtgccagagccctttctctcctccagaccaccaggcctcagtctcgctctgtcgcccaggctggagtgcagtggtgcgacctcagctcactgcaacctccgcctcctgggttcaagcaattctcctgccttagcctccccagtagctgggattacacgtgcgcgccactaggccccgctattgaccttttcatttccccatccgtaaaatgggaccaaagggagtcgagaatgtacaccagctccgcctctcagggatccgggaggcaagcaagaaagtccacatctctccagagattcctgtcgttagataacagtaaagtgatactgtctcttcagagaataaagcacaggccaaggacagggctagaatgaacatccgggtgtcctggggcccgtacatactctgaggcaactacatccggccactaggatgtcctcttgccctctagaagtaagtattaatagattggtacttggtagatccagcggaaagagggctgaagctctagggacagccgtccatgaaagccatggaagcttctagaaaagcctcttgggatcgcagaaggtgtgctgtgatgtagtggaaagggtaggggaactggagtcaggaagagttaggttcaaatcctgactctagctgtgtgaccccaggcaaatgacttaccctctctgagcctgcttcctcacctgtgcaatgagcagcatgagaccacctaacccccaaggatgttgtggggactgactgagatggaggaggtcgagggtttagcacagtgcccggtacacagcaggcgccccagaagtgtttgtttctttattcctgttgggcaatcaggtccccccaccccaaccagggatgtgaggtgagggatatggaaagtcgagagcctgcgcctggggcggggtgggttgaggggaagcctcacccacctctctgtgctcccggaccgcactaacaggttggcggaggagattgccttcctggagagcttctgccgaggccgctctgagggggatgaggaggaggaagaatttcttcgcggcctggtgggggcatagtgaaggtcattccctccaactgtactctgcaatcctaccacccctcccagcttccgccacagggccacaggacacctacgtgtcagcacgctgtgggggctgcaagggcctgaggatccccggggggccaggggagccagcaccactgctgctgctgccccctccttcagattgggtcccgctaggctcttcgctggccccctgaggggctgggggtccattgctcaggccagggggtccaggggatgacttgagctccacctctgtctccgtctgggtgcctcggctcaccaaggaaggggtgcacgtgggtggcagtcctgggggggctgcaagactgctggagagatgttgaattaacctgaagccccagaggccccaaggaggaggaaaaatggggtgtgatgacatgcatacctgtcccccggaggagctggtgtgccagagccctgcagggaggaagggggcacctgcagccgcagcaggcgaagggcttctgccagggctgcctttaccagttccatctcctgctcctgcacccgaagccgctggctcagagactggagggcctcccgagcagggccgtcacctgggaaaagggcaagaggtactcagaatgtacccatcacctgaagaaagcgtagaggggattctgtctccccacaactttacatgtgtccggtaggactgcccctttcaggcagccccaggcttgaatgctcgtccagaggggaggagacggtggtaaaggatcaagggcctccttctggcagggcaggcgagaaacctggcaaagctcccttcctgctgccgtctcagcctccgcaaagactgggagtaccatggagtaccgggggggaaatatggagtactgccgaggaacgtgggagccacagagagaggcgccgcactggtgagggcagggaccgcagccctccccacgcgcccccagcaagctcaggtctccagcgaaagctgagtaactgagccgggggaacaccaggagagagaacggggtgcgggaatggagtcatactgaggacccagagtacaagaaaagagatccagagtgacaggagagagtgtgagtggtgagcagagtcacagtgaaggtctcagggggcagtggggatcagaaggaaaaagacctgaaataccacgagaagaggcccggagtaacgcagggggcagggaaacatcgaggggcccggagttacgtggggcgtagaatgacgctggggaagcccgaagtgacagcaagacccaagcaactagggagggcgaccggaggaactgtggaggatgctcggagcccctggggcggaggagcacgcggggacgcctccagacagccgtccagctctggcataacccgacgagccgggcgctccgggaaggggcacgccgcccgccccgccccgtactcaccgggccccgcggccccgtccatccggcccccgggttgctccgagcggcggcggcggaggaggcgtctaagccgcgggggccacggccggggagaggggaaggggaagcaccccggggcgcgcgcgaagggcgccgtaccaccaccccgagggggcgctgtcgggcgcggggaaggggcctggagggggcgctgtgggcccggggccgcagtctccagacccccccgggccctcggactctcccggggccgctctcggctcccgggggtggggtggcagggccgtccggtgccacagcgccgcagcacaaacaggcgccggacgcggagccgccaggaagcgcgggagggggggcgggcccgagggggggccgggccgcttggtaacccctccctgtccgggcctcgccgctcagtacgggggcggggctagccggctgaccccctggcctactcccggcctccggctccaggcccttcccggatccccgcccccggattcccaggggacggggaagggagcgcccgccccgatatctccgccccccagcccctaacccctcagggttgagcggaccaaccccaccacttccgcgaggggcaggggcggggtcacaaaacgggccctcggcctaggggcggagtttctcgtaaggggcaaggccaaggcatcttgtattggggctgacaggggggcgggttattagggctgaggatgggaggatgctcagggtattggggtcagggtggcattagcccagctcaagccgggccgggctgactcagcatcctgccccagccagcttccatccctgacacctctgcattcccttgggcagagatgggagatggcgccggtgttgcccctggtgctgcccctgcagccccgcatccgcctggcacaagggctctggctcctctcctggctgctggcgctggctggtggcgtcatcctcctctgtagtgggcacctcctggtccagctaaggcaccttggcaccttcctggctccctcctgtcagttccctgtcctgccccaggctgccctggcagcgggcgcggtggctctgggcacaggactagtgggtgtaggagccagccgggcaagtctgaatgcagctctataccctccctggcgaggggtcctgggcccgctgctggtggctggcacggctggtgggggggggctcctggtcgtcggcctcgggctagccctggctttgcctgggagtctggatgaggcgctggaggagggcctggtgactgccttggctcactacaaggacacagaggtgcctgggcactgtcaggccaaaaggctggtggatgagctgcaactgaggtaccactgctgcgggcgccacgggtacaaggattggtttggggtccagtgggtcagcagccgttacctggatcccggtgaccgggatgtggctgagtgagtgatttgcgtctcccttcctcctcctcctcctccctggacaggctccctcctgctgccttgaatccccacctcgctcagaggggcaataagtagaacatagtggctgagagactggttacagctctgccatttattagctgtgaaacccagggcatgttaccaaaccaccctgggcccattccttcacctgtaaaatggaaataatagtacttatctgatagagttgttgtgaagatgtgaattatgcttggctggcacatagtacagcagtcagtaaatgttttactattctttttcccttctgaacacctgtgcccttcagt

SEQ ID NO: 5284 - DNA, 6000 bp, Homo sapiens
tgatcctcccacttcagcctccttagtaactgggaccacaggggtgagccaccatgcctggctaatttgttaatttttgtagagatggggtctccctatgttgccgaggctggtctcaaactactgggcttaagtgatcctcctgccttagcttcccagagcgctgggattaaaggcatgagctgctgtgcctggtcaatcctttttacatgtttgaggaaaaataaatgtcctgttttcaggctaagatcaagtaataatcctcatgtgttaggaagcatgtgacatggatttttgcagcagagggttagaaaggaactttctttatatacttggccccctgcatttcagggctccaccgccatctgtctgtctgagtgtaaagtggaccttattggcatctgggctgccaaactgctttttttcctttgctttgcccagccttctcttgaaggctaaattcttgaaaaattatattctttgtgttcctatagtaaatattaagctttatatcaacacatatggcaggatctgaggctctttactcacctctggtccatttctctagtcttttctctgtagtctttttgttttcctgtcctccatctcctaatttattagttttattattatattttatattatttttttgagacagagttttgctcttgttgcccaggctggagtgcaatggcgcgatcttggctcactgcaatccctgcctcatgggttcaagtgatttgtctgccacagcctcctgagtagctgaaattacaggcacgcaccaccatacctggctaatttttgtatttttagtagaaacggggtttcaccatgttagccaggctgatattgaattcctgacctcaattgatccgactgcctcggcctccggaagtgctgggattacaggtgagccacagtgcctggcagtttgttttattttggttgaacagttacaagtcttggtttgttttcctgcagcaacaggtttatcttgatatgatacagcgttatttaaattccttttcattttcctgcctttgtcttcacatgctagtttttttcagttgtttcttttttcttcttccttttctttttttttttttttgagagatagtcttgctgtgttgtccaggttgcagtacagtggtgcgatctgggctcactgcaacctctgcctcctgggttcaagtgattctctcacctcagcctccggagtagctgggattacaggtgcccaccaccacgcctggctaatttttgtatttttagtagagacagcgtttcaccatgttggccaggctggtcttgaactcctgacctcaattgatctgcctgccttggtctcccaaagtgctgattacaggtgtgatccaccgtgcctagcctgtttagttgtttctaagaagggagatattggttttgattgacatagttcatccacttatttaccaaacacttgcgaagtgcctactatatgctgcctccgaataggcaggttcgtccacaatagcacaaggctcctgccacttgtcttcaaggacaaagagacatccagacaaacaaatgtaataaacaaatgggacatgattgtagcagaggcagatgcatggtggagggaaagtaattttgtctggggagttgagaaaagctgtcacttgagctagatcttgaatgaataggaactcatgaggttgagtggacaaacaggaagggccaacagcagaggtatggcatgtacaagatgcagagctctgcctgaaaaagcctggtgtgttgtgagtctggcaggtgtttgaaggctgatgtggctggaggctagtgcctgtgaagcaggtggtggctgataagattggagaggcaagctgttatcctctttatgcatgcagaaggaattgacttcaggctgggcacagtggctcatgcctgtaatcccagcactttgggaggctgaggcgggcagatcacctgaagttaggagttcaagaccagcctggccaacatggtgaaaccctgtctctcctaaaaatacaaaattagccgggtgtggcggtgcacgcctcctataatctcaactactggggaggctcaggaagaagaatcgcttgaacctgagaggcacaggttgcagtgagctgagatcgcgccactgcactccatgctgggtgacagtgtgagaccctgtctcaaaaaaaaaaaaacaaaaaacaaaaggaattgacttcagccatttggagccatgaggatctgtgagtgagatactgtgtcatgttggaccatctcaaagacagcttctgaccccacagttctcaaccttgttcttacttatttttagagacagggtctcgctctgtctcctaggctggtatgcagtggtgccaccatggctcactgcagcctcacaaactcctggactcaagtgatcctcctgcttttgcttcccttgagtgttggcatctcatgggactccaggggcacatcaccaattacagatgataattttttttttttttgagacggagtcttgctctgtatcccaggctggagtgcagtggcgcgattttggctcactgcaagctccgcctcccaggttcacgtcattctcctgcctcagcctcctaagtagctgggactacaggcacccgccaccacgcctggctgattttttttttttttttttgcatttttagtagagacggggtttcactgtgttagccaggatggtctcggtctcctgacctcttgatccacctgcctcggcctcccaaagtgctggtattacaggtgtgagacaccacgcctggcctttttttttcttttttgagacagagtctcactctgtcacccaggctggagtgcagccgcgcaatcttggctcactgcaacctctgcctctcgggttcaagcgattctcatgcctcacccctccaagtctgggactacaggcgtgtgctactatgtccagttaatttttgtatttttagtagagatggggtttcaccatgttggccaggctggtcacgaactcctgacctcaagttatccgccaccctcagcctcccaaagtgctgggattacaggtgtcagccaccacacctggcctgttagtttttttgaggcagagtcttgctctatcacccagactggagtgcagtggcccattcttggctcactgcaacctctacctcctgggttcaagcgattctcatgccacagcatgagaagtgggattacagggattagtaggtgggattacaggtgtgagccaccacacccagccaggcccagataattttaaaatttatttttttatttatttagaaatggagtctcactatgttgccccgtctggtcttaaactcctggcctcaaggaatcctccctccttggcctcctaaagggctaggtgacaggcatgagtcacactgcgcccagccttgagcttttgtgctcgagatatagtccattcagaacctctggttggcacttcttatctggcacatgcagggcaccttggatctcttattatctttgagcactggtctgaacccacttgcttgccttctcccaggggctgccccgtgcaccccttgttcctagggtggggatggggttggatgcctggggttgcagaggggactagcagagggtgacccttttctctatgctattacttcagatcttggcttttgctttcttccaaatacacagcaatcttggcttccagcctaggtgggaaagggagaaagaaccgatttcctccagctcctctctgaaagtagcccaactggcactgtttaggaacaaggagttcctgagagtgttggcaccccacggtgttgatgtccggtagttccctgctgtgaaccctgtctctgccccacttcaatccaaggaccctgtggagggaattctaggcttcttcaaagcctctgcagtaccagctgcctccaaggcctaacatagtgaagtgatagggagacaggaccttgggggagtttggggataactgtgggagttcctgcaaggtgggtaagagtctggccatggcatcttctggtctattccacaaaaaaggtggatgcctctgagacctagctctgttatgttcattacagccctatcagtctcttctggatgtctgattcctagctgccaaacatccaggtgctagcagctgggggtggggtaggataagaaggggggtgtctacctcaaccttcctgcccaaaccattcattttaaagtactgtgaagaaggctggattagtgttaaattcaataaagttaacaaagcaaagtattgtagtgagtacacaataaatagttgctgcatgaggaatttcttgaaatgaattcaagatgagtcttgaaaaacgagtgggagtaagccgtgcacggaagcagaggtctagcagaggtctagcgccaagtcccagaggcctgagagggcaagccttggtgggggaaaaggcagaagttgtgactggctgcctctgagagtgcaagtagccatgcaaagttgggaaaaccagacggcggccggagccgtgaaccaggggcaaatggaggatggtgttggggtagtcactagcctgccggaatggaagaagaggggcgtttgggggcggtaaggcctaaaggacactggaggggcctcgggatttggggcaggatcacaggcctagtccacttaaaggtggctccgtgccaggccttcccagaatcaggttgaaaagaactttagggttagacaggttggagatgagaaattggaccatgcaggaagtactgtcggaggcgtgttcctgactttactaccctgagccgcccacggctggggcagtccccgaggttccaccttaaggggcgggccggggcggggctccgctgccccttcccagaggccgcgcctgctgctgagcagatgcagtagccgaaactgcgcggaggcacagaggccggggagagcgttctgggtccgagggtccaggtaggggttgagccaccatctgaccgcaagctgcgtcgtgtcgccggttctgcaggcaccatgagccaggacaccgaggtggatatgaaggaggtggagctgaatgagttagagcccgagaagcagccgatgaacgcggcgtctggggcggccatgtccctggcgggagccgagaagaatggtctggtgaagatcaaggtggcggaagacgaggcggaggcggcagccgcggctaagttcacgggcctgtccaaggaggagctgctgaaggtggcaggcagccccggctgggtacgcacccgctgggcactgctgctgctcttctggctcggctggctcggcatgcttgctggtgccgtggtcataatcgtgcgagcgccgcgttgtcgcgagctaccggcgcagaagtggtggcacacgggcgccctctaccgcatcggcgaccttcaggccttccagggccacggcgcgggcaacctggcgggtgagtgcagcgcgcccccgtcccgggtacctccggttgaatctggtggcttgcaccgaccccctcccctgtccccagacggatctagatggttcttccctccatcccgtaccgacgactgttcccccttcccccaccccctccccggcacattgtccttccctcctttctttgaagaaagccgacccgcccctcactccgtcacgagggtgggtgactcagcgtcctccttccccgcggcgccagaagccagttgcaaccggtttctgaagtaatgtgcaggactccttacatcagctcctctgagtctcgtgattcagccttgcctccctctctccccctttgccccctccccgtcccacccttaggcgctgggagaagggagggtggggaggtcaggggcctctcagaggggcctcacttgttaacccagcccccatttcaggtctgaaggggcgtctcgattacctgagctctctgaaggtgaagggccttgtgctgggtccaattcacaagaacc

SEQ ID NO: 5285 - DNA, 6000 bp, Homo sapiens
aggagtttgagaccagcctggccaatatgattaaaccccgtctctactaaaaatacaaaaattggccaggcgtggtggcgcacgcctgtggtcccagctactcaggaggctgaggcagaagaatctcttgaatcctggaggtggaggttgcagtgagctaagattgcaccactgcactccagcctggagacagagggagactccatctcaaaaaaataaatatataaatacgtaaataaataaatttaaaatttgaaatgtttttaaatttaaaatttttgacacattttattcagatagtagtctgatcacatatggtctaagaacagtcaaatcataaatcaaatataaatcaaatgttaaagatggatcttcaaacattgtagccagtgatgccacactcacctatgatctctgtgacataaaaccacatccacaccccagtgacctctgaaacattcaacacagcttccttgactgtgagctgtttgaagctaccagtttgagcgctattgacttttttttccaggccctgaataactctagggatctcagcagggtttggaggaaccaactccacctcggcgtagtactgaaatgtggccaatcaaggcttcaactgagtcacagcagcgttcaccagtaccagggccttctctggcgaggtggtggacaaatcaggtcatggttctaggatggaaagtctgtcgccccgaagggcccgctgaatgccaacacctcccggcagttttactctctgtgtgtgttttgttttcagttgttcaggcgggaaagcctgcaatcgtctttaactcccctctttcataaccccaacccatccgaaagcctgttggctgtacctttcaaatatgtcccaaatctgatcacttctcactacttccactgctgctgcctggccccaagccactggcatctctcccttgaattgttgtaaaagcctccttgctagtgccccgggtctgcttctgtcatgccctttcactctgttctcagcccagcagccagttagatcatgttactccggcggcaactcatcccactcccagggaaaaccacaacggtagcccaccaggcctggttcccgtcgccacacacctacctcctcactcactctgctccaggctcattggccccttgctcttcaaacaggccaggtatgctcctctggctgggttcctcttcccctagatgtctgcagagctcatgccttcacctccttcaagtcttttttttttcttagcctcccaaagtgctgcgattacaggtgtgagtcaccacgcccggtctccttcaagattttactcaagtgtcaccttctcagtgagggctcatgaaccccctcagtactgtagcttgtcttccaccctctcacccctgtaatcctggcttaactggctctgtttttttctgatatcacttaatactgactcttttgtttgttgtatgtcttcctcaaaatgaaaagtaagctccccaagggcagagttgttttttttttgttttgttttgttttgttttgagacagagtttctctcttgttgcccaagctggagtgcagtggcgtggtgatctcggctcactgcaacctctgcctcctggtttcaagcgattctcccgactccacctcccaagtagctgggattacagacgcccaccaccgtgcctggctaattttttgtgtgctttttttagtagagacggggttccaccatgttggccaggctggtctcgaactcctgacctcacatgatcccctcaccttggtctcccaaagtgctgggattacaggcatgagccaccgcgcctggcaggcagagatctttatcttgttcactgatctacctaaaagcctaaaacaatgccttgcacatagtaggtgctcagtagggatttgctgaatgaataaatgaatttgcagatttagagagggggtaaatgtgtggcaataattcatctttgaggagaactaggagggttcatggatttgagtaggtgagatttgaactggatcttgaagtggttctggaagctgaggtggatgatgggcaatcatctatcagcttgaccaaaggcatggaagtgagagagactggcagcggggtaggagttagggagaagtgtgatcagtgatagttggagaggttattgtaaggcaatgtgaggccagattgagcaaagttttaaatgcaggctaaaggcttttcctacagccaggaccagctacataatttgtggggcacagtgcaaaatggaaatgcatggcccccttggtcaaaaatttcaagataatgggccgggcgtggtggctcacgcctgtaatcccagcactttgggaggccgaggcaggtggatcacttgaggttgggagttctagaccaaactggccaacatggtgaaaccctgtctttactaaaaacacaaaaaattagccgggtgtggtggtgggcacctataatcccagctattcaggaggctgaggcatgagaatcacttgaacctgggaggtggaggttgcagtgagctgagatcgcaccactgcactccagcctgggagatagagcgagattcagtcttaaaaaaaaaaatttcaagatggtgacagcagagcattaatccaagctcagggtccacctgagcacagggctctgtgtgactgcatggggtcgtgggcccaagaagccagccctgcctataaccagtgagggagctggtgatagctttctagcagagcagagatgttattggagctggactttgggaagattattctgacatgtctggtgcagtaggttggagggagtctaggcggggagacaagctcagcagccttgtgcaaagctagcaaggaagagaaaggataggtagggtaggggttggggatgaaggtcaaagggcaggggtgaggcaggggttagagctagagtgagaagcttggagaagatggagtctatttagacgagagtgtggaccagggagagactgctggaacaccaaccaccaactgcttcctctctcttttccctgctttccagaccctggcattagaggtgataccaggcacaggaatcagcaacgtgtctccctttggccaccagagggcagatgattctcaaggatcgaatttgggttggggagtgaggtgttctctgtcctcctcttctctctttccctcaccttcatgggtgtgccttcaccttcttcctcaacggttgggtgcctgaatagagctggtatggggcatggggagcagtgctgaagtcccaggatttactaagagtgtagtgatacctgttgccttaggaagtactttcataccctggtaattacatctgctcagatgcctatttctctgattgatgggatgaaggctggctcaagatgctgtagctgggagttggaggtcaagtagcaggggtccaatcagcagttttcccaataactcctggagcctctctgctcctgtacctttgggaacctgttgcctgagtctggtttctgactcctgcggggcctctgcctcctgcccaccttaagccactgatgggagggtgtggttccaacgtgttccaggtactatgggtgaggacagcttggcgctggggaaatcagcccaggatactccctgtccttggtaacgcagtgtaaggggaagtgaggaatggactgcagttgccatacagacttcctgttagtcaagggctctccaaagctgagaaggacctccgagttcatgaatccaatggcttcactttactgatggggaaaatgaggcccagaggaggaaagaaaagaaactttaaatgccttatcttgcagaggcattttaaaaggtaactggaattcagaaatgtcattttgaatgtcaacgcaggagcaaaggcaaaggaaagaggagcctaaactcagtgatgttatgtgatttttccaagatcacgcagcattggcacttggcagagctggggctgaaatgcagggccctggacgctcccgcatccggtgcagaggacgctgccctgggcctgcctggggccttgccgagccctgcggactagatgcgggaatgcacggatgaatccacagaagccaagatagacggtggcagacaggcaatagactgatgctgcatttgacaggtatattgataggctagatgataaaaagaagatgaattttatgagctgaccgacagatggacagaaatgcagacaggaagctgctatagaaccagaggatgccaatcacagggacggctaacaatcttgttttgtatttagtcaaatcacaagcacagacaggtgacccacgcttcctgttcaaggtttgaaaatgcccgaaaactgacggaaagacacgaagcgaatcagactccgagagccacccggggaaacgaccgggtgctcggagggcctcgggtgttgccggaaatggccgacgaccgccctcggcagggctgtgggagggggcgtggccggctcagcacgcggagcagcttcgggtatttccggaaactgccgaaagcccccttgaagtgggcggggaaaggccggtgggcgtggctggatggccgtggacgggggcggggggtaggcacccggggtcgcttcgtggatttccgtaaacagagccgaagcttcgtcttcggaatcgaggaggagagcgcgtccccggggtttaccttcttcggctgtttccggaattcacccgtagtctgtggccgggaggagaaggcgcgccccacctcccgtttctagccgcttcggatgtttccggctgctgccggcgaaaagagccgagggccggcggtggtggcggccatgttgggagcagcaggtccggcggcggctgcctgtgtgccgggcgcggagcagtgccgctgagggcaggggaggagcgaggcaggcggccggctgcggcggcagagagtaggcggagcggcgcggcccggccgaaaggcggcacagcccagccgggggtcgggggggtgcggtccggagccgctcggagccggcgcggcctagcccgagcggcgcatccccgggctggcgtgagcggctgcccggcctccccgcacccccggccggggcccatgcggcgggtgctcctgctgtgagaagccccgcccggccgggctccgcgccttcccttccctcccttcctccaagcttctcggttccctcccccgagataccggcgccatgtccagcgctcggacccccctacccacgctgaacgagagggacacggagcaggtaaggagccccgagggctccccgaattctctggctgggccctttgcaccttgcggagcctcctccctcttctgctctcctcgtgcccctgctgccatcctgcaagcctcggctgccctgtcatccggctcctggctccggctccgcacatcccgcttccgagtcctgacctgggacccacctcgtcctgactccaagctgcacacttgtctttctgccaacccccgtctcccctcaccgccctcctgcgctcttccgtgtcacctccccagcttccctttctcttccctttttctctcaggggcctttctggtcttcctccacccacgcttaaagcagccaccctcccgctcctcgaatagcagcaccccgcgatttgccacagatcgttgtccacctctcccttcgtctctcctgcctcgcttcccctccgcccgcaccggttctgccagtctctgggttatcaccctcagggtccttgccctggactgcgctctcgatccctggccccttgcagttcccccagctttttctaccctgcttcttcgttttccaaattgtgctctccctcttgcttgcaacccaccagctccaccctcatcacctttccaaatccttcgcctactctttgctcatcactttcccttctttgctccaggagctccctggatcctggcgctggcatttgtcgcttccgtgtttccccacagctgtcatgcgcatagttttc

SEQ ID NO: 5286 - DNA, 6000 bp, Homo sapiens
gatggcacccacccaggttaagggtgggtctccctttcccagcccagactcaaatgttaatctcctttggcagcaccctcacagactcacccaggatcaatacttcgtatccttcaatccaatcaaattgacactcagtattaaccatcatagtatgcatctaattagaaatggtttctcacctgttgatctgtcttgtcaatttagttcatagtccagccaaagaacctagaggtgtggagggaagccgttttcctcttgcctacacctgactgtgctctaattggggagttattcctttgtttcccagtgccagacaagcccaggagggcagcagggaggtccttgccccttccttctcccagtggcagccagctggggcctgggcctcttaaccctgtgcccctagggatcgggaagggagtttagaagcatctgtcctgggctgtttgctagggctcagtgcagggcaagaacagggacctggtggttgtgggtggggttgggctgagattgctaagaatggggccgggcacggtggctcacgcccgtaatcacagcactttgggaggccgaggcaggtggatcacttgaggtcaggagttttgagaccagcctggccaacatggcgaaaccctgtctctactaaaaatacaaaaattatccaggcgtggtggcgtgcgcctgtaatcccagctactggggaggctgaggcaggagaatcacttgaacccaggaggcagagtttgcagtgagctgagatggtaccacggctcaccagcctgggctacagagcgagactctgtctaaaaaaaaaagtgctcgctttggcagcacatgtactaaaattggaacgatacagagaagattagcatggcccttgtgcaaggatgacacgcaaattcgtgaagcgttccatatttttgaagggattacaaaccaagagatacaagtggcttctagaaattagaaaataaaaggtaatggattctgccctggagccgtgacaagaaatactggccttctgacatcttgattttatatttctgatctttagaactgtaagaaaatgaatttgtgttgttgtaagccaaaagcaaacaaacaaaaaactagaatggggtggggaaggtgagggagcgatgaagagggatgagcttggggcctgggaacacatccctccagaggaagctcagacacagctccccttctagggcaccgcgagttcattgcaaccttgctgtgacaccacccccccgccccaccaccatggaagagaaaccatgggctgaggtttctcttccaaagctcctgtttctcaatctcttgccatcccatcgccaccccctgccacagcctttgatgttattaacctcaatgtcaaaactggaacttctgggaagtccacctctgcagcagcatgtgtggtggctaaaagcatggcttttggaggcaacagaactgccctgtaatcctggcaaggcagccttgtagcttcatgatcttgatcaagtcacctgactcttcaggcctatttcctcatttgtaaaaaattcgaaatagggcaggcgcagtggctcccgcctgtaatcccagcattttgagaggccacagtgggaggattgcttgagcccaggagttcaagactagcctgggcaacatagtgggaccctgcctctacaaaaaataaaaagccaggtatggtggtgtgtgcctgtagtccccaactactcgggaaactgaagcaagaggatcacttgagcctgggaggtcgaggctgcagtgaggtgtggtcgtgacacttcactccagcctaggcgacagagcaagacactgtctcaaaataaaataattgaaataataatagcatctatttcatgacattattgtaaacctggaatgagattgtaccattaagacctggcccaggggctggtcccacaccccctttctcatgtgccttctacctagttcaatactgttcagcctcctgcagtttataaacattctgagtgtctggttggaaacagtggtgaaccaacacaggctctgccctcaggtggcccctagtcttgatggagacccaccatgtggggcagggctgacacaggtgttgctgggcacagaggagacacaggcttggggtgaccagcgaaggcatcctgagtagtgccaccccacatatcttcctagcacatcatggttttattttcaccgtgacacttacacaatagtttctaattaagtgcctgtttattgtctgttttttccctccagaagtcagctttgtgacaagaaactctatccacctcgttcatactggtgtctacaatagttcctaacacacagtagaggctaataaatattcactgaataaagtaagtggtatcattaactggaagccaggaagcaggagttagcatggtgaaaaaggcagcctgcataggagctgaaaaaatgaacataaaatgcagaagcaacgccgggcacagtggctcatgcctgtaatcccagcactttgggaggctgaggcgggcagatgacatgaggccaggagttcaagaccagcctggccaacatggcgaaaccctgtcgctattaaaaatgcaaaaattagccgggtgtggtggcatacacctgtaatcccagctgcttgggaggctgaggcaggagaatcgcttgagccagggaggtggaggttgcagtgagctgatattgcaccactgcactccagcctgggtgatgcatgtctcaaaaacaaaacccaaagtgcagaggcaaggccaggtgccctgacaaatgcctgtaatcccagcactttgggaggctgatctgggtggatcgcttcagctcacgagtttgagactagcctgactaacatagcaagacccccctccagctctacaaacactacaaaaattaggctgggcgctgtggctcatgcctgtaatcccagcaccttgggaggccaaggtgggtggatcgcctgaagtcaggagttcgagaccagcctggccaacatggtgaaaccttgtctctactaaaaatacaaaaaatagccgggcatggtggcagatgcctgtaatcccagctactcaggaggctgaggcaggagaattgcttgaacccgggaggcggaggttgcagagagccaagatagtgccactgcactccagcctgggcaacagcgcaagactctatttcaaaaaaaaaaaaaaaaaaaaaaagccaggcatggtggtgggcacctgtaatcccagctacttgggaggctgaggtgggaggttggcttgagtctgggaggtggaggttgcaaggctgcagtgagccgagatcacaccacactccactccagcctgggcttagagctagaccttgtctcaacatcaataacaaaatgcagagtgcattttgaatgcaacaaaaggcttgttggtggaaatcagagagcagggtcgaaggtgtggaatattgaagagttttgagagttgaggctggacagtgacatccgggaattgggattttgactaggaagcaatggggagccactgaaagtatatgacttggtcagatttaggtttaaaaaaccaagaaggaagggatgggggagggagagagagtgatagggtaggaaggaagggaagttggctgctccagcatggtaactggaattgaagagtgtaatagtaattgagggaggtttggttactaggtcagtgtcaggaattctcaacaaaaacgacggaggcctggtggagaggaggggactctcaatagagagatttttttttttttttttttttgagacggagtcttgctgtgtcgcccaggctggagtgcagtggcgtgatctcagctcactgcaacctctgcctaccgggttcaagcagttctcctgcctcagcctccctagtagctgagattacaggcatctaccaccatgcctggctattttttgtattcttagtcgagatggagtctcaccatgttggccaggctgctttcgaactttttttattgttgttttttatttttgagatggagtttcgctcttgtggcccagtctggactgcaatggctcaatctcggctcactgcaacttccgtctcctgggttcagcaattctcctgactcagcctcccgagtagctggaattacaggcgcccaccaccatgcccagctaatttttgtatttttagtagagacggggtttcaccatgttggccagtctggtctcgaactgttgacctcaggtgatccacccgcctcggcctcccaaaatgttgggattacaagcgtgagccactgcgcccggccaatttttgtatttttcgtagagatggggtttcaccatgctggcaagactggtctcaaactcctgacctcagatgatctaccggccccggcctcccaaagtgttgggattacatgcgtgagccactgcgcccggccaatttttgtatttttcgtagagatggggtttcaccatgctggcaagactggtgtcaaactcctgacctcagatgatctacccgccccggcctcccaaagtgctgggattagaggcgtgagccaacgcgcccagcccgtacttttttttttttagtacagacggcctcccaaaagttctgagattacgggcgtgagccaccacgcccagcctgaatagagagagatttaacagtatgaatgaagggaggagtcaagaacagtttaggcttctcgcgtacatgattgggtggccccagatgtcattcacaagtataagccttggaggcggaacataactcgaagaagagcccttttgtgctccgcccatagcgtaggaaggtgtcaattggctgtttcgaggaacgcgccaaaaactgccaagggctgtgggaggtgtgttcttgcgtcatttccgagagacttccgcgccgcagtttccctgcttccccagctccagaacttccggccagcgcagccattttggcttcctgaccttgggctacggctgaccgttttttgtggtgtactccgtgccatcatgtccgtcctgacgccgctgctgctgcggggcttgacaggctcggcccggcggctcccagtgccgcgcgccaagatccattcgttgccgccggaggggaagcttgggatcatggtgaggaacgggcctggaagagcgcgggaggcgccgtgggctgaccccttctgcctagctgacctcaggtggtcctgagaatgcctcgcgccccgcagcgtagcggggagcagcagtgccggtttgggcatgtctggagggcgcgaacgacggggacagtgcccgggcgacagtcggggctgtcggcgttaggtctttccccacagccccaggatctcgggtctggtcctgtcaggccctccctctcctgtcgcctcctcgctgcgccgcctcctgccgacttctttagccgctctgagcccattttctcgttggttcactgggggatgcctgacgctgtcagcgacgaaaatggttgttactgctatttattttattttattttattttacttatttattttgagacgggttctcgctctgtcgccaggctggagtgcagtggcgcgatctcggctcactgcagcctccgactcccgggttcaagcgattctcctgcctcagcctcccgaatagctgggactacaggcgcgtgccaccatgcccaactaaattttgtatttttagtagagacggggtttcaccatgttggccaggatggtctcgatctcttgacctcgtgatccgcctgcctcaacctcccaaagtgctgggattacaggcgtgagccactgcgcccggcctgggagggggttttcaggcaaggaaggataggtatcgttttggagttactggcccatgcaaggatcctgggtcttaacatacaggctttgctttttttgtttgttgtttgtttttttgagacggagtcttgctctgtcacccaggctggagtgcagtggtgcgatctcggcttac

SEQ ID NO: 5287 - DNA, 6000 bp, Homo sapiens
gcctccctcctccagagaagttcatggttaagacctgtggggggcagtgacgaggggggactgctttaaggccccttccacgtccccatccctcccagaaagtcacaaagcctcaggaagtgagcgctgggtgggagtatacggctcattaagttcaccacccccaagtccctgctgcagagagggaaactaaggcccagcaggccagacttgcccaaggtcacacggtcagccaggagcgcagggaggccgagccccgcaccccagatcgctggtgcgccccgcagggtggtccgggaggcagggccgacgtgccgacggaccgggcggaagcgtcggggcggcggggacaaacctccaggatcctcgaccgcggcggacccgccaatgaaaagccgcgtggaaagggggcgggcacttccgcttcggggaaggggcggagcctgagggacccggcggctggtgagcgcccgctggaggctggagcttccgggccctggaaaggggtccccgcgcgccccgggtcggaggcagacccctgggtttgggggacatgggcatttggggcgcctgaacccaagacctctggatggtagggatgcccgggcgtcctggataccctgcgggactcggggctcctgcggggaagatggcacgttttactgcccaaggagtggtcaggggggtggagaagcgctgcggataccctcaggaggtctgcgacagagggggctagctgcgcagcccaggagtggtagtggcccccctggatgacaggcctggccgtatcctcccccagagctgccccgttcagaccatggatcctgaggtgaccttgctgctgcagtgccctggcgggggcctgccccaggagcagatacaggccgagctgagccccgcccatgaccgtcgcccactgccaggtggggacgaggccatcactgccatctgggagacccggctaaaggcccaaccctggctcttcgacgcccccaagttccgcctgcactcagccaccctggcgcctattggctctcgggggccacagctgctcctgcgcctgggccttacttcctaccgagacttcctgggcaccaactggtccagctcagctgcctggctgcgacagcagggtgccaccgactggggtgacacgcaggcctatctggcggacccactgggggtgggcgctgcactagccacagccgatgacttccttgtcttcctgcgccgctcccggcaggtggctgaggcccctgggctggtggacgtacctggtgggcaccctgagcctcaggtgagattccaggctgggcacaaagacccagacagctcaagggagctgcagctctccaccctcccaatcctcccagctttggtttcctcattccttaaagggaaaattggcctggtatttctctggaagtttgctcagggcagtccacctgcctccccactgacccctgccccagtcctgtgagaaactagaaaacacgggaggaaagattgggcacaggaagaagatgccctactccacccctgccccctgtgtatctcctttgaagctggacctctggttgtctgtcagggaaaggacaccagactcaggatcactaactctcttacactgtgccacatcagaccctcaaggccagcaggtataggcttgctggtcctgagatggggcagggggaagaggtggggagcaggggctgagcctgacctctcacaggccctgtgccctggtggcagcccccagcaccaggacctcgctgggcagctggtggtacatgaactcttttccagtgtccttcaggagatctgtgatgaggtgagtgaggttgacctggacagggtggtagacatgaagggagggggtaggacttgccagaattctacaggtctgggctggcaggaggcctgcaggcatctggccagcaatgagggaagaagttggctttgcagctatacatacttggagtggaattctagccctcagtaccctctgccttggattcttcttcttttcttttttctttctttttttttttttagacagagtctcgctctgttgcccaggctggaatgcagtggcacgatctctgctcactgcaagctccacctcccgggttcacgccattctcctacctcagcctcctgagtagctgggactacaggcatccgccaccatgcctggctaattttttttgtatttttagtagagatggggtttcaccttgttagccaggatggtcttgatctcctgacctcgtgatctgcctgcctcagcctccaaaagtgctgggattacaggtgtgagccactgcaccaggccggattcttcttcttttttttttttttctttttgagacagagtcttgctctgttgcccaggctagtgcagtggtggcatatcggctcactgcaaccttcgcctcctgggttcaagtgattctcatgccttgccccgccaaggattcttcttttcaatggaaacaatgataaatatcttgcctactccccaagtctgttgaaaaaggagtaagtggccgggcgccgtggctcatgcctgtaatcccagcactttgggaggctgaggtgggcagatcacaaggtcaggagatcaagaccatcctggctaacacggtgaaaccctgactttactaaaaataccaaaagttagccgggcgtggtggcgggcacctgtagtcccagctactcaggaggctgaggcaggagaatggcgtgaacccgggaggcggaggttgcagtgagccgaaatcgcgccactgcacttcagcctgggcgacaaagcgagactccgtctcaaaaaaaagaaaaaggagtaagtgtggcagggtgtggtggctcacacctgtaatcccagcactttgggaggccaaggccagcggatcacctgaggtcaggagttcgagaccagcctggccaacatggagaaaccccatctctactaaaaatacaaaaaattagccaggcgttgtggcgtgcacctgtaatcccagctactcaggaggctgaggcaggagaatcactttaacctgggaggcagaggttgcagtgagctgagatcgtgccactgtactccagcctgggcgacagagcgagactccatctcaaaaaaagaaaaaaagaaaaaggagtaagtgggagtcccagtcactaaattgacttctcttgggtgaccttgggcaacgtgttcaatctctctggttttggtgtacctgtaaaacaaacatgcccatcatctgacattctgtaatgctgggtccttgatctacaagctataaaatgctgtacacaggtaacaggcggtttttcattgagacgggcagggatgtgggcagtggcattgataggtgggacctccccccaccccaccctccaccgcaggtgaacctgccgctgctcaccctgagccagcccctgctgttgggcatcgcccgaaatgagaccagtgctggccgagccagtgccgagttctatgtccagtgagtaggctcgggtacatgatcctgggtcttgggaaggtgggtggtgaggagtgggctgaggcagctgtggctccacaggtaccccgcaggggctggtcacccactaagccacccttgtgttcttgtccaggtgcagcctgacttctgagcaggtgaggaagcactacctgagtgggggacccgaggcccacgagtctacaggaatcttctttgtggagacacaggtgcagagtgacaaaccatcttgcttggaggccagggctggggcctgcagaggcctggcaatgcatatcttgtaggggaggtgttggctgggtcacaattccctccagagtcacaagatttgccctcagtgcaagggaaaggtccagggacatgttcagccccttaacatgcctccctaaggacagtgcagaggtctctgaggctcaggaattctgggcacagccctggcaggagaagtggcaagcttgaatgcctgggtctcgttgtctccccacagaacgtgcagagattgctcgagacggagatgtgggctgaactctgcccctcggccaaaggcgccatcatcctctacaaccgggttcagggaagtcccactggagcggccctagggtccccagccctactcccgccgctctgaaaataataaacgactttattcttggattccgttggcatctgctatttctgtaacagagaggagcaatgggccctgagtgtgtaaggcaggacaagtgacttgggaaaaaaaaaaaaaaaaacccgcccagcctgtgtccccctctgcaagcaggggataagaactgtgcctccctttctttgctggctccagagaggctccggggcggaagcagctccgtaagatatacctcgctgcagaggggagcaacagcggaacggagacacggtggccgggccgaaaacgtcacaaagccgcagagagcgggctctgtcccgcccgctccccaggtgggcgcccgcgcctgtccagcgagtccgcaggctgggggaccggaggcaccaaaggccaatagacatgtaggggcggggtctccaccgatttttttttttttcctgacaggtggacgtggtcttggcatccacgccaatgagaatgtgagggcggggcctgaatagacgcaggaaatggcgacggccgcgggtctgtgagcagcgggggcggggcctggttgtggcccctccttctcccgtccccaagttccctgggtgggaacggggtcttggggtccctggctgggtggccagaccccgaagccagcgctgggaagggctgcggatgcccgggtcagaggaaggggcaggtccaaggacacgcgggtctggtcctgggcaagaaccgccccctctccgggcctgcttcagtcttcctttgcagaacaacgggccaggccccttccctctgcccccgggtgcttgaagtctagccccatcctggtccaatgcgctcttggtagcctcctttcccagctgcccgcccgccgccatgccgcccttactgcccctgcgcctgtgccggctgtggccccgcaaccctccctcccggctcctcggagcggccgccgggcagcggtgagttgggcgcggggggccggcccggttgttcaatgggtttctgtttgccctacgtgctgagttagttgtggtctctactccgtgtcaggaggctcccaggtttgtctcaggtaaccctcgccttccctgctgaggatcagagatagagaagacccccaaggtcatacaccgatttaagcggcagaggaggaagtttgagtccaggtcaaacccaacgctcttaccacagctctagtggtttccaagcatcgctgtatcactgtgcataaccctctgtggggggtgggagatggggaggtgtcgggtacaaaatccagattcctgggctctgctctggagattctgaactggaggaatcaattgggtgggggtcaggaatcagtttctttctctttttccttttttttttttttttttgagatggagtttcgctcgttgcccaggctggagtgcaatggagcaatctcggctcaccacaacctccgcctcccgggttcaagcgattctcctgcctcagcctcccgagtagctgggattacgggcatgcaccaccacgcccggctaattttgtatttttaggagagacagggtttctccatgttagtcaggctggtcttgaactcccgacctcaggtgatccgccctcctcggcctcccaaaatgctggattacaggcgtgagccaccgcgcctgtccaggaatcagttttttccaacaagtttttggactccactttgagaaatcctgacctgcactatgcctgaaacactccaaagggggtgctgatctggagacagatctgtcctgggacctgtttcagccctgtcagctcctggtggctgagttgaagggtgtggcccagaaggcagggcagagctagcttctgggttcc

SEQ ID NO: 5288 - DNA, 6000 bp, Homo sapiens; identical to SEQ ID NO: 1666

SEQ ID NO: 5289 - DNA, 6000 bp, Homo sapiens
tatacatgtaatatatgaatatgggctgggtgcggtggctcacacctgtaatcccagcactttgggaggctgaggcaggcaaatgacctgaggacgggagtttgagaccagtctgaacaacatggagaaaccctgtctctactaaaaatataaaattaagctgggcgcagtggctcacgcttgtaatcccagcactttgggaggctgaggcgggcggatcacgaggttgggagttcaagaccagcctgaccaacatggtgaaaccccgtctctactaaaatacaaaaattagctgggtatggtggtgcatgcctgtaatcccagctacttgggaggctgaggcaggagaatcacttgaacccaggaggcagaggttacactgagccaagatcgagccactgcactccagcctgggcgacagaccaagactgtgtctcaaaaaaaaacaagaacaaaaacaaaattagccgggcatggaggcgcatgcctgtaatcccagctactcgggaggctgaggcaggagaatcgcttgaacctaggaggtggaggttgcggtgagccgagattgtgccattgcactgcagcctgggcaacaagatcaaaactccatctcaagaaaaaaaaaaaaaaaaaaatatatatatatatatatacacacacatatatgtatgtatgtatatatgaatatgttcttgtaaaatatttgcataatacacaagcatgcagaggaaaatgtaacagtctccctgctgcatccccaccactgaagtacccccttccccagtttggtgacttggcatcttttaggtcccttctttatgtaacggtaacttcatacatctagatgtacatatacatgcataagtttaaagcatttttaaaaatcatatgttttgtcaaagtgtacttttcaaaaagttaaaacctacgtctaaatatagaatgaacacgtaacaaagatttattaggccgggtgcggtggctcatgcctgtaatcccagcactttgggaggctgagctcccaaagtgagcctgagaggatcacttgagctcaggagtttgagaccagcctgggcaacatagtgaaacctcctcactactaaaaattaaaaaaaaataaaattagctggttgtggtggcccttgcctgtagtaccccctacttgggaggctgaggcgggagggtcatttgagcccaggaattcgagccctgcttgcatctttgcagtccggcctgggggcatagtgagaccttgtctcaaaaaaaaaaaaaaaaaaaaaaagatctttaactcatcagtgaggggatttccgcttggtaaggtggtaatgcacatgaggaactggacaggacgagcatttaaagaggaacgttaggccaggtgcagtggctcatgcctgtaatcctagcactttgggaggccgaggtgggcggatcacctgaggtcaggagttcgagaccagcctggctaacatagtgaaaccctgtctctactaaaaatacaaaaaaactagctgggcatggtggtgtgcacctgtaatctcagctactcgggaggctgaggcaggagaatcacttgaacctaggaggcagaggttgcagtgagctgagatcgcgccattgtacttcagcctgggtgacagagcaagtctcaaataaaataaaatacaataaagaagaatgttagcatatgattactaggttagatgcaaaatgcaatggatgtcctacatgacaaaaattataccctttgaggttagtttttctactggatatacatgtctttcatctctcctggacaatatctccttgtaatttcagtctatttaccttactagtgaatagcaaaatcaaacaactgtgtattcttgtgggtaaataatccttgggagggcttctgaaacgatgccccagtgtgacaatgagaggacacactacactcttggacttccaatttttggatttttcctttttttttttttttttttttttgagacggagttttgctcttgttgcccaggctggagtgcaatgccacaatctcagctcaccgcaacctcggcctcccgggttcaagcaattctcctgccttagcctcccgagtagctgggattacaggcatgcgccaccaagcccagctaatcttgtatttttagtagagacgggggtttctccatgttggtcaggctggtctcgaactcccgacctcaggtgatccacccaccttggcctcccaaagtgctgggattacaggcgtgagtcactgcgcccagcctaattttgtatttttagtagagactgggtttctccatgttggtcaggctggtcttggactcccaacctcaggtgatatgcccaccttggcctcccaaattgctgagattataggcgtaagccaccacgccctgcctggatgatttgtcttaacactattctccaacttttaaaaatgtttatagacttcttggagtagacctcaatctataccctttttcattttcttaagattatagcttcataggctgaaatcaagtattttaaatggtttctagacatcccattgattcagaggtcagcaaacttttcccgtaaaatagtaaatattttaggtttggaggaccatgcagtctctgtggtagctactcaactctgctctgtgttttttttgttgttgtttgtttggggtttttttttgtttgtttttgagatggagttttgctcttgtcacccaggctggagtgcaatggcatgatcttgactcactgcaacctctgcctcctgggttcaagcgattctcctgcctcagcctcccaagtagctgggactacaggcgcccgccaccaggcccggctaagtttttgtatttttagtagagatggggtttcaccatgttagccaggctggtctcgaactcctgacctcgggtaatctgcctgctttggcctcccaaagtgctgggattacaggcatgagccaccgtgcctagcctcaactaagcagccatagatcatatgttaaaaaatgggcgtgactgtgttccaataagagttacggaaaatgggatatgaattgcatatgattttcaggtgtcatgaaatgttatttttttcccaaccatttacaaatgagaaaaccattctagctcacagaccatatgaaaacaggtggtgagctgtgtttggcctgcaggatccctggcaaagaacaagtaaaccagtgagtttttccattccaaccttcctccaacagcccttcataagtaatgtttcaagggccactttgatgaagaaagtctttttctctttttcctccattccaactctgtgtcctaatctgaactccagatcgttccctgtcttcatgagctcttcacctttgtgcacagctgcacttttgtccaagtcagaaccctgggagagcagctcaggaggctgaggtgggaggggaggtcaaggttggagtgagccaaagatagcaccactgcactccagcctggatgaagagcaaaacccagtctcaaaaaaaaaggaaaagagaaccctgagagttatcctccacatttccacctaacccttcactcagcacattccatcagtcacttaagctctgctgagtctgtcctttttttttcaataatagggggcgggtctcactacgttgtccaggccagtattgacctcctgggctcaatcaattctcccacctctgccttccaaagtgctgggattacaggcgtgagccactgtgcccggccttaggggttcttaaatgtgagtgtgtatcagaactacttgggaactttctaaaaagaagctagatctgagagaatcccagagtctttttttttttttcttgctttgttgcccaggctggagtgcagtggcaccatcgcagctcaagcagttcccccacctcagcctcccgagtagctgggaccacaggcgtgcgccatcatcctggctaatttttgttttgttttttttgagacagagtctcgctctgtcatccaggctggagtgcagtggcgagatctaggctcactgcaacctctgcctaccgggttcaagcgattcttctgcctcagtctccgagtagctgggactacaggcgcgcgctaccacacccggctaatttttgtatttttagtagagacgggtgtttcaccatattggccaggctggtctccaactcctgaccttgtgatccgcgcccccacccccccggcctccctaagtgctgggattacaggcgtgtgccaccgcgcctggcctgtattttttttttatagagacggagtttcgccattttgcccaggctggtctcgaactcctgggctcaagcgatccacccgcctcgacctccccagtgctgggattacgggagtgcccggcgcagctcagcgcagagacttacaatgcgccacagatagtcctgaaggcaattctgatgcacgtcagaggaccaggccctaagaagaactgcgctagaggcgtggtacagaatagtgtacatgcatttaatcctcgtagcccccctgtgaagtatgtaccccaattttaggaatgggataaactgagccactgccagtggcaggatcccaggaacactctactctggcctcacgtcccgcatccgtccattgcatctgggcacatattccgtgggccccttgcctgcgagagtgcaggttggggagccactacccgtcccccttctgggacagcagcaaccccaggcagttccacaaaatgcttccacccaggaaactgggggaattcagggctctcccggaacctttgcacccggggaagacaggtgcgggggaactctagtctcgaaggacctagggctgcagggggacgtttcacctgaaggactgcctcgtttcaacaacaactttatggctcccggaagtgcctcctccccgtccccttcctttccagcctcacgcccgtgggctgcagttggaacgatggcggcggcagctgccgccgggcctagcccggggtctggacctggggactccccagaagggcccgagggggaggctccggagcgtcggcggaaggcgcacgggatgctgaagctttactacggcctctcggaaggggaggcggcgggacgccccgcggggcccgaccccctggacccgactgatctgaacggggcgcacttcgacccggaagtttacctagacaaggtgtgtgcgcacggggagtgggggggtgcggggaggggggaagggaaccaggcccctgctatattgctcccccagatcatgcctccgactttttgtgaggttcaggagagcaggtgttcataagaggacgaacctcggccagggagtacgagcagctgaggcgtctgaggggatgtgagtaggactggactggcctgaggtgatgcggcatctgaggtcttctgggctgatgtgataggcccggaattgggggcgtggcccaagcgttgacaggcgcggggctgggcttaggccgagccccaggatttcaaatgctgacaaacaccaaacacggttgaacctagtaacccctgagctaggccacttagggccccctgcctgggattcctgacagccggcgggggtttgcggggtgggtggggatcagagatttcttgccctgaaagcctatcagctgcaggcaaggctgggggacatgaatgcctcctgacccgaacactaaccacccaacttcttcagctgcgtagagagtgccctctggcccagttgatggacagtgagacggacatggtgcggcagatccgggctctagacagcgacatgcagaccctggtctatgagaactacaacaagttcatctcagccacaggtgatccccacggggacacaccctccaaagtctcacagcccccattctcccacctgtgttgggaaaaccagcaagggatttagaggggggagactcagattccagtcttgtcctgacattattccattctcacctcctttcctttgagcct

SEQ ID NO: 5290 - DNA, 6000 bp, Homo sapiens
cagaggacagtagagacagcaaagaggagggttgtggcttgatggcatggtcttcctagaagccggggttttgaagagaggagatctaggcatgatttagaagcatgaagggaccaggctcccaggcacctggtgtgtgaaaggaaaaacagcctccctaggcaggattctatcaggaccaaagggaaagggcccttcagagaagacagcccatgttccggaaagcatgtgaaaggctttgggaggtctggaaaggagatgagggtcaacaagaatgtattgcctcatccaggcagtgcgctggacacgcagatgcgcttgggagccagcggtccctgccttggctgcttgtggtctgatggagcagttgaggcacagtggtggcagctggctaagcacctgcggcctgcttcggatctggactaattctgagggccggctctcctgggcaccagggttagggggttacggggagtatgtgagtaacgcctgctttgggaacataaaccccctcccccgcccccatgtgcgctgtgacccacgccctcgcagtcctttctctggaatcatccatgcgcccctggagcaagctggggcgtctgtgaaggggtgggtgagaaggagctgaggttgcgcccgccctgcagtcacctgctctccccttttccccgcccctgccctcctagacaccatccggaagatgaagaacgatttccggaagatggaggatgagatggaccggctggccaccaacatggcagtgatcaccgacttcagcgctcgcatcagcgccacgctgcaggaccgccacgagcgcatcaccaagctggcaggtgggcgctgccgggcagggcctgcagtgggcctttcctggggctctggggctaacgtcaccctccgtcccccaggggtccacgcgctgctgcggaagctgcagttcctctttgagctgccctcgcgcctcaccaagtgcgtggaactgggcgcctatgggcaggcggtgcgctaccagggccgcgcgcaggccgtgctgcagcagtaccaacacctgccctcgttccgcgccatccaggacgactgccaggtcatcacggcccgcctggcccagcagctgcggcagcgctttaggtgtggcccctctgccctgaccccagcgctcccgccagccccgagccccatctgtgcccggctcctgggccctcctggagctgtccccctgccctgtgtgtgctttgctttcctgctcctgccccatccaccggcagccccggccctgcccttcactacctctccctcgtgcagggagggcggctcaggcgccccggagcaggcagagtgcgtggagctgctgctggccctgggcgagcctgcggaggagctgtgcgaggagttcctggcgcacgcccgcggccggctggagaaggagctgagaaacctggaggccgagctggggccctcacctccggctcccgacgtgttagagttcaccgaccatggaggcagtggcttcgtgggcggcctctgccaggtggcggcggcctaccaggagctgtttgcggcccagggcccagcaggtgccgagaagctggcggccttcgcccggcagctgggcagccgctattttgcgctggtggagcggcggctggcgcaggagcagggtggtggtgacaactcactgctggtgcgggcgctggaccgcttccaccggcgcttgcgggctcccggggccctgctggccgctgccgggctcgcagacgctgccacggagatcgtggaacgagtggcccgcgagcgcctgggccaccacctgcagggtctccgggcggccttcctgggctgcctgacagacgtccgccaggcgctggcagcacctcgcgtggctgggaaggagggccctggcctggccgagttgctggccaatgtggccagctccatcctgagccacattaaggcctctctggcagcagtgcaccttttcaccgccaaagaggtgtccttctccaacaagccctacttccgggtacgcctcctcttgggtgttccttgttcaacctgctggttgaccctccaaaaccttttatgccagtgcttgggaaactggggaaaccaggcactctgggtgtggtttcaggttcttatgcacggtctggggggtggggaaggctcagggcatctgcagctgggctgagaagcagggcatggtggggtccccagtgttggctttctctgcccccactcagggaagctgctccggggtacttagaatgtaggatgatgctgtcccttgcagagggggctggggcacttagagccccagcagagggtcattaacagccttacctggaagaggggacctgctgtggacctgggcaccttctcttgcagggtgagttctgcagtcagggtgtccgtgagggcctcatcgtgggcttcgtccactctatgtgccagacggctcagagcttctgcgacagccctggggagaaggggggtgccacaccacctgccctgctcctgctgctctcccgcctctgcctggactacgagacggccaccatctcctacatcctcactctcactgatgaacagtttctggtgcaggtgaagcactagctcctagccgggcagggaatggtgttgctgggaatgcagatggctggacagtgccctcatggccagaccccagaccagctgcctgtgtgtaccccagcctccaccttgcccaatctgtgcccagctcctggttggcagtggcccctgagctgcccccaccatacccactccctctgtcctctgcctccttggctcaggatcagttcccagtgacgcccgtgagcacgctgtgtgcagaggccagggaaacggcgcggcggctgctgacccactacgtgaaggtgcagggcctggtcatatcacagatgctgcgcaagagcgtggagactcgcgactggctcagcactctggagccccggaatgtgcgggccgtcatgaagcgggtggtggaggataccaccgccatcgacgtgcaggtgctgcccaggctggccggggtagccctgacgcaggctgggggtactgtcccttcaagaggggctggggcagcagaggatcactggcagtccctgcctggaggaggggacatgtgtatctgggcttctcacggggccagttctgtagccagggcgtccgtgagggaaccccaggggaacaagtctccaaggatgaagaccaaacgggctggggagtgcctatgtccacggtcttgttccttctcagcccaggattatgacatcttcgcccctattttacctgtggagaagcagaggctcagggttacccaggaagtcagggcagggttggtgctggtgctgaagattagacctcagaccaactcttgtatcctgcctttgccccactccactggttctataaatagcgaccatgtacctactaaatagcgggccccgcggtgattaccctgtgatccttgtgatgcttgagtagctgacttagggcatcctcagcaccgatgggctggtggtttcccctgactcgggcctccttgcagtacctctttttaccaccaggtggggctcctgtacgaagagggtgttcgcaaggcccagagcagcgactccagcaagaggactttctccgtgtacagcagctctcggcagcagggccgctacgcccccagctatacccccaggtctggctggtcaggggagccccagggggaagggacaaaagagggcgagggtgcagggcgggctctgattccttgtcttccccaatccagtgccccgatggacaccaacctcttgagcaatatccagaagctattctctgaacgtattgatgtgttcagccctgtggagttcaacaaggtccgacttccaacgtgactcagacttccagggatcccggggagggttggctggagcagccccacacctgcccaaggagccccaggactctgtgaccaactgggggtgaccctgaccctccagtctctgtctctagggctgtttttaggtagtacagagtgccctgcctccaaatcccacagcccttgtcccagtcttggtgtatgcccagcctgagtctgggtgctgacctgggattactgtttgcccttgtccttatccccacagtagtcttgggtcctccccagggttttctgttcacccatggtccctgccccgcctcactccaagctcagggatgcctctgattgctgggccctacctgtcccctgccctccagatgacggcgctaatattgtatccctcccttcttatctggccccggagactttctgcctcatcccagctacttccatcgtatgtctcccgggcccctgcttggaacttgggtgtcccccacacacacctgcagtccccaagctgcatccctgtgtccctgcctgcaggtgtcggtgctgaccggcatcatcaagatcagcctgaagacgctgctggagtgtgtgcggctgcgcacctttgggcgcttcgggctgcagcaggtgcaagtggactgccactttctgcagctctacctgtggcgttttgtggccgacgaagaactcgtgcacttgctgctggacgaagtggtggcctctgctgccctgcgctgcccagaccctgtgcccatggagcccagtgtggttgaggtcatctgcgagcgcggctaggcgcagccgctgccatgcaccggtctgtccctgcaccccatggcacccaggatctggtctcggtggtccttccccgcaggcaggtgtcaggaccggcctaataaacatgtgtggcctcctcctctcgcttgctgggcgggcctttccgggggcggggttttgaagctgaggcttctgaggcgcccgcgtcgggtccgcccccgagcgccgattggctggtgtgctgggcccagcatgggcagggggcggttccacttaaaaaccctgggacgagagcggtccttgtctgcgttccgtgtccaggcaggtgcaggcgccgcggggccggatcctccgcgcggccgagtccatctcctgggaaatggggcggacagtgtttccttgactgactattgtgagcgccctctctctccggcggagcggagaccatggcccccactcagggcccccgggccccgctggaattcggagggcccctgggtaatggggcagagagatgggacctggggcaaaggctaagcgaaggagagctggagcgggtgaactaagagcgggggcgagatctgaggatggaaggctttgggggtgtcggaggcagagggacccgggggtttgcagcgaagggtgtctggagagggagagctgaggaggggccggttctgggggctgcagaacggggatttatggtgtcgactgggagcaggaggagggtcttcgaggggcctgggggcgggggactaagatggacgcctgggaagggaactgggaggcagcggggtgcctgggggccgagggctgaggacggggtgcggaggcgcactctgggaatgccgagagggtcccgcagagacgtcagggcgcccgtgcgggccggcggggagctggggggctaggggcggacgcccgacgtgatggcccttcccgcaggcgccgcggctctgctactgctgctgcccgccaccatgttccacctgctcctggcggcccgttcgggccccgcgcgcctgctgggtccacccgcgtccctgccggggctggaggtgctgtggagcccacgggcgctgctgctgtggctcgcctggctcggcctgcaggcggcgctctacctactgccggcgcgcaaggtgcgggccccgctcgcggacgctcgggggagggaagcgaatgggctcggcgagggaaaggacgccccgggccttatcagagcccccttggacccgcaggtggccgaggggcaggaattgaaggacaagagtcgcctgcgctatcctattaacggtgcctaggggacgggccctcgcgctgga

SEQ ID NO: 5291 - DNA, 6000 bp, Homo sapiens
cccagacaagttaccagggcccacctgactgccatatatccagtgatcttatttcagcacattgacctctcgtggctttggacactgctctcttctctctccttgaaaagtggaccatcccccgctcctcagtctcctgcagcactcgattctctattgtcagtgtctatttgctggtctgtccagtgctgcctcccatcaccctgtgtttggtgcttccccactgccctggactctcctccttactcttgtgcatggctgcggccactctgtggtttgcttctgccttgtgttctgtgattcctgcatctaacagccgtggctgtggcttccctcctctgtccatgtctacactggcactttgtgtctgtattaatcctgatcttcatgatcttctctagtaaactaaatggtgaggtttgtgttttctagatgaggaaacttgcttggagaggtgttaagtaacttgccaccggtctcacgggaagggcaaagccagttttggagggctcttggcttttgagcacaccctttcccaccctcaagcagcctctgcagaactcagatgtccagcgctggcctcactgtctctccccaaaccagcgcctctatccccatttttaatatttttatttattttaagacatggggtctcactctgtcacccagactgcagtgcagtggtgtgatcatagctcattgtaacctcaacctcctgggcttaagggatcctcctgcttcagtctcctaagtcactgggactatagacacacaccaccatgccccagctgcatccccatctttgtgacacaatccttgtcagcctgaccagaaaactcttccctcccccatccagtcagtctcgagtcccctctattctctccccatcatctttctgaaatctgtcccctcataataatagcagtgatgaggataatagcagctcttgccaattaagcacttgttatgagacaagcctgtgttcattctcttcatgctcacaatcagcccttctaggaggtactgtttatagaaatgaggaaactgaggctcagagtggtcaggtaacatacctggggtcacacagtaaatggctgagccaggccttcagcagcagtggtctgactaaatcctgtgtgcttccctggctcagtgcacgttctcttccctgagttattccagccattcccagttggtctctatcttgctattctgatctgggctctgcctcctgtcaggactagcataggtgtgatcctgttgcttctggcctaagaaacgcccactggctcctggtctaagtccaagacttagccatgctaagacagtctgtgctctggcctctccccaatcccccctctttcctcccctcttccccctctcccctcttgcctttctcctccccactcccccattccccctccctgtcccccctccctgttgagtgtctgcatcccagcaacattccatttcctcccattccccagacacaccatgcccctcccgttcagtgacctggcacatgctggctccccagctggcacctctcctgcacaaggccagttcccacctgcaggcttaggtccactgttgctcccacctcaagcagaggtggtctgggggctccccagcccctgccttctaacctgttttgcccttgtgtgtggcctggtctattcatctactgtcccgtgaatgtgttagggcagggcccaagtatgatttccccctttgtccccagcacttagcacaggacccaacttggaacatggcaagaggtctaagtttgagccagtgtgatatgaccaggcttctggctcctaaggagtataagtggccctagcttgagcactttcctgaaagtcctgtcctttgtgtgtggggtaggggcgcaagtgctgggagagtctgaagccaagtaatgaggctgttggtgccaaaagtaggatgaattttaggctgttcccaggattcctgtctccccacaggccagggccacctctgagaggaccctcgaactcctgtgctccaaggcttcaaaccttaaagggattttcaggccacggtgggaactgtggctcttgcggacccgttactctctgttcctatctcccgtccgctctctctttgcttctcacatgtggttagggcctgcaagtgtctcagggagagagacagctgcagggagcagagctggcaggcccaagttggggcagctgttgaggtgttggggcagctggcaggctgctggggctgttctgggtctcggatggaagagggcagggaggaaggttcagcctggagcagagggcttcctctgcatctctgcatcgctgagcccaggacttaaggggcccggagctgtactgttcccctcagagaaggtcttctccaggcctggggtaggggtgacagttgggagcaaaataactttggcccctggccccctttaggaatcctacgccaacgtgaagcagtggctgcaggagattgaccgctatgccagcgagaacgtcaataagctcctggtgggcaacaagagcgacctcaccaccaagaaggtggtggacaacaccacagccaaggtagcagacgggccggtctgcccggggtcggggcgctggggcctgctgcccctcacctgctctcccctcctcttctctcccctcctcttctctcctctcccttgtcaggagtttgcagactctctgggcatccccttcttggagacgagcgccaagaatgccaccaatgtcgagcaggcgttcatgaccatggctgctgaaatcaaaaagcggatggggcctggagcagcctctgggggcgagcggcccaatctcaagatcgacagcacccctgtaaagccggctggcggtggctgttgctaggaggggcacatggagtgggacaggagggggcaccttctccagatgatgtccctggagggggcaggaggtacctccctctccctctcctggggcatttgagtctgtggctttggggtgtcctgggctccccatctccttctggcccatctgcctgctgccctgagccccggttctgtcagggtccctaagggaggacactcagggcctgtggccaggcagggcggaggcctgctgtgctgttgcctctaggtgactttccaagatgcccccctacacacctttctttggaacgagggctcttctgtcggtgtccctcccacccccatgtatgctgcactgggttctctccttcttcttcctgctgtcctgcccaagaactgagggtctccccggcctctactgccctggctgcagtcagtgcccagggcgaggaatgtggccaggggatccaggacctgggatccagggccctgggctggacctcaggacaggcatggaggccacaggggcccagcagcccaccctttcctctccccactgcctcctctcccttcctacactcccagctcgagccgtccagctgcggtgggatctgagtatatctagggcgggtgggcgggtagcagtgctgggcctgtgtcttgagcctggagggagtctgctcctgccgccctctgccctgccagagacagacccatgcgctgcctgcccaccgtgcccctttgtccccatgtcaggcggaggcggaaggcccaccgtgccagaggctgggcaccagccttaaccctcactctgctagcacctcctccctttccccaaggtagcacatctggctcactccccactccgtctctggagcccaccagggaaggccctcatcccctgccgctacttctctggggaatgtgggttccatccaggattgggggcctctctgctcacccactctgcacccaggatcctagtcccctgccctctggcacagctgcttcctgcaagaaagcaagtctttggtctccctgagaagccatgtccctcgtgctgtctcttgcctgtcccacctgtgccctgccctccagcttgtatttaagtccctgggctgcccccttggggtgccccccgctcccaggttcccctctggtgtcatgtcaggcattttgcaaggaaaagccacttggggaaagatggaaaaggacaaaaaaaattaataaatttccattggccctcgggtgagctgagggtttttgcaaggaagttgtggtggccaagtgtggtctgtggtctaagcccagccttggggtggggggatggaactggaaccctgggcttggtggggtgcacgggggtcctggcttggtttctgtgtcctaaggctgctggcaaaagcccttgaccccgtttcctgaggccaggaaagctgcttgtgcttctgtggtctgtccccaagggcccagcaccgttctgtcagggaaagaggcaggcggccatcagctcatacctggcgtgccgccgccaactcccgcggggcacacggcagaggtgtggggtcgcgcagccgctgagagggcccccactgcacctggcccaacctccttcagcgccccccaaaaccccactgctcccattcagcccctgtcctggcgtcattgtgtgtcccagccaggtgcttctgccgtctccgacagtgacaagtgcctcgcacttcagcctttgccctgagcgcccgcccgagggggccgagtgcggctgtgccggtggctggagtgccgaggggtgcggggtgccgggggcggccgcgtctacgctgtccggagggtgaacggccgcgggcttgtcggggctgggggtggcgcccgagccgggcgggcagacgaggggcccgcggagacccagccccgcccgaggccgctcgcgcggcggccccgcccccggctccgccccgccggcttcgcgggctggagagcgagggagccgcgggcgagggatcgcaggatgagcgatcggggcccgggcagccggcagcggacgcgccccccgagcccaccggcccgcgccccgcgccccccacggccccgcggtcccggtcccggccgcatcacccacgtcccccgagccccacgggccatgcccggccggccctaagcgcgggccggggggcgtccccttgcgcccgggccccgcgctggcgccccccgggccgccgcccggcgcgggggccatggcgttcaccttcgccgcgttctgctacatgctcaccctggtgctgtgcgcctccctcatcttctttgtcatctggcacgtaaggccgggctggggctggggctgggggcggggtggggggcaggggccacgcggagctggagggacccagggcgggtggtctcagagcccaggggaaacttgctatcccccagccgtcggcttgtcggcttcgcccccattaacaccccccgtggtcggctttcttcccggggccccccttcctccgccgcccccgcctgtctgtgtgtatgtcagtcggtctctgaccccctcctctgccctcgtcctctgctcccatgcagcccgtgaggtggggggtggaattctggcatttttgttgctttatcttctatgtccccccccaccaccatccagccgcctccattagtccgtcgggcagtttgtctgtctgctgcccccccccccccgcctttgtgggtttttccagccagagtgatggagctggttgctatggcaactgcatctgtttacaggacccacagatctcagagtccattaaccctttgccttcccagccccctccctgaccaagcagcagttggctctcatcagcccccagagacctagcccccaccaccggctcaccttgggtttccctacccctcctgttgggggcttcccagccccccaggtttcctctccattttccagcttccctcctcttcctgtcccccttcccctttgtctctcacataccccttggtctgtccctcgccctggcctagcctcacacctggttcttcaaaatgtccattcctcatcctgcatccgacccatcgcttcccccaggctccctcctcctcccctcccgctcctctcctccagggcc

SEQ ID NO: 5292 - DNA, 6000 bp, Homo sapiens
atcttctcctctacctctctgtgctataattaacaggcaggtgtctcctcctgaccctggacctcccaggatgcacctggtctcagctctgcaacctcgtgccggcaccaggcctggccggagagggcgctgtgccttcttcggtccttcctctttggtgttcttcgtgtcagcgtctctagcttgtccccagtggcctaagcctgtgggactggccacagagcgggcgcccattcctaccaggcgctgcgcagcatgccagcctacctccccagttctccatgctgaagagcttgctgaagttgtgggcaacatagggggcgatctttttgagatcgtgggtgcgcacacgagtggccagcagtgactggtgggcgtccctgaaggtcgtgtccatcagcagcagccccgggtggttccgcacagctcgagcaaagccctcaggcccctctcgcagcaggatgtctctgaaaccagccgggggcgggcctagggtagacaggggcattggtgcccatcctgcaggtggcaacctcctgtctcccccatgagttgacagaatggatctcacctacctatgggcactgcagggacaacggggtccgtggggctggggctggccttgacgggaatcggggtggttggaccgtttaccatgacatggcctggggagaaagcgggcagtgggtcagggtgggctgggcagaggctgagtcgagggcagcagtgagagtggctgggctcagggacagggacacatccctccaggatccccgggcttccagctggcccctgtcctctccaaagccagggcctcctgggtacaggcagtggggacgtcttgaggaccacgtggatggaaaggtggggtctctcagatcagaagcaaggagagcagtgaatggcagggtgcaggacaagaggacgcagggccagaatgagggcaggggtgaggggcagggggcactaaggagttctttggtcatggggagtggcaaggaggtaggagcaagagattggagagcggaggggaggggagggcagggcagggcagtctcgggccagaccgaggtagtgcaacagcttttgggcccggttctgtgcaggccgcagctggaacagctctgggttctcgtcgatgaactgggtgtccacagtgcctgccaggaactgctggttgttgagcacattctgcaggaaggcgatgttggtctgcaggacagaggcgggtgggagggggtcaccatgcagcacagacagggaaggcagaggagaaaaggctgaaagagaaaaggctgaagatgctgccctgggccagcacagcttctgggcctccctgcagaggggcacttccccgtccctcagccctctcctcactccagcagagccccctaagctgtcacgggctgggcctgctccctccatacttgtttacaccaaagcatgtgctgaaggccacccttcctgcctccccgcagcctagaacagggctcagcctttttctccagcagcgtggcccacagcagtcacccttgcccctcgtccacgcttctcgaaagagggccttgaccgcaacagaccacactctggcactctaagtcactcctcccagctgagtccagcgggcatgctcccgccttgctgctcgttccctgggcttccaagccatcttgctctcctgtcctcttcctccccagctcctcacacaccacatgctccccaggaggccccgtcccggggctgtggcgccagtgacaggctctgcctccagggcaagacccagaggtgcaactgcctcccgggcctttccttgttcacccctcgcataagttcagcaagtccacggccagcttcctgcctatgcacccagtcctcctgtgcccagtgggtgccccactgtccccccagttaccaaaacctgcatcccatcaccctcatcacccactcctcccatgccactggtcaagccagaggattcgaccacggccattttgggaccttgtgacctcttctccatctccaggccacaccctccaccgccttcctcattgtggccacctccagccacatcaaacttgccttgcgctccacacctttgcacctgcctgggaagctctccctgaacttctcaagggccttcgccctgtcctcacaccctcggcagagctgacactcacctttccagcagtcccctgaggaacccgctgtgggcaagcacacccatcggcttcatcctctgcttgtctgcctgggaacccttgggggcagggtgctgcctgaggcatgtgtcagtgcactttgtgcacaggggccctcggttccactcattaaatgcctgggtgacaacatgaggctgggccagggtgagtatgacttaaacggggacatgcgagccagcactgtgacaggtgctccaagacctgtgaaagcatggcctgtggctgtgtagcgacagccctggcttccaccgcgaagaaaacacctccacgcgtcacttattcatgatccctgtcggcaccttcaacagggactcaaggccacccagactcctctgagctctccgtctcttaggctcctattacctggaggcctggacaggaagggtgcctcccccaccagcctgtcaggtgctcaccacagagtgggaccccgccagcagtgctgtgcctgtctgcccctgagcctcgcccctgcctctcctgaagagatgctgacatttcagctgggccaaggcatggcactggagaagggaggcagctaatgaaaccatccaaagagccccgagcgcgcagagtgagaaggacccttggaggccttcgccctgtcctcacaccctcggcagagctgatgctcacctttccagcaggccgctgaggaacctgcacgggcagggctgagcgcagacccacactgttgctgggacccttgtgttcacagacacacgctgaaggtcataaccgttctgcatcaccgagtcatgtggagggtccccactgagtctcccctttgtgactgtcgggttgcccatcctctcctccatactgtaagctctatgggggcaggaaccaggcccatctggttcctgatgaacccggctcccagcactgggtggccatggtggatgctggtaaacatctatatttagagtgaatgaaaactttttttttgagacaaagtgtgtcgcccaggctggaattcagtggcacaatctcagctcactgcaacctgtggctccctggttaatgcgattctcgtgcctcatcccaacagacatgcggtaccacgcccggctaatttttgtatttttaatagagatggggtttcgccatgtttgccaggctggtctggaactcctggcctcaagtgatccacccgcctcggcctcccaaactgctgggattacaggcatgaaccactgcacccggtggaaaacatttttgatggggagaagaggaacaaagacatagctggtgccactgcacatcagagttgacctgcaccaggactgaatccccctcattttacaaacgccacagctgaggcccagtgagtggtgacagaatggcttctggctgcctgtaagcccctcacaagctgcagctgtcctcccctctcgcccctaggaaatgcttatgtatgtaccatccaactctcctggcctacaggaggaacttgttttcagtggtcaggtaacgtgcccaggactacactgctgtgctgacaggatcagaattccaatcttgggtttccccgagtttcctgccacctggcccatggggatcagggctggagggagaacgaggatggctgaggtttaggtggcttaaggaccaggagacacggggaggtggtgacttcctgtttcccaactgggcagaccactggtggtggcgggcacagctggaaggaaaccaggctcgccgagccaccgaagccccagctttctcaaccaggaagcaaagaacctcccccacctcacgccgggagccctttctctgagaggagctggttccgagccgctcttccagggaaatggcccggcggcgacagagcgggagggaggggccgcaggcgctgcgaggacgcacagcttcccaatgcgtgcccccggcggttgggaagccgcgccgcgcagaccaatccggcccgaggcggaggccggttggctccggaacgcctggcccgcggggcgggcggggcagctggggagggagggagaggcgagaggcagctggggacagggcggggcggcgggggcggggcgcctgcccggaggccaagccctctcggccccaccccgcagcagccctgccaggggcgccgccccagccccccccacggccgaaccccgtgccggttggggaccctccacgtgactcggtgatgcagaacggttatgaccttcagcgtgtgtctgtgaacgcaagggtcccagcaacagtgcgggtttgcgctcggccctgcccgtgggtgcagggacgtgtgggtgtgtgggcatgtgtgggtgtgttggggagggtgcccagcgacatgtgacaaagacgcccgtctccgggagatggtgaaggggcccgcgagcaggcgctttgtctggctgtctgcagagtgaggttcgcgccgcggcggcgggcgcccgtgcggtgcaggatgccggggcgccaggatggccgggggcgcgcgcgcctgtgccagggtgagtgcgctgcggcagcgccgggggacagcgcggagggcccgcgccggcccgggcctcgggcgtgactgggcgccacccgtgggcgctgcagcggccgcgtgtccccgtgacctcaggagccggcccgggcccgggtggatccccgcgcgcccctccccgtccgccctccacgtgcgtgtccgcggcgcgcgcgcccgccggcgcgcacccgctcgcctgtcgccgccgccaccgctaaccgcgccgggaaaaggtgccgggaaccgagcgagccggggccgcgggcccgagcgccatgggcccgagggtgggcggcgggcggccggtcatccccgggcctcgtccccgcgggagagcggccaggagtcggcgggggccggccgggctcgcagggaggccggcccgcgccccctgagcgacggacaccaggtgagggggccgccgggcgcagcgcgggggccggccagggaggggccacggactccacgggaggttcggggggcgccttctctggcgggggagggtatggcggggagtggggaggcggctggcgattcctggggacgcctgggaaaggaagttccgggaccctccctgctctcggtcctcctccgcttcctgcctcatgcctcaccttgtccccagcgcctggactcccccttaactgcttgggaaatgtgacctttgctctggggggcctggccctgcaggccccaaccttccctcatctctggcggccctcttgggcctctgacccagcccctccccgggccaggctcacagaagctggcttctgggactgtcctgggcccaagtgggcacctgcgccagccccacctgtgcctgggctgtggccccttcctacagggcgctcaccatggccccgccgctcctgctgctgctgctggccagtggagcggccgcctgcccgctgccctgcgtctgccagaacctgtccgagtcgctcagcaccctctgtgcccaccgaggcctgctgtttgtgccgcccaacgtggaccggcgcacagtggagctgcggctggctgacaacttcatccaggccctggggccccctgacttccgcaacatgacgggactggtggacctgacactgtctcgcaatgccatcacccgcattggggcccgcgcctttggggacctcgagagcctgcgttccctccaccttgacggcaacaggctggtggagctgggcaccgggagcctccggggccccgtcaatctgcagcacctcatcctcagcggcaaccagctgggccgcatcgcgccgggagccttcgacgact

SEQ ID NO: 5293 - DNA, 6000 bp, Homo sapiens
gaggctgaggtggaagggtggcttgagccctgtaattcaagtctgcaatgagccatgatcttaccaccacatttcagcctgggtgacagagcaagattctgtctcttaaaaaagaaaaagaggccgggcgcggtggctcaagcctgtaatcccagcactttgggaggccgaggcaggcggatcatgaggtcaagagatcaagaccatcctggctaacatggtgaaaccctgtctctactaaaaatacaaaaatattagtcgggcatggtggtgagcacctgtagtaccagctactcaggaggctgaggcaggagaatggcattaacctgggaggcggagcttgcagtgagctgagatggcgccgctgcactccagcctgggcgacagagcgagactccgtctcaaaaaaaaaaagaaaaagaaaacaaaagtgcaaaagtgaaagagttgggcctgtggggtgcacagggcagacaagtggctggtgcctcatgagctgagccggggcctggaaagcggagaactgaggccaagtgcagtggctcaacgcctactgttccaactgtattcatcgattttcatgctgctgataaagacatacccaagactgggcaatttataaagaaagagaggtttaaaggactcacagttcctcatgactggggaggcttcacaatcatggcagaaggcgaaaagcacatcttacatggtggcagacgagagaaaatgagagccaagcgaaaggggtttccccttataataccatcagatcgctgggcgtggtgactcatgcctgtaatcccagcactttgggaggctgaggtgggtagatcacctgaggtcggaagctcgagaccagcctgatcaacatggagaaaccccatctctactaaaaatacaaaattagccgggcgtgttggcgcatgcctgtaatcccagctactcaggagattcaggcaggagaatcgcttgaacctgggaggcggaggttgcagtgagccaagatcgtgccattgcactccagcctgggcaacaagagcgaaactccacctcaaaaaaaaaaaaaaatcagatctcatgagacttactaccacgagaacagtacgggggaaaccgccccccacgattcaattatctcccactgggtccctcctacaacacgtgggaattatgggaactacaatccaagatgagatttgggtgaggacacagccaaaccatatcaccaacactttgggaggccgaggaggggggaatcacttgagcccaggagttcatgaccaacctgggcaacgtggcaaaaccctgtctctacaaaaatacaaaaaattagccatgcgtggtggcgtgagcctgtaacccagctactcaggaggctgaggtgggaggatcacctgagcctgggtggtcaaggctgcagtaagccgtctttgtgccactgcactccagcctgggtgaaagagtgagaccctgtctcaaaaaaaaaaaaaaaaagtggcgagccgcttgctggagcactagtcttggggcccagctgtgtggccttgggcgccttttctttctagtctcttcacctttaagtgtcactgactccacgcacagcatctctgtgatgctcagatggagcatccttcaggccaacctcagggtggggcctcccctgaggtgcactgctcttcaggaactggtcccaaaggtcccagaggtcaaggaagaatgagtaggggctttgctcggaggaggtgacttctgtaggatgtgatgcacagaagacggaggaagctgttggtgagagcagggaaaacactccaagcaaagggaccagcaagggagagtccctgaggcggagaatggcttgtcaggcgtcaggaaggccagaaggcccaggaggcaggagctcagcaggtgacagggatggtggcatgaaagttcagagaggccagcagggtctgtaggccccagaaaggagtttggcttccatttccagtgcagcatgcagccacatgagatgtgtttgtttttgtaaattgtacagaagcatatcacacatgcacaaaagtgtacaaatcatcagtgtacaatgccatgaattttcacaaagtgaacacacccaggagatgggcactgagatcaaaaccagaatgtgaccagcaccccagcatcctcccgtaggcccctctagtcaccacccccatggggaccagagtcccatgcacagagtagttttgcttgtctttgaacctcctataaatgcatccatcagcagcgttctctgtgtccagcttctgttgctcagcagtacgtttgtgagattcacccaccatttttttttagacggagtctctgtcgcccaggctggagtgcagtggcgtgatctcagctcactgcaacctccacctcctgggttcaagcgattctcctgcctcagcctcccgagtagctgggattataggtgcataccaccacgcccagctaattttgtattttttagtagagacggcatttcaccttgttacccaggctggtctcgaactcctgagctcaggcaatctacctgcctcggcctcccaaagtgctaggattacaggcgtgagcctgaaaggtggattcactcgcctttcattagtggttgtagttttgcttctcttcttagtggcacagtcttccattgtgtcactacaccacaatgcatctgtgcatttgattcataatgggcatttgtggtctcctgtttggggctactgtcaacattctatccttgtcttttggtgcacccgtgtacgcttttctgatcattgaagggtgttcaacatgaaattgacaagatctctcatttcaagctcactcccgcccctgcatcagctccccagtgtgacaccagaactggaccagcctcaactttgctttttttttttgtttgtttgagatggagtcttgctctgctgcccaggccaatctcggctcactgcagcctatgctcccaggttcaagcaattcttttccctcagcctcctgagtagctgggactacaggcatttttagtggagacggggtttcaccatgttggccaggctggtctcgaactcctggcctcaagtgatccgccctacctcagcctcctaaagtgctgggattacaggcttgagccactgtgcctggcctcaactttgtcttttgttgcttgggtagaataccctattagagtctggccccttttatgccctgatgatgtgtctgactcccaactcccttccaaaccagaaactcggccattcattccccaggcctgggtgtcctgcgaagaaaatggactcaaatggactcaatcgtaccaaagctgcagctggctgtgaaggttgagttaaatgggaaatggcagtgaaagctcagggcccattacccaggccccccgccccatgataatgccctttctctttgttctgttccaggtccaggaaatgaaatgaagacaaaagcgccccctgtgggtgaaggtaagatgcagctctctttctttttttctttttcttttctttttttttttttgagacggagtcgccgcgatctcactgcaagctccgcctcctgggttcacgccattctcttgcctcagcctcccgagtagctgggactacaggcgcccgccaccacacctggctaatttttttgtatttttagtagagacggggtttcaccgtgttagccagatgcaactctctttctagggctccccagcatcctgtcttctagaccaaggatgcccacactgcaccaagccagcacagacccagcctccactgagaggtcagtgcccacaggctgccctcagctctaaaggcccagagtgtagatgagccaggaagcactgccacccttgcacacttgctccccatctgggatcctcgcccctcttcctcccccaccccagaccgttggagaggtctccccaggtgtccacccagcctgctcccctggttactgtgcccacaacatgtggcaccttcccccgcacccagcccctcccagtgcaagccgtgcctcactgccagactgcgcgggcagggagggacctgtcccctgttcccggaagatggaagatcgcccacacctggcactgtgcccagcccctgcgggggcgtcataaatatctcctgaatgattcattcattcctttgggagagaaagcacgaccccttagtggttaaaggtatggagtttgaagtcacacagacctgggttcaattctggctctgacctttggctctgtgaccttggtcacctctctgagcctgtttcttcatgtaaaaaatggagtcaccacgaccagattaggccacggtgaggactgagatgatgttgtaaggcaccagcacagagctgacctacagctcaatcgtggtgggagggagtaattatccattcagaaaaggggaaactttccgctgcgcctcctgtcgctgttttccttggctcccggaggtgcgcagtatcgggtccgtttttaaggtaaagaaactgaggcctagaaagagaacaggataacccagggcgcggaggctggggctagaacccaggccggctggctctgagtccagtgcttggcctgcctctcagaggcctgtgggcacgtccccacccacccctgtccccaggcgtgggagcgaggggttgggcttggcctcagggcgtccctggatcccggacgcgcttggggatctccggctcggaccccaggagcagagacagcgctcgagcttgtcactttaaattcaagagggagcgggcgggcaagcgggcgagcgcgagggagcgcgcggcgggctcctgggagcgtgcccggactgcggcgcagctccggtccgccgccccggcccggccgagcccccggcccgcgccgcgctcctcggaggcgggagcccggcgacactgcaggggtggcgttgccgccggcggccgggctaggcgcaggtgcgtgcgcgctgcgggaggcgggccggcagctggagcccagccggagcggcggcccctccgcggagcccgggtgagtacgcaccccgccgacccccgtgcgcggccgggatcgcaccctgatcgcggacgcacgcagccccctcctcgggccctgggcccgggaccccagagccccgcgcactccgcgctcctgcacctccgcgccgcgcttgcacacgaacgaatgccgggcaccgcgcacgctgggcgcccttacccggcccggccactccgcgcagtgcgcatcgcatcgcacgccccgcatgtgcacacacgcggctcacccggccatttacacgcctccccgcgcccacgctgcacacacgcccctcactttcgcattcagcgccctgactgtcctcactgtccctgctctggcttcgcaccccctcccgacactccggtccccatacaccctggaggttcccgaggcaggagcgctgggtctgcaggaaccgtcccaatctggaggggaacgttgcaccccagcccgaggaggccctggccgtgtgaagagccagatatgaccctcagccgccggtggcaccagcctgagtggggggctttccagagcttaggagaggggtatggcggggcaggggaggaagcttgcccagactcagggcctcaaggctgtagatttgggctgaagttgggggagggaggtggggggccgggagcctggcctgtgggtggaaggccctgagctggccatcctgggagctctcttccaggggctgcagagagactgtgtgcaccctcctccattcccaaaagcctgggaaagctgcaccatggaatgtcagctccttctccccgtcaggggatgacagttttagagagcagcagcaatagtgcttcctattagaaatggggaaattgaggctcagagagggcaggagacccaccgaagttaccacagccagtgtgaagaagggttaggacaagtccccaagcccccagcctccctactctgaagtctgaaagctt

SEQ ID NO: 5294 - DNA, 6000 bp, Homo sapiens
tttcatgtccaagcaaaagctaatatctctatcccccttcctgaatatgaagtgaaaacaaaaacagagtatatgtccaggcgcagtggctcatgcctgtaatcccaacactttgggaggccgaggtgggcggatcacctgaggtcaggagttcgagaccagcctggccaacatggagaaaccctgtctctactaaaaaaaaaaaataaatagccgggcacggtggcgcatgagtgagccgagagttcacgagttcgagaaaaagtaacaatttggccagattcggtggcttacgcctgttatcccagcactttgggaggctgaggtgggtggatcacctgaggtcaggagttcgagaccagcctggtcaacatggtgaaaccctgtctctactaaaaatacaaaaattagccaagtgtggtggtgtgcacctgtaatcccagctacttgggaggctgaggcaggagaatcgcttgaacccaggaggcagaggttgcagcgagctgattgcaccactgcactctggcctgggtggaaagagcgagactccatctcaataaataaatattaaaaaaaaaatcacctagaaacagtaacaggtattgtcaggatggtcataaaatgttattactttcttcttgcttttttggtatttcttcaatttcaaacacaggaaaaaaattgatgtttttcatttttcaaatataatatttgattacaatattgagtaagtccctcccttgagaagctctatgctgggggttggggaagatctgatcgtgccttactcacactgggcctgacaataggtgctcaagatagttgtatggggttgttgtaggaccaacaggtttgtatgcccatatgtatgcagtaacagaccaattacactgagatagcagggtttgcagcagagaaagagtttaatgattgcagggcaccaagtttggagatgggaggagaccttcaaatccatctccccaaggagttttggactgaattttttaaggagattgtggagggcaaggggctggaaatttgggattgttgattgcctaagcaaggggcatgaaataattgggattggaaaccgcattctttggtgagccagctcctcatggggaccagttgagtcagtagttttatcagcatgcaggatctgaaggaatacttcaaaaggaaaatttagcatttcatgttcaagttgttatttatacagcagttaagggcagctataatctagggtctttgtcactccgggacaacaggcaccaaccagccatgaggaagcaggtcagagagcagctgacctcatgatgaatactgagtatgctgcaggcttggtttattttcatcttttccccctacttcttccctaatttgtaggggtgggttgcccctacacacctgtgggtgtttctcgtaaggtgggacgagagatttggaaaagaaaaagacacagagacaaagtatagagaaagaaataaggggacccggggaaccagcgttcagcatatggaggatcccgccagcctctgagttcccttagtatttattgatcatctgtgggtgtttctcgaagagggggatgtgtcagggtcacaagacaattgtgggaagagggtcagcagacaaacacgtgaacaaaggtctttgcatcatagacaatgtaaaggattaagtgctgtgcttttagatatgcatacacataaacatctcaatgctttacaaagcagtattgctgcccgcaggtcccacctccagccctaaggcggtttttccctatctcagtagatggagcatacaatcgggttttataccgagacattccattgcccagggacaggcaggagacagatgccttcctcttgtctcaactgcaagaggcattccttcctcttttactaatcctcctcagcacagaccctttacgggtgtcgggctgggggacggtcaggtctttcccttcccacgaggccatatttcagactatcacatggggagaaaccttggacaatacctggctttcctaggcagaggtccctgcggccttccgcagtttttgtgtccctgggtacttgagattagggagtggtgatgactcttaacgagcatgctgccttcaagcatctgtttaacaaagcacatcttgcaccgcccttaatccattcaactctgagttgacacagcacatgtttcagagagcacggggttgggggtaaggtcacagaatctcaaggcagaagaatttttcttagtacataacaaaatggagtctcctatgtctacttctttctacacagacacagtaacaatctgatctctcttgcttttccccacactaattggttttataaagtttatagggacggttgtagggtggttgcagaaagcttcctgggggaggtgacgtccaaagggctcctaggaggactagggccaagttgggaggaagacagatcctctggtgcagatccagcttgtatgggcaaagccaaaggagctggaactggggaggttgacaggtggcagcacaaaggaccttgaatgccaggccaaagggtcttgagctttgttctgagggcagtggggaaccacaaaaactctcaggcaggaaaggggcaaaacgggtctgagatttataataatcccactgttccatgtttgcagagaaggggctggaggagccaagatgtgagggtgggaggccccaaggatacattgttaatttcaggtgagagatgacagggccacagccatctatcactgtgcagggaatgtttggaaggtaaagttgaccagatagacacagtggatgtggggccagtgggacagggaggagcccttgatacctcttggcttgtggcctggaggctggctggggaggctgatatacagagtgacacaggatgggatgggtgctgaggaggtgagagccaggacctgagatgctgcagagaaggctcctgggagatgacatcagagtggatctccttcttcgcttgagaagcctggcaagtaggtgctccagtgggtggggaccagtgggggatttgttgttaggagacctcaggccgagttctggcagttgtgtcatcctgggcaggccactcagcaatgctgataccctgcttctgaaaacagggctcatcattcctgaggctggagttttggaggattaaggaggtaacacatggcaagtgcttggcccagagcctggcactgaatgaacagaggatccttccctcactctccgttttccatcccccctcatgcccagcatctcctgtccccagcatccccaacctgcatctccctcagcctgtattcctttgacccagttagagacagatgaggaaggaatccacccgctgggctggctctgacctgccccccttcttctgccccaaagggagggatccgaggactcaggtctgagcccggattagctgtgtaatccccagctttgcctaggcaacctctttccctgaccaagagagggggcctgcggctggcagccaggactcctgggctctgggcctgatactactctatctgtctgggaaacctcagacagggaagagatttcttggtgcctctcttgggaatgtcactgacgtccacagtgactgtcacatgcgtgtcagttgttctgtgggtttgctgtgtgcggggcactgtggaaaggaagaaaggcctagattccagtccagctccaccactcagcagcttcatgcccacagacaaaggacaaaatccccctgagcctcagttttttcgtggacaaaatggagtgaacaccttgtggggctgctgtggggtatgtgagaaaatagctgcaaaggagttttgtaaacagcacgttttagagagatcaggaaggatgattacagcacaaaagaacagagatggttcctcaccatgaggactggaaaagagctggggagagcaggccaaaaaggtcactcttatcacgaggaccacagcagagggttccaggaaactgaaaaagacgagttcatcaggcttccaagacctcctgggaaggcaaaggacagagggacctcctcaggtcaggggaaaaccgagggagggggacagccacacaaacgccctaaagtctaatgacggcagaaaggggtcttgggggacgggggtggggttcacagcagtggcctgggcgtgatgaccctggcgaaggacggggtcgcagagcccttaaatcctggaccagtggctgattccaaaagcagcagggaccatgccaggattttgggcagaagcagaaagtgctggactctcctgacaagagctgagagaactcagcggcgccagcaagagtttgtgccgtgcactgaccatctgcatcctctctgcctcaccccagcctaggattccgtgacaggccctctgggaagaactccgcgaacaaccccctgccttggagtctgcaatccttcctcgagcacacggacgcccggggtggggaagcccacagtctggcagggctcgcactgggcagaataattgcaacgtagtcatgaggatcgggctatgacctgcctgacttttcactcctcccatgatacaccgatgcataccgcaggtgcacactaaacgccgaatctatagaaagtggaacacaccaggacccagcagaaggcgacatgcgaggtttgtttacttgtggcatcaaaggctgggagccggcgagctaaggagggagcgaaagagcgagcggtggggacagccaccgctaaatgccagcccggtggagggaggaaggcggaccccaggccggtgggaccacatctcccagaagccccggcgccaaggcactggcctctcagtcctcccccgaggaggcggggccgctggcgaagttgaaggggcgcagcgataccggtgcgcggcgctggcgtcgggcgcgtgacgtctttcctgcgcgccacctagcgtctctatcgcgccagttcctcagcctcagtgctatgaaggtgacagcgtgaggtgacccatctggcccgccgcgatgctggcaacacggcggctgctcggctggtcgcttcccgcgcgggtatctgtgcgtttcagcggcgacacggtgaggcccagcctggctggggccacgggtgtttggggccgggtgtcgcggccgcgcccgtgcacgagcagtccctggggtctgtagtggcctctggagagcccttctccccaggccaggcgggaaggcccccgctccggcctggttgaagtaggggaacgggtcccaacgcggggccgactcccttgaccctctgacttgctggcttcccttgttttacagtcctcggcctggcggaagttttgcaggttgtgaagacccctagtctttcattctctccttgtcacagccttgtagggcgtgaaggggtcattgccccatttagggatgcgcacctcctgatttcccgtccactgctctgcgccctgaagtggctgaaaagtgctcttaaaaggatgggaatcccgtcgccctcagctggtgcgctctccactgggtcgtggggctcctcatttcatcctaagtgagcccctccatcacctgtgtgttaaggaggcatttctttcccatcagtaaacacatttcgcctcttcggccgaggtaggaatataaaaggcccctggcctacccaagttttggtccagcaggggagccaggccgggaaagggccaagctgccacactcggcttgtggggctgtgtggtgccgtgatgcagctgtgggtttggccaccgacagacctgggctcaaattggacctgctgcttttgactgtgagaccttccataagctccttttgctccaagcctcagttttctcctctgtgaaacagagaaaatcgttcctatcagagttcttatgaggatgaaatgggattttggatgtaaaatgcttccatccagtacctgctaaacaaaatgcttactaatggccgggcgcggtggctcacgcctgtaa

SEQ ID NO: 5295 - DNA, 6000 bp, Homo sapiens
gtgtgactcacagcctctcctgtaatctccacaacccctcgaggaggtcgaggttattgtctccatctttataagcactaaaggatgagcctgccagccacaggtcccactgtgagttgtggacactacatttctgggatgggggcatatgagagtccttgccaagcacatttgaaggttttcccagccagcccctcccccagcgggctacccaggaactgagagttaggacgtgcccttgagtttgggctgtgcccccacttgctgtgtagctttggggagcccctcaacctctcggaaccttgtttttctcatccatcaaatggagagaagtagatttaaggcacaggattgcacccaacagtgtaggcattcttggcgatgttgcaggttcggctccagaccatcggggtaaactgagtcacacagctgttttggttttccagtgcatttaaaagttagatttagaccgggcacagtggctcatgcctgtaattccagcactttgagaagccgaggtgggcggatcacttgaggtcaagagttcgagaccagcctggccaacatagtgaaaccccgtctctactaaaaataacaaaacttagccgggcacgttggcaggtccctgtaatctcagctacttgctaggctgaggcacgataatcacttgaaccgggaggtgggggttgcagtgagccaaaattgaaaaaaaaaaaaaaaattagggccggttgcggtggctcacgcctgtaatcccagcactttgggaggccaaggtgggcggatcacaaggtcaggaattcaagaccagcctggccaacatgttgaaaccccgtctctagtaaaaatacaaaaattagccgggtgtggggttgcacacctgtagtcccagctactcaagaggctgaggcaggagaattgcttgaacctgggaggcggaggttgcagtgaactatgattgcaccaccatactccatcctgggccacagagcaagacttcgtctcaaaaaaaaaaaaaggatttacactgtactgtaggctgcgaagtgtctaaaacacaatgtatataccttaattaaaaatactttaggggccaggcacagtggctcacacctgtagtccaagtgctttgggaggtcaaggtgaggggattacttgagcccaggagtttgagaccagcctgggcaacatggcaaaaccccgactctacaacaacaacaaaaaatacaaaaaattagcccctgtaggcccagttacttgggaggttgaggtgggaggatcgcttgagcctgggaggttgaggctgcagtgagctatgagctgcaccactgtactccagcctgggtgacagggcaagactctgtctcaaaaaacaaaaacaacaacaaaaactttattcctaaaaagtgctgacccagagataagaagcaagcacatggttggtaaaatgacatcagtgagcttgctttatgcagggttgccccaaaccttcaatttgtaaaactcaaaatatctggaaagcttggtgaggcgaggcgggactgtaactcagcactcaccgcagggtgagacccttagggcagcgggtgctacactgaacaaagcggtgaacagccccctcgtgagagggggttcttggcagatgacgccagcagctgacaaacaggcaaggcaggccgggcacggtggctcacgcttgtaatcccagcactttgggagtccaaggtaagcggatcacaaggtcaagagatcgagaccatcctggtctacatggtgaaaccccatctctactaaaaaatacaaaaattagctgggcgtggtgatgcacacttgtagtcccagctactcagggggctgaggcaggagaatcacttgaaccgggaaggccgaggttgcagtgagccgagattgtgctgctgcactccagcctggcgacagagcgagactctatctcaaaaaaaaaaaaaaaaaaaaaaaaaccagcaaggcagggacgccagcagggcacgtgctgaggagacaggcgcgagcaccagaggtgcagggcggcctcttagccggagtccaggaggcctttgaggggagagggcttctggcagaccccaggggtggggatgagcagtgacaggggccctgggggctgggatgtgacagggcagcgtggcagtgtctggtggcccctcccgcaggccatcaccatcgaggctgagccaagagctgatggcagccgccggaccacccgctatgacatcgacatgaccaagtgcatctactgcggcttctgccaggaggcctgtcccgtggatgccatcgtcgaggcacgtgaggcccccgggtgggagggggcctgaggctcctcagcagggcctaaccaccgtccctgcacctcaacctgcagggccccaactttgagttctccacggagacccatgaggagctgctgtacaacaaggagaagttgctcaacaacggggacaagtgggaggccgagatcgccgccaacatccaggctgactacttgtatcggtgacgccccaccggcccgcagcccctgctgcccaataaaaccactccgaccccacggcctcttgtcttgactctggtggtccagggtggggccgttcccggcctgcctgaggcctgtggtgcctccaactggactaggtcgccacctagtctttatgctctctggagtcctgctgccccagccctgccttcctgtagactccagggccccaccaggctctcatggctagaccacaggccgcagcatccctgtcaccctgcctcttcctgggcgtcttccccaaggcccagcgatgccagaggtcaccacagacctgccgttcccactctcccgggtgtcctggctggggcctgggcctcctgtctcccaagagccatccacttgtaagacgcttaggacttggagcctcccaagacctcaggctgaagaacagcaagtggcagaaactcaggccggggcatccttgctgggggtaggaggaagcctgcttggggtgacagtcacacgagggtgacacaggccctgctggccctgagctggcctgcgtccagccacatcctctttcctgtgttccctacgccagggtgctggcccggccactgctcaccacttcctgctttgctggcccagcgacacggtggggtttccctagggccacacacaagccccttgcccatataatggccaaaagcagcccccctgaacttgtgctaagtactgtggaaggatttcacttcatttgcagtgaggaaaccagctccgagaggtgaaagggcttgctcagggccatgcagggcacatcccataataaaactcagttcagagaccttgaccccccccatctaccatcatttccaaaagtgctttttacaaagcactactttgtaaaaagctacttcttcgaaagaacaagtttcctggcccagtgagtgttggaaatgctccagctgctgtgtgcctgctggcaggtactgcatggtagacattcaaggctctgagaaggcctgcagcaaaaacaccagcctctcccagcccattcccagggagcttttctcaggtctaacacctgggcctccttcctagaccaggcattgccatctaatgccaaagtggccaggctcccgcttgggccccacagcctgtggcactggggtgagaagtaactgcaggaggcgaggggaagcctggagcccgggaagtgtccacaggtctggcccgcagctcatcttggccactgatgaaaacaggtgttctttccaaaaacaaggcaggcgcaggactcctgaagcaccgccggtttagcttttcccagacgtaaccgccgtcagagcgtggcatggagcctgtagctgtgcactgaatacttctattccaagcgggtcagtctttccagctcaccgctgggttctttcccttaccgtggtctcccaggcacttactgctgagaccccactcaggctgtctggttgtatcaggccccgaccctgtcagaacaggcctatggcgcccaaccacaagtcccccaattttctgaggaaccacagctgagcttggctgtgactcagtttccaggcccggctctggggctccacttgtccacccctgccgcagccccacaggcctgtgctcgctgtgtggggcttagggatcaccagagctgaagggcccctggcctccagtgggaatgccccaggcctgtccaaagtgcaggcagctggacggtcgtgagtcccagcttccaggcactaggacctgatgacgcccatggtgctgacctggagcaaggtcacagtgacacccccctctaccccccgcggctgcagctgcaggtggagctgacagctggcctctggccccagggtatctcccagggcctgctgggtgcggggcgctgggcagaacaaggcagcatggcctggccctgtgtcctgctgccagtgaagcaggcccagagtggggcagccacccacccaagggccagagcggggcctctccagggtggtcaagagcaggaaggtgtaagcaccggcgggtttcactgccgcccaagggaggggtcccggaggtgggggagcatcctggggaccccaagcccatgagcctgcgaatgttggggtcccatcagccagaggcgcacaagcctcgaagtgagaggagagcagggtctcatctcctatcctgagctgggcctgagcggagctgcccctgcatcggggccagcatagacgcgcgcggttggcagtggtctgttatccgctcctttctccaggcctcctctccgggattaagcgcctcaggacccgtccgccaggccacagcctgggctcaacctctcccagacttcctggactccagtggagccttgggccgggggcggggcgtccctggcccctccccgtcgtcccgcctgcccggaaaggagtgagcggcgcctagtcccgggctggcgggagtgcagttctgagtcccgcccggcgtgcgcggagcggggcagccagcagcggaggcgcggcgcgcagcacacccggggtgagtgcccctgccggggtctgcggagccccagaatttcctgcccaccctcttccccctgccccggggaggagatcctggcgccccacccagttggctccgtgaatgcagctcagcccgccaccccgcagggtgtcaggccttgcggggggccacggaggatccccaagggaggaggagaaggatggggtgtttaccaacacagcccagcgttcccgggcctggtgtgcgcggagctttccccgctgctgcttccttggagggagggacccattctacagatggggaagctgagaccacacaactaggaagtgtcagagctggagaccagctgggtcatttgactccagagcccaccccatttggaatggagggggcgccagaccctctcctactgccttcccatcatctggaggggagggcagaggtgcagagagacctgctgggttcctggaggggccaggaaaggggcacagggtgaggagtgggctggagcctggaccccagggccgcaggatggaggcgtattcatttacaccataaaagtggctgggtgaccctggctagagcggggaccaagggggacaggggtagggggtgagccagtggagcctcacatgccaggcacgggggctgatcacgtccccacacctttccccccgcccattacaggttgttcccccaccccctgggaagtgctggaaggagcccggccctcgagccctcggcatagtggctgtgggagccctgatggccctgagccaggggtgacccctccccagatccccagagctgattccccacacctccttatttggccagcacagccccaaagggagccaggtcagacacaaccctcctctgagctcaccctttgtgctgggcacataacattggactttacctctccaagtgtcagtggagtcctgtatgaaacaaaagca

SEQ ID NO: 5296 - DNA, 6000 bp, Homo sapiens
ggtaggaggatcacttgagcctgggaggttaaggctgtagtgagccgtaatcacaccactgcactccagcctgggtgagacagctagacattatcttaaaataaatgaaaaataaaagtaaggtagaaagagtatttttaaaagtcttattggaggttcacatcagcactgagagataagaaatagagcagatatcatgattcccactttttgaatgcagaaactgaggcccagagaggtgaatccagcctgtgtccttcacaccccagctggctcatagaaaccatggcctgttaccaaccaagccctccagagcccagcactgtaggccgatggcggccttccctggcctgctcctggggcaggttgctgagaagcattgcctgttttggggagaggcctgcggcagcctgaggaatgagcctggcagtgggcactctcactggggcctcctccggcgctgccctcaggaagattctgtggctcccaaagccccaggggcgcctctgaccacagcagtcagtcctgccgggttggggggggctcttgtgcccagcgtaacttcacagagccagcacgttccagcctgggagggaaaccaaaaggcactttgcccaagtgtcaccgggctgaaacgacatcctcatgggcccctgtccccggaagcaatgagattggacaggtgctgagcccctgttacttcattgggatggacttgcatctaaggaacgaactgagagtgaacatttccaaatttgaggcctaagaaaagtttgttggcctgatgagctgtgacaggcaaccgtctggggaagtggaagctcagcacatcctccggttacttattacgttactgaagggtctaaaaatgactgtccttggggtgctggaatcctgcagaataaaatagtgctgaattttaattcattctttgcaaatgaatgttctcaaggctccggttggagtcaggcaccctgggaccttgcagtagtgtgctttgggtcccaggccacagcacagcccctttctttttttttttcttttttgagatggagtcttgctctgtcgcccaggctggagtgtagtggcgtgatatcggctcattgcaacctctgcctcccgggttcaagtgattctcccgcctcagcctcccgagtagttgggattacaggcgcccgccaccaagcccaactaatcagctaattttttttttttttttttttttttgagacggagtctaactctgtcgcccaggctggatggagtgcagtggcgcaatctcggctcactgcaagctccgcctcccaggttcacgccattctcctgcctcagcctcccaagtagctgggactacaggtgcccgccaccacgcccggctaattttttgtattttaagtagagatggagtttcaccatgttagccaggatggtctcgatctcctgacctcgtgatccacccacctcggcctcccaaagtgctgggattacaggcatgagccacctcatctggccttttttttcttttttttagagacggagtcttgctctgtcgcccaagctggagcatagtggctcaatctcggctcactgcaacctctgcctcctgggttctagcaactctcctgcctcagcctcccgagtagctgggattacaggcacatgctgccatgcccagctaattttttgtatttttagtagaaacgggggttttaccatgttgcctaggctggtcttgaactcctgacctcgtgatccaccctcctcggcctcccaaagtgctgggattataggtgtgagtcaccgcatccagcccatagtccctttcctctctgggagtctctggtggccccttcataatgcttttttttttttttttttaattcttggtacattttctatgtaatcatttcaataactgactgtccagtagagtctttagtttttctgtatcccttcccaaatttagaaacctgacttgaactttgggccagttgtaatgtgtcctctatgacaggccatcctgggcccccttccctttgttcctgtggctggagccctgagcaggccccatccacttgagtccaagaggccctctctcctggctgctaccattgtacccacctgctggccaggcccccacaggggcctctttcctcctgacagtctcatccccactcagcagccagagtgccttctttataaatgtagatcagatcctttcactgtatttgttcatccaacacacatttactgagcacctactgtgtgctaggccctggtacgggcacaggaaacacatcagggaataaaactacactctctgctctcctggagcttccatgctagtggagagaagaaagatacgtaaacatgtaatgagtcaggtggtgatgagtacaaaggagaaaagtaaagcagagaaatggagtagaaagtgctggcaatagtgggtggtggtggtggggggtgtggtttgcaattttcaacaggggtcctcaggcctgactgaggagctgaagaggtaagagagtgagccacgaggctaagtggggtgaaagagttggagcagaaaaggtgggaggatcaccaggcatgatggcccctctctgtagtcctaactactagagacaggctcatgcctgtcatcccagcactttgggaggccgaggcaggtggatcatctgaggccaggagttcaagaccagccagaccaacatggtgaaaccctgtctctactaaaaatacaaaaataagctgggcgtggtggcacatgcctgtaatcccagctacttgggaggctgaggcaggagaattgcttgagcctgggaggcagaggttgtggtgagccaagattgccccactgcactccagcctgggcaacagagtgagatcccatctcaaaacaaaacaacaaaagctaactacttgagaggctgaggtgggaggattgcttgagcccaggagtttgaggttgcaatgagctacgatcacaccactacactccagcctgggccacagagtgagaccctgtctcaaaaaaaaaaaaaaaaaaaagagtcccagcagagaacagcaagcacaaaggccctgaggcaggagtgcacctggtgtgtttgagaacccacagagacaccactgtggctggagcagggtgagatgtgggaagggagtggctaaggaagctgagaggtcaaggaagaagtgtggttggagcaggccctgcaggtgccgaaggcttttgcttctttcctgagatggcagccctcacgagccctggagcttccctggctgccatgagatcaggtggaagggggtcgaggctgcaagtggggacgcatgagtgggtgacaggtggcagtagtagaagtgtaagaagagctgggagtctgggtctcttctatcttgaaaatagaaccccaggctgtgctggtagagctggatgcagggtggaagaagggaaaatatttttgctgcttaaatcctagcctggcttcccattgctcgtggggtgcattctcgattcctcttccccgcctgaggtctgacatgtgctggccctggctggcctctcctgtaccttctaccaccagctccagctcatggcctgatgtggttcctcccccgaatccagcgaccaggctgccctctgccccagcgcctcctccgtggatgtctgctcttcctgaactgccctcccaccggacggctgctccttggtagcagctcaagtgtccttccttccctaagccagtttccccaaacactgcagcacaacgcccttcatttctcatggcattcttcatggcctgtcaatggggcttttgttgttttaattttccgtcttcttgtttttgttggtcttcctagaatataaaccccatgagggcagaggcgttcagcctgactccagcctggcaaagctgtcacaaatctggaggaacacacacgttcacgggcactcagttctgtgaggtactgcaagccctctctgaacctgcaaggtggccattgctgtccccactttacaaaggaggaaagagtgcgcggagaggttctacttagacccgccaagggcacagtcgttctagaaagtagcagactgggagttccaacttgggcttgctggttccagagccccttctgtgccccttccaggctgtgcctgggtgagattcttctcctaccagcacgtcttcttcctggagggttcagtggctgagctgacaccggtgggcaagaggccctggcgggcttgttgaaggactcaaaggtggcgtctgggagcctggcgggactttctccctgtcagcctagaggcacttttagaggagtgtgtctgtttcgcagtcttcgtgtctcataattcataactaaggtagagggtacacatttagtttacagtaaaacctcaaacccacctccactcccagccggccacttctctccctgttcccttctctgccctccacaggtgagaacaagtgtccggggccgccccgtggggccccaggctgcccgccctgaaactgcctcgctgtgtgcccttgggcaaccccgccctgctccgtgcctcagtttccccactcatagaggctccacaggtgacacacctggctccgggccccgatcggccgccgggccccgcggggcggaaaccccgcgccaagcctcccggaggcacctccagggcagggcggggagcgcggggaggggccgcggggacctgcgccgctggggccgcctggccgccggccggctccggggggcgcccgcgggagggcgcggccggtgcggggggcgcgggtggcggcggcggggggcggagacgcggcgcggcttccgctcccgcgcgcccagctccctcctccccgtcgtcctggtccgcggcgcccgaggggggaggcggaggcgccgggagccgcgcgaggagccgccgccgccgcgccatggagcccgagtgagcgcggcgcgggcccgtccggccgccggacaacatggaggcagcgccgcccgggccgccgtggccgctgctgctgctgctgctgctgctgctggcgctgtgcggctgcccggcccccgccgcgggtaggtgggcgcaggccggccgggggccgcgggttgctcggacaatggcccgggcggccccgcggccaagtgcgcgggcgccgccgccgtctcggaagcgacttggcgagttgggagcgagttggggcgcgcgcccgggatccccctgccgtccccggcgtccccgccacgcgcgggccctttgtctccccacccgggccctccccggggacgctgcgtcccgggctggcgaggagggcgcccgctccgccaggtgcggcgcgggcgggtcctcacctgcccgagcccgcgggaagccgggagccgagccgagcccgcgctgggcccgtgtggcccgggccgggcaccgagcggggacttggggcgcggaggcgggcctggcccggggagccggttcgcaagcctgtttccagcggccgcgcggccgccccgcgtgctccgaggacgggctgaagttgcagcgagaaagttctgagcccgggcgcggggcggcctggccggtggcgctgctcctgtgagccgcgtggctgtgggtttccaagcggactgacacctgccaggtgcccgggcgacccgaatgccccgtgtggccgccgggtccccagatagtgtccatccccgggtcggctacgcggaggtgacgtggtcccagatcgcggggcagtgggggaggcaggcttgtgcctcagttgtacactcccgtggggagaggtagggcgggggaactttctctccaacttttggtgtttcccagggggtggagttgaggtcaggaggactcaggaaacttaagcagtcgtgaaacgctacacatgttcttttaatttggagattgccatgtggtttttcaagcaagcctcttgctacctaaatcattctcttcggatgtgcgtgttttgtttttctggagtatgg

SEQ ID NO: 5297 - DNA, 6000 bp, Homo sapiens
gaaattagcctggcatagtggcatgtgcctataatcccagctacctgggaggatgaggcaggagaatcactggaaccggaaggcagaggctgcagtgagctgagatcacaccactgcactccagcctgggggacagagcaagactctgtctcaaaacaaaacaaaacaaaaacacaatacttatttacttatacttcaagattttgtgagtttaattatacttcaagattttgtgagattttgcccaagaatttgggcaagactcatgattggcccatcttggccgggcgtggtggctcacccctgtagtcccagtattttgggaggcctaggttggaggattgtttgagcccaagagttgaagaccagcctgggcaacatggcgaaacctcctctctacaaaaatacaaaaattagctgggcgtggtggtgcgtgcctgtagtcccagatactcagggaggttgaggctgcagtgagccatgatggtgccactgcactccagctggggtgacagagtgagaccctgtctcctaaaaataaaaaataaggtaaaataaagattggcccatctaccctcaacagttgcctggactccctggggctcagtgcacctagatgctggactcggataaccatctgatctttgatgtagtggacagacactttgttcttgccatcatctttggtacctgagatagaaagccttaaagagaggccacgcccatgattaagtttcaggtcaaaacaacgagcaaaaaggcaacggctatagttgtaggtgtagcaaatcagtgtgccttttatctagaggctactgaaaaccagacattcattaaagatattctggtcacttggatgaaggctggccttggcattcacctgaatctttagtagagtctttagcaccattggcaactcagccagacctggccttggccacgatagtggagcctgggattggagggcatgaattttatgaagcctgtaatatcagaaattcgttggttgaggacatacctctttctttttggaccctgtgggcgtaatgctattgatacatgtgcagaggaggaattaatatgactgtgattgacagaataattatgaagtgcaaagacctcagatctgtgatcagcttccatagaagtatttgctcagaagcttctcagaaacattctcatgattgaagaagccttgaagagcccgtatttctgtctatgaaatctcctgtttattgtactatgaggacccatcagaaagtaactgaggtagtgctgatttcctgagcaattattcagtccactgtctcaaatccatcatgcagaatgttcacagagggtaaagtaagtttgactattataactactcacttttataagtgatttaatttaaagattaatatgataagtactctgtttttcctgggaattttgttgtagaaagagtaactgctgtgtggctaaactaaggttataagccaaattgtttcctcagagtttaagaaacacaatactaactctcatgggtttactagttgtctgttgctgcataacaaatcattccataattttgtggtgtattgctgcagacaatgttaaactaagtggatgaaaaggatattcacatagtctcagagtgtctccctacaaggtaggattactaacaaagggaaactaataattatatagtaaggaaatctccttaacccaataatcaccagcaataagatgcagcaaccctcatcatgtacctcttgatatgatgcactgacaaaagcacctctcttctctaattttcttgccaaaatgcataagctcaagctaattacaggaaaatatagacaaacccaaattgagggacattctgcaaaataactgaacagtaattctccaaaagtgtcaaggtcataaaagacaaagacattgaggaactgtcacagattggagggagactaaggggacatgacaactacatgcaacctggaatcatggactgaatcctgggccagagaaaggacattgggggggaaactggtgtaaagggcataaagcttgtagattagttaacagtattgcctcaatattaatttcctgatttttttaagaactgggctttggttacataagatgccaatatttggggaagttgcataaaaacatacgggaaatcttttgacgatgttttgcagtttttctgcaaatctaaaattatttcaaaacaaaaagtttaaaaatcaaatacacatagttgcttgaaatagtaactattttattatattccaagatgttgtgagtcaggaatttggccaaaactcaggtgggcgattcttctgcaaagacccccacaacacattcaaagtcacaggcagaggttgttgggggagggcattgaaaagaagagaagagtcataggtgggtgcaatggagggagggcagagggctgctgactatggtgcaggactcatccataatggagccctggggaggcaagggcttcataactagacactggtcttgtcacctcagactcacctgtagcaggaccagatactgaggtcagactgaaaacacaggctctgcctcaggagaggctctctactagctgagtaaatgatgacagtattggaaatgttcccaacatcataatgggaaaacatcacttcacactacataagcaatacacaggggcagtgccggtcgtcttcccaggttagtagcagttctactgcctccaagagtgttggagaaatacaaaccaagcattaggcacttttaacttgaaaacatgaagttctctttcctaactttctttgtttccttatttcttcttcttcttcttctccttcttcttcttcttcttcttcttcttcttcttcttcttcttcttcttcctcttcttcttcttcttcttctttcttcttcttctccttctccttttccttcttctttttttgctgagacagggtctcactctgacagtacagtggtgccatcacagctcactgcagcctcgacctccagggctcaagcaatcctcccagctcaccctcccaaatggctgaaactacaagctcgcaccaccatacgtggctaatttttctatttttgtgtgcagatgaagttttcctatgttgcccaagtggtctcaaactcctgggatcaagtgatccatccacctcaacctcccaaaacgctgggattacaggtgtaagccaccacacccagcccactaacttttttatatcggctaatgaaatagttttaagtttagaccctacgaggcataaagaaataattttagttatgttatcagatgtacagtaatactcaagtgtgcaactgtggataacttgagttcatgaggtttttgtttttttgtcaaaagaataaatttatagtgaaactacccaaaaaagcaaagtacagaacagtatgctaccatttgtgcacagaaatgggatatatatggtgtaactgcatcgaatttactggatgtatgtccagggaccagaactcttggtggcttcatgttcatacttttgcaagcacatgtgtagtatccttaacttaaaggtactgttgtatacattctagtgttatcaaaatttacatacatattatcaagtcagagaggtcattctgtgtcttagtattttcacttcatatttggtatatttatgtatgtatacacacatacctatatgtatttaaataagatttatagtcacatggtccaaaaatcaaaacaatgtggaaaggtttacagagaaaagtctcaagcctaatcctgttctctactgccaggtgaccatgttattaatttcttttcataccttgccacagaattttcacctgcaaacacagatattcttttcttttttaatgacagagtcacgttctgttatccaggctggagtgcagtggcgtgatcttggctcactgcaaactcctcccgggttcaagtgattctcctgtctcagcctcctgagtagctgggattacaggcatgtgccaccacacccagctaatttttgtatttttagtacagatggggttttatcatattgaccaggctgatgtcgaactcctgacctcaagtgatccgcctgcctcggcctcccacagtgctgggattacaggcgtgagccaccacgcccagtcaacacagacattcttactccttttttacagagaatttattattattattttttacatagcatttttctgcacctttctttttccacttaacaatgcacttgaagatttttccatatttgtacatcaggagctttctctttctttgttaccacattaaattccactgggtagatgtaccataatttaactgggtccttattgaaagacaattgagctgtctcctagacaaagccttgtgcaccttcccgaacagagggtctaaccaagcaggcaggatggggttataaagtaggtggggaggtgggagagactccaccttcccaggtgggctgagaatggaggtaaggccctgcaacaggacagagggaaaagtggggatgagaggtgggaggcgagatagcgcccactgttctcgctcagccccctcctccgtttgccgctgacctgttggcctcccccaacctctgagcctgcctctgcctaggtaatttcccaagacccagaaggggtgaagggtgaggtgtgattgcccccacctccttgcctcccgcagcatctgctccgggaccatgaacaatagctgacagctccatggcccttgctgtccccatctcagcttccctgggcatctaaacctcagctgccatggggtaggaggacaggctgaggaagcagaagcctgaggctgtctagagtctcactcctgcatcagcaggccaccacctgtggttcctccttgtgcaaatttgaaaagaattgcataaaacactggagaaatccaagaggggaagtccacaagggcggtggctccctacaaggtcacagagcaagctggtgtcagagcctggacctacagcgctgttggtggaggtcctgcctccaggtaggggaagggctccctctcacctctacacgcagcgcatttcttggctcagctgccctgtaggggatgcagggtggggacagcagagatctgggcctgggagggagagagtacacaatcacatggctgttgcccctgtctcaggccttgtctacctctgactgtggctctctggcaggaatagatggacatggcctggcagatgatgcagctgctgcttctggctttggtgactgctgcggggagtgcccagcccaggagtgcgcgggccaggacggacctgctcaatgtctgcatgaacgccaagcaccacaagacacagcccagccccgaggacgagctgtatggccaggtgagggcagcctggtgtaggacagcatgcacacaggtcagagggtgatggcacgagcaatggcaggtccagtgtggtcagaaccaagggtgccgctgctgacaaggaaggggaggggcggccagggccaccatgccacaggtaaggccactgaggcagcttggggaatatgagctccaatttgaactccaggctcaggagtgtgcttgtatttcattcctctggtctcctggcctgctccctacaaggtttcacattcccagagggctggggatgtgcctagggagagactgtggcgtggacacaatctgtgggttaaagcgaagacaggacagcctggaagccccatgacatctgagtcactcccaacattccatttgcttatttttaaatcggggttaaaaaaaaaaaacaaatacataacatacattttccactttagccatttttaactgtacggttcagtggcattaggtatgctcatgtggttgtgcaaccatcaccaccatccatctcctgacctctttcattctccaaaactgaaatggaaactctgtgcccaccacttcatttgcttttcagaaccttctagagcacatcctcc

SEQ ID NO: 5298 - DNA, 6000 bp, Homo sapiens
tgcagagagtggagatttaagattacgccactgtattccagcctgggtgccaagtgagattgtctcaaaaaaggaaaagaaattcatacagaaataattttcagccgggcatggtggctcacacctgtaaccccagcactttgggaggccaaggggggcagatcacctgaggtcaggctttcgagaccagcctggccaacatggtgaaactttgtctccactaaaaatacaaaaattagccaggtgtggtggtgcatgcctgtaatcaggaggctgcattcaggaggctgaggcaggagaattgcttgaacccggaggcggaggttgcagtgagctgagattgtgccactgcactccagcctgggcgacagagcgagactccatctcaaaaagaaaaaagaaaaaaaaaaaagaatttccaaacaagctaaatggttacaagatgtatgaactactgatcccatcaattacctatttagttggctttctaccacactgggaagttcctttcaagatgccattcaagtccttgttatagtaatagtctccattaaccttttcttcttaacatttaattacctataatatgtataaccaactgctgtaagtctgctgctaaaaccagaattatgctggctcaatgcgtagatcttatagacaagttaaattggtagccctaccttttggcctttatgttgcttgatagaccttaggggttgaggtctgcccacctctattcctgtctggccagagttcaattggctataagtctcttggccacaagggtcccaccaaaggactggatggacctggagcaggcaacctcaccatcctggcaacaacatgatacaaattttgccattgatgctgcctgtggctgatctcagctaaaaagaggaaatgtgaaataaaaagaaaacccgccgggtgcggtggctcacacctgtaatcccaacactttgggaggccgaggcaggtggatcacctgaggtcaggagttcaagaccaggtttgccaacatggtgaaaccctgtcccttctaaatatacaaaaattagccaggcatggtggtgggtgcctgtaatcccagctactcaggaggctgagccaggagaatcgcttgaacctgggaggcagaggttgcagtgagccgagatcacgccactgcactccagcctgggtgagagagcgagactctgtctcagaaaaaaaaaggaaaagaaaagaaaagaaaatcaaagccccctcaactgactgaacaaacccatcttggccaaggagaccccacaaaaacttcaaaatctaagtttcttggctatgataagacaggaggctggtcacaccccagtacaccctcttccttactgttaccgacttttttcctaacagttaagaagaaaccagtcctggaaaacagatggaagaatcctgctgatttcaacttcaaccacctgatgctgtggccagacgtccctctttttttcgtgtttttattttgttttgttcttgtttttgttttttttttggagacagggtctctttttttttttttttttttgagacaggctctgtcacccaggctggagtgcaatggcatgatctcggctcattacagcctctgcctcctgggttcaagtgatcttcccgcctcagtctcccaagttgctgggactacaggcacacaccaccatgcctagctaacttttgtatttttttgtggatatggagttctgctgtgttgcccaggcttgtctcaaactcctgggctcaaaggatccacctgccttagcctcccaaagtgctgggattacaggcatgagccactgggcccggcctctttttgtgattttgatatgacagctgaccagctcacaaagcattccttcctgatcaattcctattaaccatggggtggttctggccaatttagagaggcggcacacaaagtgcctttgtgtcctatgtttcgccttttgatgtgtacagcctaagtctgcatttttttttttttttttttgagacgtagtctcgctctgtcacccaggctggagtgcagtggcaccatcttggctcactgcaagctccacctcccgggttcatgccattctcctgcctcagcctcccgagtagctgggactacaggcacccgccaccacacccggctaattttttgtatttttagtagagacagggtttcaccataacacatgttagccaggatggtctcgatctcctgacctcgtgatccgcccgcctcggcctcccaaagtgcttggattacaggcgcgagccaccatgccaggcctaagactgcattttaaggttaagtcttggctgggcatggtggctcacacctgcaatcctagcaccttgggaggccaaggtgggaggattgcttgagcctaggagttcgagaccagcctgggcaatatagtgagaccctgtctctctctttttttgcgggggcgggggacggagtcttgctgtgttgcccaggctggagtgcagtggtgtgatcttggctcactgcaacctctgcctcccaggttcaagcaattctgcctcagcccccaatagtagctaggattacaggtgtgcgccaccatgcccagctaatttttttatttttagtagagacgggttttcaccatgttggccaggctggtttcgaactcctaacctcaggtgatccgcccatctcggcctcccaaagtgctgggattacaggcatgagccactgcacccagccttctttcactatttttaaataaaaatataaataggccgggtgccgtggctcgcacctataatcccagcactttgggaggccaaggtgggcagatcacttgaggccaggaatttgagacaagcctggccaacacagtgaaaccccatctctactaagaaataatatcaaaaaatagctgggtgtggtggtgcacacctataatcccagctactctagaggctgaggcaggagaatcacttgaacccatgaggtggaggttgcggtgagccgagattgtgacacggcactccagcctgggtgatagagtgagactctgcccaaaaaaaaaaaaaaaaaaaaaaaacaggccaggtgccgcggctcacacttgtaatcccagcactttgggaggctgaggtaggcggatcacttgaggtcaggagtttgagaccagcctagccaacatggtaaaaccccatctctactaaaaatacaaaaattagccaggcatggtgtcaggcgcctataattccagctactcgggaggctgaggcaggagaatctcttgaatctgggaggcggaggttgcagtgagccaagatcgtgccactgcactccagcttgggctacagagcaagtctccgactcaaaaataaataaataaatgaaaaaataaaaaaattaatgttaaatctcaaccccaaagtgaacacaagatgtatgtaacatgtatgtttgcttagtatacatgcatgtggctccctttcatgaacattcatagcttttcctataacccattaatatgtatgctagccaacccattttacataaaactcctgtcccacccttcctccctcaaattgcctgcttttggtctcagccaaaggctccacttaccagcctgcaggttacaacctgacataagaaaaaatattgtttccaaatatatagatctggtgattttaagttgacacttctcaggttgtcacaagattcaggtatggctcactgttgcaggacataagctgggatctcctgggaattggtctgcttgcaggccctagagagccttccttcttggttgattttcctctagagatccaactgtcttctcaggctcccctgcctgcctcctccttgggtcctttcttgtggcattgcccagattactgggcccccattttccctacacttactgccactcatagtctgatggttcccacatctgcatccaacctggactcttcccctgagctttcccctctacaaccaccttccccgggccaagggcacacaggcacctcgacaaaacagtgttctatgtttcttcctgcccaaacctgcccctccctctcccttttcccatctgtggtaccaccatgggctcagagaataaaaaaaatgaaggcttctgtcattgactggggtggagatggagggaagagttagcccagaatcacaggtgctgtagaaaggatacctgagttgccgggagagggggtccatgagttggggatggaaggagagcttggcccttcaaacaattgaagatctgatcaaaagattcagaacatctgtgattttgtggctggtgatgggtgacacctgggctaatggggttgggggagttggtggctctacaatttatggccttgggagatccttgctctctatagctgactgggaggttggaagcctgggctctagcccttgccttgatcctccggatctcattttcctcatctgcctaacaggacagaggggttggaaactgatgagattagctcaaaggatcctggcagctcaggctgcaagatttttttcagacctcagtgtttgggaaaaaattgggtaggtggagcttagggactggccttaggcctgcactgttaattcaccccctcccactaccccatggaggcctggctggtgctcacatacaataattaactgctgagtggccttcgcccaatcccaggctccactcctgggctccattcccactccctgcctgtctcctaggccactaaaccacagctgtcccctggaataaggcaagggggagtgtagagcagagcagaagcctgagccagacggagagccacctcctctcccaggtatgtgacactccccatcccccttcagaggccacacaccctatggcattcccaccatgtgttaaggattttctgaactggaagggccctctgtttgcctgaaggccagagaatcttgaagtggagactgaggcccagaccagagtgtggcctgctcaaggttaaacgacaagttagtgttcatccccctgaactagtacctgggctctagcccttcagtccagagctgagttctcagctcttctagtctggggccccaaggttgggtgtgggggtcatgattgttggtggggaggggtcacagctggactaagacctgaaggtgagactaggcaggtgggaaaggagcttgcagagtgatgctgctcaaaaggacaggaagagagcctggcttcagaagcagccacagcaagagagactactgactgaacaggtgggctccactgggggctggggaaaggattttctcagcccccatccccagcactgtgtgttggccgcacccatgagagcctcagcactctgaaggtgcagggggcaaaggccaaaagagctctggcctgaacttgggtggtccctactgtgtgacttggggcatggccctcatctgtgctgaaatgattccacaaagattaaactggctatcatttgttgatttcccccttcttacatttaatccttgcaggagaaagctaagcctcaagatagtttgcttctctttcccccaaggccaaggagaaggtggagtgagggctggggtcgggacaggttgaacgggaaccctgtgctctaaacagttagggtttgttcccgcaggaactgaacccaaaggatcacctggtattccctgagagtacagatttctccggcgtggccctcaaggttagtgagtgagcaggtccacaggggcatgattggatcctggaatgaatgaatcaaccatgagagagtgaatgaacactggaatcaatagagtagcagagtaatggattgtggagcaggaaagagagctgctgggtgggaattcaattccaggcttatatgagccctgctgtgcagtcggcctggagacagcccagctcaggccctgcctagacccctgtcaaggaggccctgtcaagaggagaggaggggcagcacgggggcaaggcaagc

SEQ ID NO: 5299 - DNA, 6000 bp, Homo sapiens
tgcttggagagaaatttagatttgtaaatgtcaatatgaaaaagaagaataacttaaatcaataagctaacctactaccttaaaaaaaacagagaaagggccaggtgcagtggctcatgcctataatctcagcactttgggagaccgaggcgggcagatcacttgtgctcaggagttcgagaccggcctgggcagcatggcgaaacaccgtctctacaaaaaatacaaaaattagccaggcgtggtggcgtgtgcctgtagtcccagctactcaagagcctgaggtaagagaatcacttgagcctgggaggcagaggttgcagtgagccgagatggcaccactgcactccagcctgggtgacagagtgagaccctgtctcaaaacaaaacaaaacagaaaaagatgagcaaaataaactaggaaaaagaaggaaatagtaaagattagagcaaaaataaatggaatagaggatagaaaaacaccaaaaatcaacaaaatcaagttagttctttaaaaaatcaacaaaactgatgagctttatctagattgatcaagaaaaaaggagagaagaatcaaatcaataaaatcaggaatgacaaagggaagatcagtactgacctcacagaaatataaaggattataagggaatagtataaacaattgtatgcaacatattagttaacaccgataaaacgaacaaattcctataaagtcacaaactaccaaagataacacaagaagtaaagaatacaaatagacttgtgacaagtaaagaggttgagttagtaattttaaaatttcccacaaagaaaatttcaggcccagatggcctcagtggtggtttctacaaaatgttatttatttatttacttattttacagacaaggtctcgctctgtcacccaggctggagtgcagtggcatgatcacagcttcctgcagcctcaacctcttgggctcaagcaatcctctcacctcagcctcccaagtaactgggattacaggtgcatgccaccatgcctggctaattttttttattcttagtagagacaagatttcactatgtttcccaggctcgtatcgaactcctgagctcaagtgatcctcccacctctgcctctcaaagtgctgggaggacagccatgaactaccgcacctggctcaaatgtttaaagaacaattcataccaatcctttacaaactctttcaaaaaataaaaggaggaaatatttctcaactcattctgtaagttgtattatatgagccagtattaccttgttataaaatcggacaaagatatcacaagaaaagaaaacatagatcaatattccttacgaattaagacataaatctgcttaaccaaatattagcaaactgaatccagcaacaggtcaaaagtatatactattactaagcaggatttattccaggaatggaagttggcttagcatccaaaaatcaattgatgttcaccgtattattagaataaaggacaaaaaccacatgatcatctcaattagtgaagaaaaccttgtttgacaaaattcaatatcctttcatgattaaacaaatgctgaacaaactagaaatagaagggaactcaacccaaaacccaatgaagagcatctctgaaaaaacacataacatcatattcaatggtgaaaggctttcaacctaagatcaggaataagaaaaggatatgtactctcaccatgtctatttaaattgtactgaaggttgtagttagtgctattattcaagaaaaaagaaataaaaggtatccaaattggaaagcaagacgtgaaactatttttactcatagatgatatgatattgtatacagaaaattctaaggaatccataaaaacaatatcattaccactaaatgagttcaacaagtttcaggataccagatcaaaatacaaaaatcaattgcatttctatacactagcagtgaacaaatatgaaaatgaatttaagaatatgattcctaatcccagcactttgggaggccaaggcaggcagatcacgaggtcaggagatcgagaccatcctggctaacacggtgaaacgccgtctctactaaaaatacaaaaaattagctgggtgtggtggcgcgcgcctgtagtcccagctactcgggaggctgaggcaggagaatggcgtgaacctgggaggtggaggttgcaatgagccaagatcatgccactgcactccagcctgggggacagagcatgagactctgtctcaaaaaaaaaaaaaagaatatgattccattcataatagcatcaaaaagaataaaatatgtaggaataagtttaacaaaagtaaaagttacaagtaaaagacttgtaactataaaacattgttgaaagacattaaaaacctaaatacatagaaacaaatctcgtgttcatcagtcagaatacttaatattgttaacattgcaatactctcccaaactgatctacagattcaactcaagagctgtcaaaatcccagctgtcttttttgtagaaattgacaacctgattctaaaattcatatggacatgaaagagatccagaatagccaaagcaatcttgaaaaagaaaaaaattggagaaataacacttttcactttcacaacttactacaaatctacaataatcaagacagcatggtagtggcacaaggagagacatatacatcagtggaatcaaactgggagtccaggtttttgacaagggtattaaaacatggggaaaagaatagtcttcaacaaatggtgctgggacacaactggatattcatatgcgaaaaaaagttggacctttatcttacagctttacacaggtgtaatacacttgtataaatacatctttatacaatattaaaaacaactcaaaatagatccatgacctaaataaacataaaagcaaaaatgatgaaagtctttgaagaaaacctaggcaaagagtttcatgacattgaattaggcaatgagttattgaatatgagaccaatagcacaggaaacaaaagtaaaaataggtaactggactacatcaaaattaaaaacttctgtccatcaaaggacaatcaacaggcaacatacagaatgggagaaaatatttgcaaatcatatacctgataaagggtgaattcagaatacataaaagaatactacaactcaacaaaaagaaaactcaattttaaaaataggcaaatgacttgaatagacatttctccaaagaagatatacaaatggctaataagcatggaaaaagatgctcattatcactaattattagagaaatgtacatcaaagtcacaatgagatatcgcctcacactcaacatgatggctactataaacccaaaactcccaaaacaggaaataagtgttgatgaggatgtggagaaattggaacctttgtgcactgctgatggaaatgtaaaatggtgtggccactacagaaaacagtgtggcagttcttcaaaaattaaatatagacttaccatataatcctgcaatttcacttctggatatataccaaaaagaattgaaagaaaggtcttaaagacatatttatatgcccattttcatagcagtattcttcatgatagccaaaagtggaagcaacccaaaggtccattgatagatgaataaataaagaaaatgtggtacatacatacaatgaaatattacccagccttaaaaaggaatgaaattcggatacaccttacaacatggacaaatcttggggacattacgaaaagccagtcacgaaaagacaaatattgcatgattccacttggacaaggaacttacagtacagtagcccaaatcacagagacggaaaatagaatggtggttggcgggggctagggaaagtgaaagtggggaatcgtttaatggatatggagtctcagttttgcaggatgaaaagtttccaagattgattgcaaacagtatgactatatttgacactgctgaactgtaccgttagaaatggttaagatggcacattgtatgtcacgtgtgtttttaccacaatttttaaaaggccatcaaaaattgcttaattatgttttcagaaatgccagatggtaatatattgctgtttaacatatttgagacaattttaatttttctgtgacccttgacttctatacctcaacttttttttttttttttttttttttttgagatgaagtctcgctctgtcgcccaggctggagtgtagtggtgcgatctcagctcactgcaacctctgcctctcgggttcaaacaattcttgtgcctcagcctcccaagtagctgggattacagtgcacgcacggcaccacaccccactaatttttgtatttttagtagagacagggttttaccatgttgtccagggtagtctcgaacttctgacctcagtgatctgtctgcctcagcctcccaaagtgctgggattactgacgtgagccaccatgcccagcctatacctcaacttctacctatgtccacctggctgcccataaattaacccaatagctgtcacttaagcctactcagtatgtgccaggcttttccctatacaattgtgaacaattttctagtgagcaaactgaagctcagtaaggtccagtgacttttcccaaggttgtgcaagagatggagctctcattgggtcccattggcctgaccctaaagcctgggttcttttccaccagacctaatctccatcgagctggccttatcctaagaaccacttggggtatctataaaatccagatgccccctggtgatgagcaattctctagattttgatgaaagttgaatgtgtggatgctggaatgagtaaattaacaagtaaggagatgaatgcaagcaggaatgactaaatggacagactcagggagccttgaagagggtggggtctggaagggaaggaagagaggaaggagaatagctaagtagggagatttcactcagtgcttaccagagcgcgttgtctaccctgtaccgaagacagaggctgtggggacagcctaggggcctggatctattgcctacttagagagaggccaactcagacacagccgtgtatgctcccagcagcaacggaggttcaggcaagatgcccgaaggagggaagggtgacaagggcagtggggagacttggagagtttgtgcagaggggaggaacacacctttctttctgtattgtattgtattgtattgtattttttgagacagagtctcgctctgtcacccaggctggagtgcagtggcacgatcttggctcactgcaacctctgcctcctgggttcaagtgattctcctgcctcagcctcctgagtagctgggattacaggtgcccaccacctcgcctggctaatttttgtatttttagtagagacggggtttcatcatgttggtcaggctggtctcgaactcttgacctcaggatccacccacctcggcctcccaaagtgctgggattacaggcgtgagccactgtgcccggccacatctttctttagaaagatcatgctggctcctgtggggaaggcaacttgaaggggaagaaattggaagagggaagacttgacactaaacatagagccatggtcagtaagtttttggagggacctttaccagagagggagaggaagcagtatccattatccactctttagtgacagagcccaaaggaacagctctgtaatggctgggggtgggggcaagggcagcaatgaacagaggaggcgagggctgctcctgttgttgagtgccttccaggacactaagtgctggtctggctgctccaacatgggaaactttcatgttgtctctcagatctaagggtctctctgcatttttaaaaaaattattttgaattttttaaacttctatcgtttttcaggtggttttggttgcatagataagttctttagtggtgatttctgaattttagtgcaccagtcaccggagcagtgtacactgtactcagtatatagtcttt

SEQ ID NO: 5300 - DNA, 6000 bp, Homo sapiens
tggggagtggggaaggggcccatctctgagtttgtttctcctccctgacccatttcctggttcctgcacaccaacaccctccccaaccctcatcacaaccaggtagggtctaggaggcagctcctggcagctaccccagtcaccacagatagagtcacagggctccatccatttgtctgtcccagcccccagaggggcctctgtggtcaggtctttgtgtctgcacagtggccctctttgtcctgagcagcctgtccccatcccacctccctcctgcgcttctctctctcctgcctgggtcacaaaaagcaccagcttcgaagagagccaggccagaactctgatcttggcttcccccactgagtctctgtgtgaccctgagcaagttactttgcttcatggatttttagttttttggttctgtgaaaaagagctgttgtaagcaatcaaactcctggcaaggagtttggcctgccacccggtgctgagacccagataacaaatcatgaacttggagactcttacctcatcctcatgctgttcactggacctcttaccaccagctcccacctcattctcaccctcacccttttggccagtggctaccattctcccacttgacagacaaggaaaccaaggcctgacgacagggctgactttgtgggcatgtgacctggacagtaagggtcatgatttgaagtgttaaatactctgctatcaccatcttgaaattcttaattttttcttattttttcattcttttgttggaaattttaaatttttgaatgaggggcccacattttcattctgctctgggtcccgcagattaagtagctggtcctgcttgaggggagatggaacagaggcatgcccaggcctggactaagcttcctgcatcccaggcggcctcacttgggtgcccgcatcctggcatgctgagagctagagtttccaggctgcgtttggcatcagagccctggaccctgcccaggaaacctgaggagcacagttctcggctggcaagggaagggaggatggtgcaggtcaatgcagcagttcagggagcaagtaagacaaggctgctagagccagcccagccctgtgtaactggagctgccagtgtgggtcccaatgccatgacccagccataactctgggaactcagcagggccttccttcccatcaggctgcaattctggggccaggagacccaccgcagattcactgctttggactttcgcttcccctttctgaacctgtttctctacatgtcacatgagaataaaataatgcctatctcacagggttctggagaatattaagcgagataccttaaacttaatgactagcacaaagaaggtgaccactaaaatagagttcttactcattcactcataatatattgtgacaaatgttcagggacaggggtcaggtacggtggctcacgcctgtaatcccaggactttgggaggccaaggcgggtggatcgctttaggccaggagttcaagaacagcctggccaacatggtgaaaccctgtctctactaaaaatacaaaaatcagcagggtgtgatggtgcacacttgtaatcccagctacttgggaggctgaggcaggagaatcacttgaacccaggaggcggaggttgcagtgagctgagatcacgccactgcactccagcatggatgacagagcaggactccatctcaaagaaaaaaaaagaaaaattattcagggacagtgctaggtgttggccatttaattgtgaacagaatggaacctggctctgctctcagagagatccctgttagagggggagacaggcagtgatagcaataacagcatggtaagtggtggggcacctggcctgggtcttcgaggacccatggtggggagccagaagcagggggcactgtgggcagagggagcagcaagaggcaacaggaggctggtcagaggtgagaggtgaggcagagaggcagggaggctggagtggcaggctagagagctaggctttatccagaggatggtggagccaccagagagtgtaaggcagggtatggcatcaaggggcaacagagacaccactgtaccctgggaaggggggattggagcctgggccagggcagaggcttcatccccagcatgcattttcagagcaagttttcccaggggcaatgagagaagttgagagaaggaggatgaaaaggcctgaatgagccaaatacctcctcagggctggagagacaggaagcctcctaatacatgggagaagctgaggctggaactttgcccttcccctcctgatctgctactgctaatggaaccctcctcccgcccccatggttccattacccacctccaggggaccattactgtgcctgggccttcaccattagcctgccttggctgcttggttccagggagactccctcgatgctattccagcctttcagatggcctgttgtgtgacgctggctgtgtctcaatttccggtttgatcaatggttttacattacttcagccacaaaatctttcatgtgcttgcaacaaattcttaccaggaaatgtaaataaataaaaatacaaaggcaaaggtgctcaagttgaagtgggatgggagttccccaggcagccccaggtaagggggactctgttgggggatttgaagcctgctgggcttgatggcctctgaaacccagcgatgggactgcctggggaggatgtcaggagacgaaacttctaggccctcattgcatgggatactaacgccttgagcccagacagcttgggatgatgaataaaaccatgaaaaaagaatttaaggatagggtgcaggggctcatgcctggaatcccagcactttgggaggccgaggcaggaggactgcttggactcagcagtttgagaccagcctggtcaacacagggagatcccatctctacaaaaaatttacaaattagcccggcatggtggcatgtgcctgtattcccagctacttgggaggctgagatgggaggatcccttggccctgggacatagagactgtagtgtgctgtgatcatgccactgcactacggcctgggtgacagagtgaggccctttctcaaaaaatttaagacaggccagcaagtgagagattagtattactcccttttgcaaaagaggaaactcaggctcagagaggagtcataggacaggtgaggtaagactggaatctaaacccaaggctatggggttcaaggactaggccccttcctctgctcctcaagcctcactaagtcacctgtgtggtagctgaaacgctgtatgtctcaggaatgcagtttcctcagctgtaaagtaagggaattgggccagagcaggggcagagccctgggcaggccaccaaccagatttgcccgctgaaggctaaggtcgagcctgggtcctcaacttggcgtcaaagaaacttgtttctcctgggctaaatggcagtgacagtataaggtttgaagttttggaagaggggagagaaagagagggttggctggagttccagtgcccaaagggtcttccccacactggaacctgaaggcctaggccctataactcgggctatgaggatacttaggtccctggaaggtgcgtggcccagcttagacaataggcgcaggaggctagacaaggggcctttgtgtctcccaagcaaaggccccagcaggactgcagaggcggctcagccactatgggctgtgtgtccactctgctactgctcctggtggggctgcagccagcacccttcctggcagccaggcccagtcagctgatatggagcccaagagggcccaaggccccgaaggcccggggcaagttccttggctacaggaagaggcctcctctgcacttgtccagccagcggagcgattggctccatttcacaggaaagaagaccctgccagggaatggaactgggtcaaggtctcccagagtcagtgctgaagccagacaggaacctacactcctgattcctagaccagaaatgagagagaggcggggtgctcattcattcatccattcacaccttcaaggattgagcacctcccaggacctctaggacagcagcaggaagaaggcagacctggttcctgccctcgggagctcacagtctccgaacgggtcagacatgcagccggtagcccgaccagggaaggccattagagtggggttgacgacagagaagagaggtaaagcagctcaagataaggggccagagtggggagttcagggagctgctgataagattaaggcagggaaagtggggagcacgggagaggcgggatcctgagtaccctgctttcctaaccacggtaatggagagaggcacccccttcccccactttcaagcaagggaggtacgtccttagcctggggttccgagcaggtatctcccagtaggtcccttcctggccagccgggctggggcaggggcgggacaggggtagggtggcgcggtggctgggcgcaaaggtcccgcagtgggccacgcaggcaccgggctgacctggcaaaactttggcgtctctgaaaacctctggtaaccagctcccttctagcgtgagggagccgggaggcctccttctggcccggcagtgagagcgtcgccgcccgaccctcccgttgcagcaccggtacagacacgctgaccccgcggccttgtcgctgggcggcgtcccggagcgggtggcgcggtgtctacccgggcgggttgagggcggtgccagggtcagtcaaaagtccgccccgccccctgcctggcccggcttcggggttggggaacagcgcagggaggtgggtagccgggctcccaggcacgtgggtctctgcggctgcggcgggacccgggcactggcacccgggagcggcggcgacggcaccctgagaggagaagcgcagcgcagtggcgagaggtggggtggggcgtctggagggaacaaggcgctgggagaggcccggggaagcggcgggccagactggcgcaggtgcggactgggcgcggggcaggggagggcgctgtggagcggctgtcgccccggggcacagttgcgagccggcgtgtagcgcataactggacggcttgaacgcgcctgtgggtccgtggttgaactttgtctccacgggagcgtcggtctcggtgagtgtggacgggcgccccagtagtgaggctgtgcgcgtcagcgtactggggaggtctgcgtgttagcgggtgagtgtgtgcgcccctcggggcgactggccaagcctgcggaacttgtctgtgtgtgctccgatgtgagcgtccccgtggcgtgaggcggtggccggtgcccagagacgcgaacccctggagaccccctaccactgtcctaaccccagggtcactctgggtggccacctaccattggtaatgttgagggggcagttgcagggagtgggcgggggaggagggagtggccagaaaggacagttaagcctctgtccccgggcttttaatctggcaaatggtgcggtagaaagggtcagtcaggagaaaggcgataccccaccccccaacccgaaggctgccagtggccctcttggggtcctccaggagcgcagcccaagggttggggactgctggagaccagaattgccagctcgggatttgtggggtccatggctgctgttcctctcagcatggcatccccagcttcccaggaccacagcctgatctgcctggtttgttttggatctaagctgaaataattatgagttttgaggatctgggtggagacccaggcaagtttattacctgtgggtggaagtggaaggaagaagattctctgagcagacaggtccacaagagagctctggagactcagagatctatgttccaatcctgtcttggccactgtgtggcctgggcaagccgtcctttctctgagcctcagtggcctcgtctgtaagaagggactaatgataaggaatttgagggctgttgag

SEQ ID NO: 5301 - DNA, 6000 bp, Homo sapiens
ccagcataagtcagctttctaaaacacacctctgggcctctccccaggtcccaccctgcttaaatcctaccatggttcccattgccctcaggataaaccaagcttcccagcctggcatcgagaccctgaaaggactggtccctgccctctctacagctctcttatgccactcccctcttccactggactgcccagtaggactgaacttcttgaggttctcagagttggccatgatcaaccccacctcctggtcttcacaagctgtcccctcttgtaaacaggaacatcttcctcctactttacccaaacaattctagttgttcttgaacacagcctaagacacaacttgtgccttaaccacccctgttctccctgctctagggctgggtgggctgggggtccctcagagctcctatgtatcttcatgtctctctggcccaatgcccaccaggttctggtctgttctcctccacactgggcatttctgaaggacactagccatgaacaactcatcttttttcttccccgggcctaggcacatagcaggtgtcagagaataaatgagtgatgatgatgactttaaatctccaaagaattatgccctggaaaaactccttggctggtggaggagaagtgtgaagaaaaacaacaccaggccagagtgatcagggtgttacaaaggccaacacttggacttgggagcccagaggaggcctcagccctgactggcagagaggtagccagagaaggctttggaggggaggtggctcctctgtgtgctggccctgcccatcctctttgtctttgcagagtgtgctagggagctggggagtcaggagggaaatagaaagcagcatagatcccacacaatctcaccccttccttttcctcaaaggtgacctctaccctggtggtcattcttacacatgcctttgtatgatttctacattattgtatagaaatatacaataattaaaactttatgtgcatagtctcatactgtgtgtatcctatatatttcttttttggtcacattatgcttgtgtgattttagccttcttgatgtggttgctcaagtttattttttgtctgctatatagtattccatttaagaacatacagtcacttttactgttagaatataattcattcctataatcccagcactttgggaggccaaggcaggtggatcacgaggtcaagagatcaagaccatcctggccaacatggtgaaaccccatctctactaaaaatacaaaaattagctgggcacggtggcgcgtgcctgcagttccagctacttgggaggctgaggcaggagaatcgcttgaatccaggaggcagaggttgcagtgagccgagattgtgccactgcactccagcctggtgacagagcgagactctgacaaaaaaaaaaaaaaagaatataatttatttctgataacaaatttgtgaatagtgaaagcttatattcccagaaatttaaaaaggaaaaatgtgtcaccagctcatcctaagaccctaattttccccaaatgccattaaaatttttaaaactattaacactcagcaatgatttctgcacagtataaaactacactatcaaatatgatatctgttagtcacataaggctatttacatttaaacgtaaattaatttggagttaaaaattccattcctccgttgccctagacacatttctacatgtggccagaggctaccctactggacagcagatataggatatttccatcatcaccaaaagttctaaagcatttaaaatactgactacttcattatctaataatgaatgtgctgcattttctcactcacagaagcgctcccacatatggtgggtgaggatgagtctcacatctctcacataagccaagcttacatctttcactgtccagccctcccaatgagctttgttacatccacattttcttctaataataaataggcttttctaggtctttcaggctcaactactttcttctcaggcctttccactttcttagaagacaactatacttaataatgaagggaagaggctggcatggtggctaacgcctgtaatctcagcactttaggaggctgaagcgggtggatcgcctgaggtcaggagtttgagactagcctggccaacatggtgaaaccccgtctctactaaaaatacaaaaattagccgacgtggtggtgggcacctgtaatcccagctacttgggaggctgaggcaggagaatcacttcaacccaggaggcggaggttgcagtgagccgagatcatgccactgcactccagcctgggcaacagagacagactccatctcaaaaaataaataaataaataaataaataaaaataaaaagatacagtgctgtgatgtacatctttatacatgtgcaggggtttctcctgattatatgccttgaagtggaatggttcagttttaagctatgcattttcacttttcctagatattgacagattgttcttcaacttggttgtgttcccagcagtatgtaaaaattcctgccaattcaaacaaagtgcgtttggtttcaaccaaataattggtttcaacgtttgctgaataaccaattattggttgaagccaagccaattttgttttaattgagtagaatcagcagaatcaggagcacttctgtatgtgagaaaacgcagcacattcagtgttagataatgaagtagtcagtgttttaaatgctttagaacttcctgtgatgacggaaatatcctatatctgctgtccagtagggtaccctctggccacatgtagaagtgtgtctagggcaatggaggaatggaattggtttcaaccaaaccaattatcaaactttaaaaagtttgataatcagatatgcatgaaatggtatcatttcatttggttttaatttagatttccctggttgatagtcaggttgaacatattttcttatgtgtattggccataattgctttcttttctgtgaaatgcctgttcatgtctttcaatcatttttctgttaggttgtttagctttttcctattgacgtataggagttatttttatatactggataataatcctttgttacatgcattgcaataatctccagtcggtagtctgtcttcttgcttttttccttttttagtgtttttgtacaaacataactttttattactctgagcttattaatattttcctttacaattttctttgtttttgctgttgttgtttaaaaaattgttccttaatcctggcagatagtggaaatccaacatttgctgaataaaaggagaataaggagaatgagtgccttccccagggagaacgtgcagagtgagcaagaaaagggtggggcagaaccctggggaggacagagacagagctacctagggaagagtgtgaagtggaggaagaacaaggaagggagctgtacagcccacatggggaattttgaaagtgtccggtggagtgactaagatgtgtgcattgcttcagagacatggaggtcactggatacttggcagggccgtcttgtagttgctacaggagctgagaccggataggtgggcagggcactgcagagaagagtccaagaattgtcacctctctcaagaacattgacagtgaagggaagacctgtcctgtcttggggcctcagtgtactttctgcctaggattctcttccccttaccttcacctggctaagtctaactccttctcctggttcagcttaaatgtctcttcctctgggaagccttcccagatctctcagtttaaattagatggcctctttccccatgacagtctttcatccagttcttgacttttccttcttagcagttaacacaatatgcaactatgtatgaaatttgtgtgactatttgtttgatgtccgtgtttcccactagattaccaactccacaaggcctgcactgtctggaatgttgttccagtgcaccctcagtgcctagcacacaacctggcacagtaattgttgaataaaaagccacaatgggggctgagaggaggagctggtttgtatctggggacagcagatccaggaggtttcagagatgagggagtcagaggtccctgtccaccagccagattttaggcgataaaagggaaaaagggaaggagagtgacagttaggaggaacactgacattgatgagacaccaactgtgtaccaggcactgtcctgacaccatcctgagcatcactcccatccccactcccatctttagtgtgatgtcccactagctgagtgacccagagcaagctaatctccctgagcctcagtttcctcatctgtaaaatggactggtaacaccaagctcctgggattgttatgaagaggaggaagcagggtatggtgtggaaagtgttacaaacccacgcttcaggggtacttggattctggagtcagaccacctggcttcaaatctcaggtctgccacttaccagctgtgtgaccttgaacaagtcacttcatttctgtgcctcagtttccctgcctgtaaaatatgagtaataatacctccagaattgctatgaggattaaatgaggtatgcattagaacaccttagcacagtgcttggcacatagtaggtgctcaaggaaataataattaaaattattcctccctcctccccactatcccagaactgcagaatgtcagagctggaaagatgggagaaatcaccatttgatacccagcccccccccacacacatatcaatacaaagagggaaactgaggccagggaaaggtaaagtcgtgaaggattctggactggagtccaccggtcccaggtcccagaccaggagcggtccccagaggcctgcagcctcttccagacatcacctccccgtcatcccacgagggcgggccgctgggcgggactccagcggtgcggaggccgcttggccacagcccctccctgccgctttgctctggctcctctgggttccagggacgctggggccggagctgctgccgccgtctacacggtcccctcatttgacgggttcgcctcctagcagcgcctgggcgagtgacatctgggccggaccagctggtgctgcgcggcgcaggtaagggcgtgcgcgggcagggacaggggtaaggggtgccggggcgcggggatacagggaggcctgcccactccagggtcgcggccagtcagggcgggtgccgggggtgagtccctgcatatgtgtgtagtgtgggcaatgtgtaaatgattactgtgagcgcgatctgcactccagcctgggcgacagagcaagactccgtctaaaaaaaaaaagaaattactgtgagcaatgggttaatgggttgtatgcggttagtgtgcggtatgtgcaaggtgtgacccatggatcacagtgtgtgtctgcctgcaagaagtgtgcattgcaactctctatagctctgagtgactgtgctggggtaacacaggggtccacggtgcatgtacactctgtggcgggagccatggcagggtggtgcactgggtgtgcgttgtgtgaattgtgaggtgtgtgttttgtgtggcacatccgtggcccctgtggtgtgctgagctgggtgatggaaggtggggcacatttgtgcaggggtgacactgacagaatgttttccgtggtggctctgccttttccacccagtgcccgggagggcttgggagagtgaaagctcacccggatctgggtggagaaagtatgacaggtcccaggctcaccctctcacacatacaaacacatgcacatacaagagaagctgctccgaaatctcatttttttatcttccaaaattcctgtggattttgcattcttctataatatttctgcatataaaaacactgttctgataaattaccatccaatgagttggctcaagtcttggaggtaagctgggtttatcttgtggtgggaatcccctgcctgtctcccaaactgagatgtaagaacttggactcagca

SEQ ID NO: 5302 - DNA, 6000 bp, Homo sapiens; identical to SEQ ID NO: 3608

SEQ ID NO: 5303 - DNA, 6000 bp, Homo sapiens
ataacaagtgttggctaggacatagaaatatcggaactcttagaggttgttgatgggcgtgtaaaatggtgcaatcactttgaaaataatttgacagttcctcagaatgttaaacgtagagttaccacatgacccagaaatttcacacccaagagaaaataaagcatatatatgtccacacaaaaatgtgtacacaaatgttcacagcagtattataatagctaaagagtagaaatcacccaaatatctatcaaccaatgaatagataaataaaacacgatatatccataaaatagaatattattcatcagtaagaaggaatgggccaggcgcagtggctcaggcctgtaatcctagcagtttgggaagctgaggaaggagggctgcttgagcctaggagatggagacaagcctgggcaacatagcgagactcggtctctgccaaaaatacaaaaattagccaggtgtgatagcatgtgcctgtagtcccagctacttgggaggctgaggtgggaggattgcttgagccagagaggttgaggctacagtgagatcgcaccattgcactccagcctgggtgacagagtaagaccttgtctgaaaacaaaaacaaaaacaaaaacaaaaaacaaggaatgaaatactgataacatgctacaacctggataaactttgaaaacattatgctaagtgaaagaagccagtcacaaagggtcacacattgcatgattccatttattttttaaaactatttatttatttagaaacaaggtctcactctgtcactgagtctggagtacagcagtgcagtaacagctcactataacctcaaactcctggcctcaagagatcctcctgccttcacctcccaaatcactgggattataggtgtgagccaactgcgcctggcccatgattccatttatatgaaatggccagaataggcaaatctgtacagaaagaaagcagattaattttgccagggacttggggggaagacagattgggagtaactgctaaagactatagggtttcttttcttttctttttttttttttttttgagatggagactcgctctgtagccaggctggagtgcaatggtgtgatctcggctcactgtaacctctgcttctcgggttcaagtgattctcctgcctcagcctcctgagtagctgggattacaggtgcgcgccaccacgcccagctaatttttgcatttttagtagagacagggtctcaccatgttggacaggctggtctcgaactcctgacctcaggtgatccgccacccttggcctcccaaagtgctggaattacaggcgtgaactaccatgtctggcctagggtttctttttagggtgataaaaatgttctgaaggccaggtgcggtggctcacacctgtaatcccagcactttgggaggccgaggcgggcagatcacgagctcaagagatcgagaccatcctggccaacatggtgaaactccatctctaaaaatacaaaaattagctgggcatggtggtgcacgcttgtagtcctagctactcgggaggctgaggcaggagaatcacttgaacctgtgaggcggaggttgcagtgagccgagatcacaccactgcactccagcctggtgacagggcaagactccatcaaaaaaaaaaaaaaaaatacccactgaattttttactttaaaagggtgaattttatggtaggtgaattacatctcactaaaattatcactttggccgggcgcagtggctcacgcctgtaatcccgctctcagggaggcaagaggcgggaggatagcttgagcccaggagttcgagacctgcctgggcaatatggcgagaccccgttctccagaaaaaggaaaaaaaaaaaaagacaaaaaaaagcgtaaaattatcactttaaagtgttttcttttctttttttttttttttttttttgagacggagtttagctcttgttgtccaggttggagtgcagtggtgaaatctcggctcaccacaatctctgcctcccggttcaagcaattctcccgcctcagcctccctagtagctgggattacaggcatgtgccaccacacccagctaattttgtatttttagtagagatggggtttctccatattggtcaggctggtctcgaactcccgatctcaggtgatctgcccgccttggcctcccaaagtgctgggattacaggcatgagccacagcgcccggccatttaaaatgttttcataagcacttttacttttgctcaaattgcatcttgatataaacttcaagttttttaaaataaagataatataaattattctcattatattatactctctagaaaatgtaagtagtaaatttgaatttgatgagccagtccactatttcctaaacaatgtattatctgtgggctgttcattcaccagggacacttgaaatggcaaaatcttttcctctctgccaatggttctgtgcaccatagccacaaagaaatgtaaaagttacttgttggcttattagtctcaataagttttagttgattgaacaaacaaagtctctcacagccaggactgctgcggctggaattcctgacatactgtcatacctctcactcgtcaatctacactctcctcccatctacacagctctggaaattaaaaacaatccaaccatgactatcatggcttcagaggtctatgaactcccaggaattatacgcagattttttcctgaggacagtctacacttccttattggcttctcaaagagggtcactgaccagcttttagagacatgggccaagtccggctacgtttagattcggtagtagtgtctgtggttttagtttgccacgtcctttcctctttttttcgtcatagtgcccgctctttgggaggtaggggagagtcttcccctgaagtctccactgctgctggagaaccttcctttttcatctggttgctaaatccagagaatgaaatctaggagatgattgcaccgtccccgcccctcaacatgaaggatgccccactgcccatcggggaggggagcagggagagctggagagaggctgggtcggggcaggacccaggcgcagatcctccgaggccagctgcagccctacctacctgccttcccgtctttcccctcccttcttttctccttctgtctttccttccttccatatctctttccttgcctctttccccctcccactgcttcctttcttccttccactgtggaggtggaaaatttagctaggagaagctgggactgggacgttccaggaaccagacagagagtgagttaaaggcacagagatgaaaacgcggtatgggagagctggttcttgagtcggctaagaggggatgaactcaatggttaataggattggccatggcgaatccctcagcagggcacgcaccgcacaaagggccgaggagcgagggtagctcgaggtcaggattacagagactcaggagcaagagaggaaggcttaaagagccagactgcgcagccaggactggggtgatgggcgctgtcctgccaggccaaagaatgaagatgtagccccgcccccaacctagggaggaggaccagcccggttcctgtcctgcccccgcaacctcgccccgattccactccgggaacctcggcgatgctgagccaagaccacttctgaatcagggatgacttgtctagtgaacctagggtcagagccatcagttggaaaggctgggaggagcctggagaaagagggcgaccttccttgggatctgtgcgctccctccttgcctccccctccagcctcccacttggtagcaccttcctgatccccttatctctaaggcgctcagggaaatgccccgctgcgggagccttctgggaaatgctgccctggccacccaggaaccatgagccctgcagccccggtaaggaagagttctctgggacaggaggaagggcccagggcagggtgggcacccttgccacataggggacgggacagaagtcttttaggccctgacatcctctggtctctgaatgacatcctgtggctgctggtaggtgagggtttgcggggctgagctattgaaggaaatgatcacagtccgaggtgatagatacagaaagtcttcctttctccaggtgggctcccgccagtccattcttcactgtgccctagaggggcctttccgaccccctaatcacacacctcactcctcatcttgaaactcccacccccagctccagtcactgcgtcctaacatccaagctctccgcctgtcatgcaaggcctctgtgctatttctttccaaaccctgcagctctatcgcctgacactcccgatgccctccccacccctgcgctttatgttctagacacacggaaatgctgggcactcttcaacatcctgacagtattcataggggaaatttcgggtcgcctaggaaactgcccctcatcctccaaggcccctttcagcctcctctgggaagccttcctgaaccccttgagaaaagtcaggctcatcttttccattgttaaatcacaccttgtgctccaattgtgtgtttccatgtaatctccctcactagactggaagctggggatggaaaggggaagcatcaaaaaaacatgcaaaactaggagcttggcttctccttgcaactttactttttctttttttctaggaactgagttcaatgattcttaagaaaaagtatttcatgataaatgagtgaacaaatgtcttaatagaaaagtaaaattgcaggcggggctgcttctgcccagctctacaggggtagactacaagtcccagtacgcctcgggtcagcatctcttcacgtcactccccctccctggggtgggcaggtccggagggcggggcccgggggcagctgggctctcaggcgctgcgggaggagagaaatgccccaggctctccggggcacacaaagcgcaggcgcagcgggttgggtggcagcagcatcgagtagcggccgcttaggcagcaacatccgcaacaagtgtagacaaggtgggtgcatcaaggggaggggctggaaaaggagtctgcacctgaccctcttgtctgatctgtgtcaagaccgtggagaggggagggagcggcaagaggaacagacaaggctgggccttccagcccaggtgtgccagcccttgttacgcagcaacaggtgtgagcaggtgggggaggggcggaggcacccgctggcaagtgagtcgccctcaggaacagagggcacctacctggattccagtgcaagctacatcatgtacatggatgagtcatttgctaaccctcagtttgtccatctgtaaaacaggagtaaggattcccttcctaacagggttagagtggggacaaggtgagggagtagaatgtgcggtgacgtccaaacttagctgtacattggaatcatctgaggatctttgaagagtatcagggcttgcctcctgccctcagacattctgatttaattgttacggagtgtggcctggtatcggaagttctcaaagctcctgccggcataacggtttgaagccaggactgctgggtgtgagtctgggctccattgcttactaatcaagtggccccgtgcaactgactggacctttccggcccccgtttccccatctctgaaataggaataataaggactgcagggaggcttaaatgagataatggatgaaagcactgatagggggtacccggacagagtgctcggtccatcacagctgctgttgaactgctctttgaagcactttgtaaacagctctagtggggtccaaataggagggagcttttccctcatccattgccgtgattctaatattctgcacttccacattacagaatcccaaggtttctaatactttaagagtctcatgctccaccgactgagctagtcaggcatattctaatgtttcaagagctcctccctccagcctctgcctgcctcacagac

SEQ ID NO: 5304 - DNA, 6000 bp, Homo sapiens
ggcactcctaggaccaagacatatatatctgctacacacgcacacacacatatcctcaattagactctaaaaccttcctaagaaagggcaatatcaatggtagtcatcaatttattcctaacaaagcacctaacataacagatgttatgacataacagattccataaatatttgtggaataaatgaatcaatgttggtacctcctttggtccaacacagggcactatgagtttcctgatccctgattttccctgcaaagggatggaggcttgtcttatgtattcctacaacactccatacttcgcctagtatagcacttatgactttattataattgtttgctcccctcatcaacttctcacctgttgtggggcctataattaccttattcacctgtgtaatcccagcatgtagcatagagcctacgactcactaaaaatatgttggtaagattaatggatagatggatggatggggacaaatttatattcagtcaatatgtctttcaggaactctctctcatgaccaatcacacacatctgctagaggtaaatgaaagaatgaatgagtaacttgctggctggaaaatgttagatgtgatgtaatttgctggctggaaaatgttaaatatgatggctgttggagaagccttcagtaacttacagaatatggtgacctggcttcaggtctccagagtacttacttgatctttgactttgggaatggccccttaacttccttttttttttgtttcttcacttgtttctttgcctgtaagataaatattatattccttcttagcctgctattcagagctcttgaacttcctcattaattatattctactgtgagccttccactccaatatttgtcttgcctttagtccttgcccgtaggactaaggatccaagaaacagatagataccaatacagagatggagacaaagacaagacatagatgggaaggtggtataggagaatataattatgatagtggggtatggctggagtgcttaaatcagacacacgaagcacaaacctgaaaggacgggatcgtttacatgattatttacacaaaataaatttctgccagataaaaataggaaagtcaaagttgaaagataagacacagtctgggaaaagatatttgccatgcatataatacaaaagatgactcacactgaagcctgtaggaggcatgcagacctggatgctatcgcagaaattctagttccctattaggaatattaggtgagaaggtgtagatctacaactaatgggccaagaagggcacataacccctggttacattatctaagacaagtaagatctttatatggtagaaaaaaaagtcaaagttccagatttggaggctgacttcctggttagctttagttacctctggtctccatctcaaacttgatgcagctaatgccaatctgactgtagcgcttcctccaaaacaaacatctctctttctctctctctcacacacacacacacagagtaaggcatatttttgcttgttccattcctttggcctatcacatttctgcccctcttccttgcccggctacatacagattagctttcctgtatctccctctccttaggctgagcctcctcaagcccacttctttttttatttattttttctttttttcttgagacaaggtctcactctgttacccaggctggagtgcagtggcatgatctcagctcactgcaacctccacctcccagactcaagcaatcctcccaccttagcctcccaagtagctggaccacagacgtgtgctaccatgcccagctaaatttctatatttttgatagagatgggttttcaccatgttgcccaggctgcctcaaactcccaactcagcctctcaaagtgttgggattacaggcgtgaacccccttgcccagccatcaggcccacttcttaatggaggcactaacatggttaggctttgtgtccccacccaaatctcatcttgaattgtaatccccataatccccatgtgttgagagagagacctagtaggaagtgattggatcaaggaggtggtcccccatgctgtcctcaccatagtgagtgagctctcacgagatctgatggttttataactgacagttcctccttcacactcttgccctctcttgcctgttgccatgtaagacttgcctcttccctttccgccatgattgtaaatttcctgaggcctccccagccatgcagaaccgtgagtcaattaaacctctttcctttataaattacccagtcttgagcagttctttatagcagtgtgaaaatggactaatacaggcactataccacactgtattataatgcctgcttccttgtttgttccccacctcactacaggctgtgagtatctccaaggtcaggtcaggcctgggtcctacttacctctttttctttttttttttttttgagacggagtcttgctctgtcacccaggctggagtgcagtgtcgctatctcagctcactgcaagctccgcctcccgggctcacgccattctcctgcctcagcctccctagaagctgggactacaggcgcccgccaccatgcctgggtaattttttgtatttttagtagagacggggtttcaacatgttagccatgatggtcttgatctcctgacctcgtgatccgcccgcctcggcctcccaaagtgctgggattacaggcgtgagcctgtacttatctctttatcctgcatctcacacaggacctggcctactgaaggaagagtctcaatgattgttaattgaactaacccaacccatgaacaaaatgccacaggagcacttcatgcagtgggtgaagaaagaagaagcaagtatcagaaatagtttcacagggtaggtgacattaaagctggatcttgaaagatgagaagttggcctggtgtggtggttcatgcctgtaatcccagcactttgggaggccgaagcagacggatcacttgaggtcatgagttcaagactaggctgtccaacacggcgaaatcctgtctctactaaaaatataaaaattagccaggtgtggtggcatgtgcctgtagtcccagctacaaagactacagcttgggaggctgaggcacaagaactgcttgaacccaggaggcagaggttgcagtgagccaagatcccaccactgcactccagcctgggtgacagagtgagactctgtctcaaaaaataaaaaataaaataaaaagtgactagggcaatgctgtatcatctcactttattttaaataaaagaaaaatgagaagttgtaaaagataaactgcaacaacaagctacaggggatctgactagtgtccacggattgcttcacagaggtaatgaaatatcatctgatgttattgctatttagtgatatttattttctttttagtaataatttagttatttagtgataattattttcttttctttctgatctcggctcactgcaacctccgcctccccggttcaagcaattctcctgcctcagcctcccaagtagctgggattacaggtgcccgctaccacgcccggctcatttttgtatttttagtagagacggggtttcaccatgttggccaggctggtctttaactcctgacctcaggtgatccgcctgccttggcggggattacaaccatgagcccccacgcccggccgagataattattttcacatgaattttggcttccccaagacaagtttttgtctgttttattcagggatatatccctggtgactagaatagtgcctgttacatagtaagaaactcaaaaatatttgtttaattctttagacgcttatgggggatatataggaattaaaaaacaatacaacgtaatagagcatggtataatacaatactgctatttgataactctgtcatggagtagtagttccaccagagtagcaaccaggtctatcttgatcccctgtatccgttagtacaatattggtgctcaatatacatttgtgaaaaaaattaattaaaatacaacgtaatagagcatggtataatacaatactgctatttgataactctgtcatggagtagtagtccaccagagtagcaaccaggtctatcttgatcccctgtatccgttagtacaatattggtgctcaatatacatttgtgaaaaaaataattaaaatctagaatactattacatcctaaaaccgtaaaagcagagtgtcagaagggatatatattggttttgattttttttaaatgccggcttgaaaaccgagttcagatacatgctatctggctttgggtaggttctttagtttcctcctcatctaacagggctgttgtgggactcagtgagagagaggatggctggaagtgcacataggatactgcctggcagactgtaggcactcagtaaacgcgagttctccgttaacacgaaaacattacaaacagctaaaatgacagctgcttgagagaataatcggtaagtgccacaaccgggctagaaaaggatgaaggacaagctcctgcccactcctttggaaactccacacctgggccggagaaagactcgaattcgaaaactaagtttcagtcgcacctgcctccggcgtcgcttcagcctccgaggggtctgcggaggcgacgtcccagtcaggagggatgcgcgcctgcgagccccccggggatctcggagccgctccactgcggtgcctgccgctatcttccccacgccttagtaactgcgacgcgacggcagacagtgtaggcggcaaccgacggccgggacgtctaacctcaagtcccagcaagccccgcggccacgtcctctgactacctcgcgccagcaagacccaaactacggatcccgattgactccgcgcggcgcgtcacgctgtcagctccagccaatcggcttcagacaagtcggaggggagggagacgcagaggcggacaagatggcggcggcagctgtacagggcgggagaagcggtggtagcggaggctgtagtggggctggtggtgcttccaactgcgggacaggaagtggccgtagcggcttgttggataaggtgaggagccggttcttgggaacagttgaatcctggggaggcctgggaggcggcgagccaaccttcccatcccggtctcccttattttctacggccttttgaggggagcccttgtgtgaccactatcacaaccctacgcacgcttggagcctgcccttgccctcatcacacttcaaacctggacccggtcctctttagaacttcttcttttctcgcaagtgttctggtcctggtcgccacacctttttcggtaatttgatttttcctatatttaatcgtgtccatctcttttctcctggggggctgggtgcactgttgtcagtgcccatttcacagacacggaaaaccgaagcccaaagattaaagaatcagtatcccccaaactctctaccaccatcacccttgcgtgctgctacagattccaaagtgcttcttgtccttttgcttactgaagtttttaggcgttttatcatgataggcgaatactgaaaatatttgagtattgactgttctactgggctgacaagaagcctttaagatttttctttttttcctgttgtttttccccgccctctcctctcttccctccacctccctctttgctaccaagtgcactgctgcccgctcacgcttgcccctttcctccctctgctcatccaaaaaaattttttttaactgcagtcctagcaacaagggtttaaaagaaaagaaaaaaaggaaaactgtccctgggttggcctttcttgctctttgcacagcatcttggaagaaacagttgcacggagaacaacgtcctggtgttgattttgcctctaattagctttgtgaccttgaaatatgcttgctctctctatatctgttttctcatctgcaaagtgagagatttagccttaaaatgagggacttaactctaaa

SEQ ID NO: 5305 - DNA, 6000 bp, Homo sapiens
ctttcacgggctggtttaggggataattgcatgggaaaggaaaattaaaatgacctgtggatggagcctctaaacatttaatgtactgctgttttatggctttagcatcaaagtgtgttgttaataccaatatacatttaattgaactaggaaagtttataagtctcccattcagggactactgcagtatagagagatgtagtctaaaagaaacaacatacaaccgcaagaggaaaagaaataaaagcacaggtttagttgaaaacttagttactcctgtagtactcaggccattttccattataaccagctatgtggactttgcagtcaccaaggtgaaatatcctgagtactccaagagtgacctttaaaaagataggcacctcttaggctgctactgagctcttgaggaaacaacagcggccagaggagcttcctgaaagcgtaactgattcatttatgcatactgcaggcagttatcactatcctgagagtcatcctattggaaatgttgataaggaatttgttcttgactttagctgcagtcatcagtgacaccacctcagctctggatggcacttaagtcagcctcaattcattggccagggtggttatgggtgatagaattgctcttcctctttgtgggccaaattggagtcagtgcaatcactaatacatcccactgtgactggattaatgtctcagaccgagtacagggtcaatacagaaacttgagaatgccacttggctttctaaggtagatcctgatggtttatgattgttggtttttttttcctaccttgttggatacaggcccttggatatggctgaagtcagtactgattggtcttatcctgttacatagagttctgttgatagtacctttaattaaatgtaataaaatactttgaatggacctggttccagtttctgtcagtttaattagagtgacaggtggagtggcatacttatgggagaattcatcaaaagccaagatggcatagaaatgaaaggtgcatatcgttgggagacaattcttcatgggtctctagcatttctgcatattttgcaaagagaggcactgactatctttgttccagactatttgtccaggaatgtttgtatagtaaacaaccttagaaggtatcagagcaaagggcgcacatgctcactgcccattattgaagattcaggttccctaacctcaaagttcctctcctttaaggcacttcattacatgtgcaggtatcatctggctctctgcgtcatcatatgggaattggggctcagaactggaacaaatgctggtactctggctactgctattgctgtaagtaacaaactatcctttttacaggtagtaacaggctatcttgttagcttgcaggtaagataaaaatctcagacccttcacaattcttgacagccccactcctacttctgcctgtcccatatcttggaagctccctaacttctgtaacaggaagttcccccgatattcctgtgccatcttacttgatcgcattacttaatacccttctgcatccctcttccttcaaacttttatataattctgctctgctaatacgggtgccaggcctgatcccctcgctttagttgctcacagtctgctgagagtgtcagacacttagacaatctgaacacagtagaaggaggtgcaaagtgctatgggggcttgaaaaggagtatttgttctagtatggaggtctgggaggtcctcatacaggaagtgaaaactgaaccatgagtgaggagttgggccattttacagatgaggaacctgaggcacagaagttaaataagttgccgagatcactcagctaggaagtgggaagagaggattggagccaggattctctacctctaaatatagaaattgctctttaacttcactttctcaggcataagatgagaccatctgagtttacctcaaagaattgagaaagatttggtattagctttgggtctataaaatttgagatccacagagttggtgattgtgaacttggagaagtctgataaagaaccccaggacatgacccggtttttataaaggaaatatttcagacaaataaggcttaaagaataataagatgaatatttgtgaacctactgccattaaaaatatatatattaccaatacagttgaagtcctcagggtatccttaatcatatcttacttcctgcactttcagaagttactactacctggaatgtggtgtttattattcgtaagcattttcttcatacatatgtgtccattatatatatggatatatacagatatatagagacatatatggttattttttaattttatttttacctccttgggagctcttatacaatatatatggttattgttttacctgtttttaaactttatatgtggtttttgattgagagtctcccaaacaacccctgtgttcaggtatttgctagaaggacccacgcgactcagcatatatgactaagatttattcttcgataaaataaggacacatctggatcataagggaaaaggacactggcagagtctggaggaatccatttgcaggcttccttatgctcttcctcccatgagggattgcaaagagcccactttgccccaacaacaaaaatgcagcaacacgtgtgtaatgtttctgtccagggagcccattagagagtacccacagtttattgaggtttggtcatgtgggcaccatctgcctagcacataataaagactcctagaaagcaagcaggtatccaccataaatcatactgcaatcaaacagtctacatagtcaactacccttttcagttaactggtgactgggaacactttgagagccaagtttccagacacctgtcaaaaaacaccaaccttgcaagcaggccttcctaaggataacctgttaggcctgctatggtaaatctgcacaagtaccattctctctgtattgtgcaacttgcttttttgttcaatattttgtttgtgaagataatttagattgatacctgtagctacaatttattctatttcactgctgtatactgttaaacatgacagtttatttaccctattaatggacatttaggtcttttataatttttcactattaaacatttgctgctatgagcattcttgtatggacacatctaatacaggtagtgggattccttggtgggagaggatatacatttttacttttctaggtattgctaaattttcctctaaagcgactgtaccaatttacattccttctattaatgaaggaaatacaagattggaataattgggatagttgtgttatctttgtgaatagattttaaaatactgatttagatttttaaatagttgtaagacttcacattttccatatcttagtttggtaactttttctaaaactgtattaactttatctagattttcaaacttaaggaataaagtttgtttaatatttatttctcatctctgttgtatccctgcatatagtctccttttcattaatatcatttataacttttaaaaatgagtcttgccagagggtttgtccggtttattagatatgtcaagactaatatttgcttttgtcagtcccctctattgtactttgcttcttgtttcatttattctgttcttattttcatcatttccttttctacctttttgggatttattctgttcttccttttctacattcttaagttagatccttaactcattactgttttgttgttcttatctcctggtatagggtctttatttgagttctcccagaggcaagttctgagaccaggacctgagggcaatagtatatgtgagagatgcagggagtgccataatgaggtgggaaagtaggaagggaagaaaaggtgagcaataagggtgtagcttttagtagctattgataattgctgtctagattcattaaattcattttgtcattaaaggacaaaatgatgaaattctatcattcatttggcattggtcagttaattattttatgaaggagaacttttccccatcaactatttagttacccagaaatagggtttgtacaggaaaggcagaataaaaagctgctttccttagcaaactctgaggtgaccaaagtgacatttttctccatatgtcgatatgaactttctttgcagtccttgttctttttgatgttctaatttttccatatttggccagtggaatcaccttcaaattgattcttaccttcttttgacatgacctgaaatagtcttttatggctttcttgctttctgttaagatgttctaggctaatcttataaattttcttccctgcacctaaaatcagccatttttttcatggaaccctggttcctttggggacaaaatagtattttaagacccattattgccaggcgcggtggctcacgcctgtaatcccagcactttggtaggccgaggcgggcggatcacgaggtcaggagatcgagatcatcctggctaacatggtgaaaccccgtctctataaaaaatacaaaaaattagccgggcgtggtggtgggcgcctgtagtcccagctactcgggaggctgaggcaggagaatggcgtgaacccgggaggcggagcttgcagtgagccaagatgacgccactgcactccagcctgggcggcagagacacactccatctcaaaaaataaaaataaaaataaaaaagacccattatttgggcttattacgatgagttggtctctggttctaggcctttttttttttcttttttttttttttttttttagaaaaatacagcaggttgtattgaggttggcacctatgttctttcaaagaaccctcatcattttgtgagttctttccttgtggcaccacgatgttccaggctcatcttgtatgttccctgcctcagcacaggattttttttaatgagaaaaatatcacgaattcaaatttacagaagctttacatttttatgtcctctaagttagcagtctgtctttccttttattggcgtttgtaaaatttcttctttttaaaattgttatattttagagacagggtctcgctctgtcacccaggctggagtgcagtggtgcaatcacagctcaccacagcctccaactcctgggctcaaggcatcctcccacgtaggccttccaaagcgctgagattgtaggcataagccaccaggcccagcctattacctttacgttgtacttagtcccagataaaaaatgaccttagatcagtcctttcctctttggctggggagaggggggcttaaattccggtactgtgaaacagaagaatggactcagtgctatgtgacaaatctatgtatgtaaatgtgtgtatatacacacacataaattatatatatgaatatattttcattttcatattttgcaaggagagtagccaatgctctggacctctggtcctttttgtagggtaccctctgaggccgggaacctttgctcaactctcaggctgtccagggaagctttaggcggtgataccgagctacagaccaatataagagctcggggctgtggcactgaagagaggaggcggccgttgggaactgaggtgggcccagggcttgagctgagttggcgagggtggaggtggtgccggtcccacgccgtggtggggaccgagctgcgggctggagggaggggcagcgccgagggggcgggacggggagggctcgcggagtaggccaacggttggccccaaccgccactgactacagcctgcgcccgcctcttttcgttgccgttacctgtttccggcagtcgacacgctcttcgcttctcggggcttgtctccgtgtcctccgtctcagttgtttctccctctctatcctcctctgtctcagtctccccagccttggggccggtgcctcttccgggcttcggcgaatgagacctgcggacctgcccccgcgccccatggaagaatccccggcgtccagctctgccccgacagagacgg

SEQ ID NO: 5306 - DNA, 6000 bp, Homo sapiens
taagtcccacacccatacactaaagaataaactatgttctcactgccacaacatttctctttttctctagcagctaaataagccctggtcttgagataagcagtggtaaaacaatttgcagctcctccaccgccagacactaactaactgatccccgttccaccagccataactatagctctgattggactagagactgtttcaggaattttttctgataagagaccaccgaccatggatgggttctggccagtttatagacaccgcacttgagcccttcatgtccttgcttcaccttttgatgtatatatgcatttgaatgttaagtctccaacccaaggtgaacatgggtcttatgaaacatgcatgtttattccatatgcatacattaggatcacctcatgaatattcatagctcctcctataacctgttgaatatgtatatttggtcaatgcgttcagcttaaatttctgtccaacccctcctcccttgaagtgtctgtctctggactctgccaaagactgagctccccagcccatcagaatggccaccttgtaggctgtaactcttcatgagaaataaagtctcatacctataatcccagcacttcagggggccaaggtgggaggactgcttgagaccagcctaggcaacatagtgagacgctgtctctacaaaaacttacaaaattaaccagccggggtggcatgcacgtgtagtcccagctactggggtgcctgaggcaggagaatcgctggagcccaggtgatggagactgcagtaagccatgattgcatcactgcacttcagcctgggggacagagtgagacattgtctctaaaaaagaaaaagaaaaaaaggaagaaagaaaagaaataaagtcttctctccaaatttatagatctcatgatttttcagttatcacgtttcatctctatttcacagatgaagaaacagcctcagagagctttgtactgggtcagggttgaactgacacccaagctcatgctctttctggggcccagagctgtcactttcagggaaggatgcagtttccaacacagtgtgttttcccataggctggagggagaaactgctgagagatggagggagttggaatcaggggaaggctgctgtggggcgaaagagcctggaggtggtggctgggggaggcagcttccaaagggagtggttggaggtagggagaaacctccagatggggtttaagctgctacagggagcacggcaggggctatacaagggtggggcactggaagagccaggggctgtgttgaggttaggtggctgtgcaacctggacacccacccggcctgcacacctgctcctctcctcgcagttaggagatgagctgtgtcctgatggagaagttgtgccaacaaaggcaggggaagccctgaatgcttggcaggatggggcctgtttctcatcaaccagctagagagactgaagcctgcttatctagggagagataaacagtgactcccccgtgatctccacactctcctggccccagtctaccaatctgaaaaaaggaaaggttgaattaaatgagctccatattccttccacctccgacttctgaggaccaggcatccatccttgctgcccttggctcagatcccagcccctgccatatacttgacatggagcctcaggcaagacatgaggcctctgtgagcggcagtgtcctcatgggtgaaataaggaggacattgccttccttgagcagagttaacgagccatacacgggagtgtgtctgcacagcgacggtctgactccaaggcagcatccagcgggcagggaaggctgaggctctggctgaggccctcgcttgtctgcctggcccatggctcatttttagatatccccttcctggctgccaggccagaagggaagtgggaacaaagatgctgaggtggtagtttggagccgttttcaggaagaagcctctgggcactcttccccttttcaccccgcccacaccccgtcttctgagccatctcacagtgatcctcaggacaggcctgaggtggagggttggatgtcaggatctccatttaacagatgggaagacagagacccagagaggacaaaggatcagcccaaagtcctacagcaggattatgacagagctgagaccagccttgaggtctttaatctgggcccagccctcttcctttgtaccccagagcagatagttctataaaatgaagagtctcctatttttcctggtttatcagaaggcattttcctaagtgggttggcttgaagaaggtaagggcttgggttctgcaaacagcccagggttttatgaacagcatcaggcttagcatgagacacagggctctgtgaatgttatggggccctggaagcagccgaggtttgcagactgtgctaggcttttgccaacggcacaggactctaaaaaaggcatcaagttttgtaaactgtgggaatccacagatggtgttgtgatccacacgcatcgtggcgctctgtaaaatgcaccttcatataatacttgaacaaagcacagcaaacaccacacactggcaaatggcaaagcccaggtgcaaaccagtgtggtcaaacctcagacctgggccactcatagcaggagccgactatggggttcaccagggagctggtctgaaggcatgttagcctatgtctcagaggctcctgggtacctgacccttgctcaagttccacagctcaagttcaggaatattcttggaccaggctttgccagcctggggaagttgaggtaataaatgaaagctgctcatgccagaggctactgtatataccatgccctgggggttattgtgcattgcttgactcaaagatcaatgagataggccgggcgggcacagtggctcacacctgtaatcccagcactttgggaggccaaggtgggtggatcacttgaggccaggaatttgagaccagtctggccaaaatggtgaaaccctgtctctactaaaaatacaaaaatcagccaggtgtggtggcacgtgcctgtaatcccagctactcgggaggccgaggtacgagaatcacttcaacctgggaggccgaggttgcagtgagctgagattgtgccactgcactccagcctgggcaacagagagagactgcatttcaaaaacaaacaaacaaacaaacaaacaaacaaacaaaaagaaaaagatcaatcagataaacttagccagacaagctggtccccctaccaagaccattccatgcacagaacttcttcaggccctggggccaaggtgggggtaactgggcttccagaaagtttaaagggatcttcatacctgtaatttggagtctggaaggttgcacccccgccagtcttcatgaggattcacaatgctgacgttcgtcagaaggatttggagagatagacccaatttggttttctcaagtagggtctgatcaggtcagaccctgggtcaaacccatgagggtctggtctttctattaatccaagccagttcttgacctttctcagtggaatggtcatgtactcacatttctggtttctcaaagactcatttattcatgtaacaagtatctattgagtgcctcctgagtgccagggagatctgtgattatttcacacattccctacatcctactagcaccctcatacagcaaataggagccaagtggagctggtgtatgtttctctgttattgcaccctgaaagttagactccaaacccacatcctcattccacgcaaagactttattccagagacagggtcaggttcacttctgcatcttggatttggggaaacccagatcttcctcagagaagatatcctgggtggagggaaaagcctggttctatcattagaggttcaaggcacccaccacctactagctgggtgatctctggcaagttactgagactccatgcctcatttgtaaaatcagggaataaataacctgatgttacagtgtcaaggggaggacccagtggggccttgtgtgtgaaagtgctgtgcaagctgggaaaggcaaagtggatttgctttcccttgctgccctgttcggagccccacctctgccactcccttctctgagctccaggcctgcaggcttggcttctctgtccttcaccgaaccttcacagtggctctgcaagggattactgtcccttctttatagatgagagaatggacgctcagggagatgctgggacttgcctgagatcacttgaccagcaaataacaactgaggtgggacccagatctctctggctcctgaacctccatcctcagtcctcagtccaggaaactctgagaatttcatattttccattctcttcccctcctcctttgcctagatggctgaaattgatggaccttctaccatgagctccacccaggcaggctgccactggatacttagtggacagagccccttcttgctgtggatccttggagctcagggagaagatgagggatttagtgagagggcacgtgggcttgagggggacaggggttcagtgaaagaggacaactgctagatgggggaacaagggctctctatggggccctcctatcaagggagggcaacaaaagttctgtgaagggaacaagagcttggtaggagaagggctcaggtgggaaatgggagtgcagtgaggagactgggggatgaatgtggaaggttggggagcttggggagacccatcagcatcccccctgtgcccccacctctctgctgctaacagagcaggggaaaatacctaagggaaatgctgaggcaagaggctggaaaaggacaggctgaggctgagcctcagggaggcggggtgcagcttcctcttcacagagaggctggacttgaacaaacccagccttctatacaaccgtggagccagggcaagggagagacagaaggagcaagtgacccagggagacaaacacttggagatacttggggctgagtttgagcaagactccctaacctgtgtctggacaagtctgatgtcctgtgtggcccaagaagaactgaccccgtgtctggagctcccaccgttattgcatccctgctgtggctcacctgctgctgtctccaggagcccctgagaagatttgcttcctctcccctgctaagctccaggtcctgagattaaattaggggctggagctcactgcactccagcagtcatgggacccaggataggtaagtccgaacaaattaaggaagggccatggagagcaagcctgggggacatgttcccagagaaaagggtgaggccgtagagccagagtgggtgggatgggtgctcacagctgttggcacagagccaggcacatggccggagttcagtgaaggtgtgttaaatgaatgagtgaatgactggaggagcaggaagggacacgatttactcagctggagccagggaacccagccaaacctcgttgatgagaccgagacttagaggacaacagaaagacaggcccctgaccccctcttcaagccgtttcccctctcaaaggagacaaagatagagacagacagagcagagaaaaagagaaaagtgtagtcagacagtgcagacaggcaggctcaaacgaagaggcacacaggaggtcggagaacacaatatcaacaggtatcagcgagagaatgcagggaaaggtagggaggtcaaaccgggagagagggctgcagcagagactgggagagacaaagaggcaggagacagagcaggaaagagaatcagacggggacaggtgacggagagctacagacagacctgcaggcagcatcagaagatccacccagaagaccaggagattgagagtgacctgcagagacctgcatgggtctctgtgcagtgaggtctcttactatagagtggggaggaggctggaggaaaaaggtcttgaagctctgcctgcagggtgacaaggaatcgccttgtagcgagggcagtgtttctgggaacaga

SEQ ID NO: 5307 - DNA, 6000 bp, Homo sapiens
gcagtggggcaatctcagctcactgcaacctccgcctcctagattgaagcaattctcctgcctcagcctcccgagtatctgggattacaggtgcgcaccaccatgcccggctagctgtgctttcttaaagcactgcaaactgaagccagacaacttaaacttcagaagaaaataacagcaacctatttacatacataagccactttcatacttgcctactgatgtatggacttcagagtaatccagcctataatgatttttcaggattgttcttttgtttgttgtttttctcccttgctccccgttttcttttcataggacatgagacttcacaaccctctaaaaatgaactttcctaataactcaggacctacttgtttaggaataaaccatcctagccatgacagatcagatgaaacctgagaccacaaactcattttcttctaaaatgctttttccaaaagatttttaaaaagaaaagtgggaaatgtgaaaggaaaatatcttatgcccccaaaaatcaatacgctaaagggaaaagtcaagctggaaactgcttagggcaaatctgcctcccattctattcaaagtcacccctctgctcactgagataaaaacatatctgactgcctcttttgaggaggctaatcagaaacttaaaacaatgcaaccatttttttcttacgtacctatgacctggaagcccccttcctgcttcaagatgtcatgcctttccagactgaaccaacgttcttcttacatatattgattgatgtctcatgacttcctaaaatgtataaaaccaaattgtgctgtgaccacctcaggtaaatgtcatcaggaccttctgaggctgtgtcataggcacgcatcctcaaccttggcgaaataaactttctaaattaactgagacatgtctcagatttttggagtacacatctgataaaacacaatgagaaaaatatggcatcacttctgtgatattcctgctaaagatgcataccctgtaaggctgcattgagccgcgatcacgcccctgtactccagcctgggcaacacagtgagactctgtctcaaaaaaagaaaaaaaaaaagacacttaacctgaaactagtatctaggaaacattaggcaaacccaaattcaaggagattttacaaaataactgatctgtaacctcaaaattgtccaggtgatgaaagtcaaggaagagctgaggaacttttctagattgaaggaaactcatgagacatgacactaaatgcaatgtgcaattctgaattggatccttttgctaagaagtacaatgttgcgacaactggcaaaacttgaatgggatctgaggagtagatggtagtaacaatgttaatttcctgattttgatagtcttattatggctatgtaggacacagatgtttaagaaaatacaccctaaaatgttctgagtaattgggcataatattaacaattaattttcaaatggttcaggaaaaaaaaattttgtactatacttgcaacttttctgaaagcctgagattatttcaaaataaaatacttttaaaatgcaattacttaaattcttcccatgtttcttcccacgtaaacgtcaagccaaaggacatggcttcagaagctctttttttttttttttgagatggagtctcaccatgttgcccaggctggagtttagtggtataatcttggctcgctgcaacctccacctcccgggttcaagctattctcttgcctcagcctcctgagtagctgggactacaggcatgtgccaacacgcctggctaatttttgtatttttagtagagacagggtttcaccatgttggccaggctggtctcaaactcctgacctcaggtgatccacccacctcggcctcccaaagtgctgggattacaggcgtgagccaccgcgcctggtgcagaagctcttaaatgctttatctcctcgcagatgttaacgaaatgcaattctgaattttggcaggggtttttttttttcttcatttcgctttgtcttgtctgaagcttcagggcaaaatccatgattattgaactatcgtctattttacctccatttttatatattaaaccttattaagcactactatgtgctgggccatgtactaaatctttttcaggcattatttcttttaaccttgatctcttgctacttcccccttcatactccagcctagagcacggggactcctctaggctttctctgtttgcaaaatgcagtgcctctgcctctcttctttctccctcttctctttaccccttaactcctatttattcttcaggtttcagctaggatgacacttcctccaaggagcctttccttaagtctgagtgggggcccctccctgtgcccaggcctttcttcttttaccattgtacttttacactatattttaattttgttttctcttctgttccctcttctatgctattcaagagcaaggactgtttttactgctgttttaccaaagctaacagaggtcttcgtccatgatgtcactctcaagagactttaattggtgatttcttgtttctgaaaataggaaggttgatttgatgcaaaatatccaatcagtagtaattaattatgttaattttgcccttgttctttaatttaaaaaatgtccaaagtccttttaatgacaatatgtattaccacgatactaaaatttcttaccaaagtccaaaacactggttttctacatgactcttccgggtaaaagtgaattatcagcagagcagtaaataaaatacattcacattaatcctcaagtgacttcaagtctaggggagcactgaaagggttacattcataggattgatttaaaggcaacttctttaaacagcagtgacttaaaagtaattctaattgccgggcgcggtggctcacgcctgtaatcccagcactttgggaggccgaggcgggcagatcacaaggtcaggagatcaagatcatcctggctaacacagtgaaacgccatctctgctaaaaaatacaaaaaaaaaaaaaaaaaaaaaaaaaaaaaaaaaaaaaaagccaggtgtggtggcaggcgcctgtagtcccagctactcgggaggctgaggcaggagaatggcgtgaacccgggagcagaagttgcagtgagctgagatcacgccattacactccagtctgggagacagagcgagactctgtcttaaaaaaataataataataaataattctaatttaaattctttctggccaggcaatcaacacaggaaagagaaaaggtcttgattttctactagtttgtgtcttgtgaaagaattttttttttttttagacgaagtctcactctgttgctcaaactggagtgcagtggcactgtcttggctcactgcaacctccacctcccgggttcaagggattctcttgcctcagcctcccgagtagctgggactacatgtgcgcaccaccatgcccagctaatttttgtatttctagtagagacggggtttcactatgttggccaggctggtcttgaactcctgacctcgttatccgcctgcctcggactcccaaagtgctgcacctacaatgggccaccccaggggacaagctgttgggactggaatgcggtggcaagagccgtgcactctggctgctgaaacctgctgtttccactgtaagctaccacttagtgaatattttctacgtattgggaactgtactaagtggctttcatgttttgttttttgtttgtttgactggtttgttgttgttgttgttgttgttgttgttgtttttgagacggagtttcgctcttgttgcccaggctggagtacaatggcgcgatctaggctcaccacaacctctgcctcccgggttcaagcgattctcctgcatcatcctcccgagtagctgggatgacaggcatgcgccaccatgcccggctaattttgtatttttagtagagacgggggtttctcatgttggtcaggctagtctcgaactcccgacctccggtgatccgcccgcctcggcctcccaaagtgctgggattataggcgtgagccaccgcgcccagccgcgcccggtttttgttgttgtttttgtttctaaaaacagcgtctcgctctgtggcccaggcaggggtgcagtggcgcgatctcagctcactgcagcctggaactcctggggtcaagcggtcttcccacctaagcctctccgtgctgggactccggacgcgctccacctcacgcagccgtattcctgctttcaaagcagatggaagaggtgcgccaggacccccagttcttggaaacagacctctccagttacctgttgtttcctcttcacgaagagtgcatgtaacagtaagacacaactgtttcatattatacgtaaagagttcatgccaaaggttatagacagtcacatgctaaaactaggctacactttgaagaatcaccgctcaagttctggaaaaaagaggtgactgttgaacaacactgtgagggtaatcgatgccactgaaatatacacttaaattgattaaagtggcgaattttatctggcatatattaccaccatttttagaaatgttttttggcaggtgaagaaaagcaaggctccaggaggccctgcgcaccggtctacgcccactaactcacccgccccctgcgccgcgtctcccctctcaatttcagtcgcccattgataaaaacgaggtggctatgtgagatggccttcagcggtctttccagctccacggttttacagtgtggagcggggaaagaaaaactctaaggtcctcgctgcaaagcaaccatcagagctccgccgcgccgtgccgctcctctccgccccgtggtccgggtgtcaccgcccgcaggggcgcaagggccgcagcacgcgtgcgcagtgggcaccaagagcgctgcgtcgaccgcgccgcgccggccctccgccgccgcgcccgcctacaaggccctgagggagactgcggagggtgagtgcgcggtgggctcggctgaccgttggccctgcggccggcgccctaggctacctcccttcgcctccccgcgcctccccgcgcctccccgcctccccgcctccccgcctcctcggctctggttccaacaccccagcgccaagccggggaggcggggaggacttcttaagtgtgccgctcgggagcctcccgctcgtcccgccccgaggggcgtgaggaggggaggggctgcggacttcggactcgggcctggagaccgcctcctacccagagccggagcccgcaacccgctcaggcggcgacggagccatgtcgccgctgctggggctccggtccgagctgcaggacacctgcacctcgctgggactgatgctgtcggtggtgctgctcatggggctggcccgcgtagtcgcccggcagcagctgcacaggccggtggcccacgccttcgtcctggagtttctagccaccttccagctctgctgctgcacccacgagctgcaactgctgagcgaacagcaccccgcgcaccccacctggacgctgacgctcgtctacttcttctcgcttgtgcatggcctgactctggtgggcacgtccagcaacccgtgcggcgtgatgatgcagatgatgctggggggcatgtcccccgagacgggtgcggtgaggctattggctcagctggttagtgccctgtgcagcaggtactgcacaagcgccttgtggagcttgggtctgacccagtatcacgtcagcgagaggagcttcgcttgcaagaatcccatccgagtcgacttgctcaaagcggtcatcacagaggccgtctgctcctttctcttccacagcgctctgctgcacttccaggaagtccgaaccaagcttcgtatccacctgctggctgcactcatcacctttttggtctatgcaggtttgtcattctcaccaaatacttggcacttccagagcctctatgacatgaggctgtaagt

SEQ ID NO: 5308 - DNA, 6000 bp, Homo sapiens
ttattctgaaaattgaaaaatgaaggacaagaatcaaacatttaccccgcttttcttgtacagggtaactaaatagttcatgaagaaagttattctttacaaaaaaaaggggataaccattcttgcaacctttaataaaataccaaatgtaggatatacttatcagtgaaaataaaaccatataaaagtttgctagagaattatgtaattgaaaggacagtctgacatcacttcaagctgctgataaattttaaaaacaaatactgagaaaaccagataatatggtcctctagtatatcaaaataagtattacttaacaatgcctgtgaagtaattgttaagaaaagcaataacaaaattcaacttgtatataataaaatctctagatctaactccctgattgtagaaaatgcaagatattattattgaaaatgtataaaatgatagaaaatacaggataatgagcatgttaaattcatagagataaaagttgttaaccccgaaatgtgagaaatccttagggcaaaaactcagtttcctctaaaaataaattgcattttttttttttttttttttttttttgagacggagtctcgctctgtcgtccaggctggagtgcagtggcgggatctcggctcactgcaagctccgcctcccgggttcacgccattctcctgcctcagcctcccaagtagctgggactacaggcgcccgccactacgcccggctaattttttgtatttttagtagagacggggtttcaccgttttagccgggatggtctcgatctcctgacctcgtgatccgcccgcctcggcctcccaaagtgctgggattacaggcgtgagccaccgcgcccggccgcatttttttttaaaaaaggaaacttataacttaatagaaattgataaaatagatcaaccaaaatgcagtgtatatacctgtttgaatcttgacaaaaatacttttgagataattaaagtaaattaaccataaatttgatacctgatattaaagaattattgttctttttgtttgagatgtgtttgtgtaagatacgtggttttgtttttatgttcttaattgttagcaatatataccgaaattagaggtagaatatgctatctgagttttgttttaaaacattccagaatttttaaactagtagaaacaaaacagaaaaatgctggatgttgaaacttggaggtaagtaaatgctagtttattatattattttttactgatttgagcatatttctttccacagtaaatttttttctttaaatggtagctactgatactgagataattatattagttgtatttaataaatggtagctaccattataattgaaaggagggctgagaaacaaagacagaaaatggattcaaactactaccaaataaaagagcaaataccagtgatctgagtgaggaaaatgaggaaaattgaccaggttaacacaagtgagtggctgaataatctatacaaataccagaagtagaggaccagtgattgtggctagttgatactcaaactcaacttatctaaaattgagcctatattcaattcccataaacatttatcctctattgtttcttattttagttaatggcacaagccaaaaacctagcacatagccctaaatcttctttcccttcacttcttactgctcttgaatttatcacctatgtatctctcaaattcattaacttatgcccatctcagagatcattactctagtctaagcaatgtcatgtttgcctggtttacatcaataatatcctaacagtaatctccacatttaatctagctcccaccccacatctgttctcacctcagtagcttgagtgaaaagttttaaattcatgtatcgttacccaaaattttgctacaaagcctttatggactatgagctggtccatacacacaccttcattcttatatcacgcctctaccatattgggggttgcagccaccttaactgtccttaaatcccttgaatataccaacctacttccactttggagactttgcacatgctattctctctgcctggaaagctcacactcctactgttctctctgtcatcaaacagacttctagtgatccctcaagtgtcacttgaaatgtcacttctcccataaaattatccctgactatcccttctcttgtgagactagaaaggcccttctgtcatgttccctaatttctctctttaattttctcttatagcaacctaaaaagtaatttaatccagaaaaaaagttatttaaagtaatgtagttaaaattattatttaaaatcactaaaattaaaatagtattttaagaggcaatatccttcctgatgatagagatttttgttgtgcttaccatcacattcccatctctccccatgtctgcaagtaaatacttgcagagtatttactgaacccctaattctactttatagagcattgcagtaatttcatgtcaggtcatacaataatctcccaaaataggataggaccctttcaaatcccacaactgaagatacctaaagaatgtacatctagagtcaggaagaaagcactctaaatgggatttaatatttaggaacccaagactggcaataagactgaagactacaacacgtgtaggccagaggagacagtggcctatactggggacaaataaagaggtctgtcctatttaagaaaatcaaccctgtaaaggaaattaataggactaagtacattttagtaattcctctaagcaggctctaaagattatgaaaaatagacgggacagcagacacaaaagcccttaaagagcatgatgaagactttctaagttatttcactggaagcctgatagtggggcaagtgtaaggcaaaattcttaattaaattgaacatgataagttgaattctgtcttcgagaacatagaaaagaattatgaaatgccacatgtggttacaagtaatgcagacccaaggctccccagggacaagaagtcttgtgttaatctctttgtggctctgaaagaaagagagagagaaaagattaagcctccttgtggagatcatgtgatgacttcctgattccagccagaggcagcatttccatggaaacttctcttcctcttcacccacacactgctccatgtacctgcaaagcctgttctgtctcaaaaaagttgtttggatgagccgtgacttttttttttcttaaataatgagacaaactccagaaaaagagaaaaaagcagagcagtctgacattccggcatcatcgaaatagtgatggcttttcctagaatgcttcagctaaggacccaaatactaatgatctcctcaaagctttcactttcttttactttttcattaatttcagtggacccccaaactttaagtatggaagaggacaaagaaggaagcttcagaggggcaactttgatttgactactctttttgtcactcttcagctcacaaaagagctcactttagttcaaaacacaaagtctttaagcccctccatagattggtcccaggtttaattttctatgatgtgtggaggcctcagtttaatgctccaacttgatagatgaaacacagttcccacctctacacatttcccctgtctcaggagttgtatatattctcagttgtctgtccaacttatgcccactctttgagatattaatcaaggcactcccttgataacacttgcatattattatcaaaattatgcaattctttctaatatcagcccacaaatacatctcttccattaaaagtttgacttaattatctatactactcatttgaaaactaacatagttaagttgtatttttagccatgaatttcagtttccctagctcactatacacagagaaggaacttttgaaataattgagatgatcaaaaatatttgctgaagaaatatatttctcctttttcattcactcactaattgagaatgtctttgcacaaaacacattgcaaaaacattttcaaaaaaattcctaatttctagaattgataggaaaaacaatatggctacagcattggagagagagagaaaggagagaggagaaaggagagagagagaaaggagagaggagagagacagaggagagagagagaggatagaggggagagagagagaggagagagacagaggagagagagagaggatagaggggagagagagggagagggagagagagggagagagagggagagagagagagagagagggagagagagagagaaagagagagagagggagagagagagagagagctctttaacgtgagatatccccacaatgaagcaaatcgcccagttatcaaagtgagctatccttaggagttgtcagaaaatgcatcaggattatcagagaaaagtatcagaaagatttttttttctgatacgttgtataaaataaacaaactgaaattcaataacatataaggaattctgtctgggctctgaagacaatctctctctgcatattgagttcttcaaacattgtagcctctttatggtctctgagaaataactaccttaaacccataatctttaatacttcctaaactttcttaataagagaagctctattcctgacactacctctcatttgcaaggtcaaatcatcattagttttgtagtctattaactgggtttgcttaggtcaggcattattattactaaccttattgttaatattctaaccataagaattaaactattaatggtgaatagagtttttcactttaacataggcctatcccactggtgggatacgagccaattcgaaagaaaagtcagtcatgtgcttttcagaggatgaaagcttaagataaagactaaaagtgtttgatgctggaggtgggagtggtattatataggtctcagccaagacatgtgataatcactgtagtagtagctggaaagagaaatctgtgactccaattagccagttcctgcagaccttgtgaggactagaggaagaatgctcctggctgttttgtactgcctgctgtggagtttccagacctccgctggccatttccctagagcctgtgtctcctctaagaacctgatggagaaggaatgctgtccaccgtggagcggggacaggagtccctgtggccagctttcaggcagaggttcctgtcagaatatccttctgtccaatgcaccacttgggcctcaatttcccttcacaggggtggatgaccgggagtcgtggccttccgtcttttataataggacctgccagtgctctggcaacttcatgggattcaactgtggaaactgcaagtttggcttttggggaccaaactgcacagagagacgactcttggtgagaagaaacatcttcgatttgagtgccccagagaaggacaaattttttgcctacctcactttagcaaagcataccatcagctcagactatgtcatccccatagggacctatggccaaatgaaaaatggatcaacacccatgtttaacgacatcaatatttatgacctctttgtctggatgcattattatgtgtcaatggatgcactgcttgggggatctgaaatctggagagacattgattttgcccatgaagcaccagcttttctgccttggcatagactcttcttgttgcggtgggaacaagaaatccagaagctgacaggagatgaaaacttcactattccatattgggactggcgggatgcagaaaagtgtgacatttgcacagatgagtacatgggaggtcagcaccccacaaatcctaacttactcagcccagcatcattcttctcctcttggcaggtaagatatgctagatatacgatgtcagagtagggaggaaccttaacaatcacttcttcaggcagggtataaacttctcacctgaacactcattgcagcccccatcaaggacagaaatggtgccctgttaagaactctcaatgtatcttgtatttttcctttatagcacactttagata

SEQ ID NO: 5309 - DNA, 6000 bp, Homo sapiens
gtctgtttctttatgatgttggtgatctttgttgattttgtggttgcctggtctccatgtatttggcttgcctgtatttccttagtgcagttttcctttgaggggaggtgagattcaaaagctagatcatgtgggtttttggtagccactctaatgagtctaaatttgggggaatttggggttgtttatagtttttattttttctcagagatccttgttctgataaattttgtttttaagtttaaagacagggctttggaaaattttaagttataacttgatctgatttttgacttaggaaggacattctattgagtcaaagatggtctgcaaaggtggagaaagagaacccaataaaaatgctttacatgagagattattgtggctaagattagaataatggcggtgaagatggtaagcagctagattcaagatacattttgattgcagagccaatagaacatactaaagaattctatgtgaggtgtgaaagaaaatgaggagtgaagtgccaaagaatggggcacactcaaattctacaatgtagccattaaaaccactggagaaagtaggataatatcttggtggggacaatgatgaaaaaaggaagcaaattatataatcagatggaagtgacttcagaagagaatgtgcagggaataatggtgacaaagcaaagatctgtccttcctctctgaccccatgagtcaatggagaggcaagaaaaggaaatgtccatttaactggttttcagaaaaaagtggtatcaagtgaaaataggtgtcagacaagagggggtagaaaaagatatgttagagagaggattcaaaatataaagggatttatacacaataaaatgatactaaagggatacagggactgcagctgtaaataaggctataggatgagagtttgtgaaggaatagcactggaggtaccctaatcatggcactattagttaaagctattatggaaaatagcttgaaggtgcattttaatgataagggatgagcaatgttaaatcggaaaatctggtttaaaggccaagttgtaaaacttaccagtgtcaaggttccaactagaatgctagcatgataggaggcatatcctacgctgataagaaggtatggatggtctattttacacatttacctggtaggtcttttctaatttctacatttattgttgagtagagtaattatgacatcagaaggaaatcatccaatcatggtttctgctttccttttaaaatttcttctcacttttatcagtctttcacctcttctcactatctagacttcttttgtctcacctctcctctgtgatataagttctggtatattgtttaatgtactaattttctaacatcttattttatgtttgaaactaatttttgccaattttgtggcccagaatcttaaaaatacttaaccacagtggttcatgtctgtaatctcagcactttgagaggccaagttgggagaattgcttgagcccaggagtgcgagaccagccaaagcaacgtagtgagaccccatcctataaaagagaaaagaaacaaatacccaactggaatataattcttgtgctgaatcacagctatcataacatcaacgattcacatttttgaaagtgaacattgctttctggatgaccacaacatcatgtgggcctattcatttccctagtaatgccaccttgtgacatcactaagggcataatgtctgtatctatacagtgagcctctcatatgcagaataaggcaacattttcaagcaaaacctgaaattttgtggcacagcacctggtgagactgtgggtttgacaaatatctcaccactttatcatcaagttaaacattattcttttttattaaagcttaataattaaagcttaattctgcaagtgaaatttatatatactgctttattagtacatatatgacactttgttttcaaacattgccataacctgtttgaaggaacttgagcttcagggttacaaaactgcttctgctatgatggagaagaggaggaaaaaatgcttagataagagcaatttaacttaaatggaggaagtggtgagttttgttatgttagaggctcactgaatcatgagcaggtcaaatgtgtcaaatagcttcattgagagactggttttcaatactcaaagtttttatatactattagctttgatggagaaattgaaaaggattgccctacgtcaacagtgttgctttgttaagtgtgctttgcaaagtacaagtatttgccaagatggtaataattagcaattactttttgatagcagccttctgttacaaacttaattaacatagaattttgaatgcttgcagtgtctatattgacaaaagtccaaagacttgttgagccagctaactgggctttttacaatggcttttcaagattgcagatgccgcctacagagacgacagtcatatttgaggtaacattgctcattcttggaactctttaatctaattttaatttagggagattattcaaactggcaaactgtgttaaataatgcattgatttattctattactcaaacttcaattagcaataaaaaacacaaaatgagcaagaaaaaataaatttaataaatagcttagcaactttattcattagtttctaccttctctttcttcagtaaatcttttcctggagataattttgatctgcctcttgagggctatgtagtcaacagtgaatggtccaatgggtagcaaatagaaaaagccaagagtctaaaaattgacaaattacacaatcaatacccaaaatgtttatatgtacaaaaataacatttgatattgtttgagacctttgtgtgtcacctgttaaacactggagagttattaaaatcccagtattatttcataatgtcacacataaaaataattctgagtgctcttggaaaatgtttcttaagccatatttgaggggtttagttacttcactggatattgaaccttttgaataattctattctaattccctatatttggtgttgtgtgtatgcatataagggggaacaaactcactttgttatgaaaatgttttttgaaagatgtttctctctaaaataaaaaacactggaggagtcagtcaaggaatgtctaacaggctagtagctgaaaaagctgaagttagttgggacttaaattgcatgcaaacatttagaaatcaacagttcattaaggaggtttgcttcaaagttaagtaccaggtatgctacaaaagtttcaagaaataagttattaggcatacctatcaacaattatgttcaattgatagccattgaaatacaaggacaaaaaaaagttatgtcccagaaaaataaatttcactcttccagtcacttgttaggagcaaaggtgcattacctaaagctatcagggctgcagacaatgctgtgaagtttatcctagatatactaccatctttgaaatcaacatagcagttttgctttggctgaaaaaactacttttggttagatacgtgaagccaatcataaattcctaaaatttttctctgagatgagatggttggatgaaggctatttacaatggccactattttgcaaacccatctttaaagagaaatgcttcatgaatgtagcatggtgaggacaggggaatgacagggaccattgctaatgtaggggtcaatggaaagcttccccttcaccctctgaagttttgctggaaaatcaactcacaaaaggcagactattagaaaaaaaaaaggcttacaaatttatgaataacatagcataagggaatcgtagtagaatgattacccaataaccaatgaggtacagatgataatatacccatctttttagaggaaaggaagatgagaatgtgtgtataattttaagagggtagtaaatgaattttagggaaattcaatgggcttgaagaatatgcaatggcctgggacaaagtctgttggccctacagggcagacgagagtttgtaacagaaggctgccagttgtattgacagactgcagtccttcttcctgagatattagttcggttaatgaaaactcaggaaagaaactctttttttttttgtttgtttgtttttgcctttagtagttctggactttaggcagataagggaactttagagaacagctttattctgtgctatgggagagacaaaggattgagagagaggagctggaagagaggggtatggtcagagagaccccctggcttcttcggtttagcatgtcaaagcaccatattttgggaaattggtgtctgagctttagcattaagaacagactctcagtaactactggcagtgcaaggtcctttcagtgattacttttactaatgtgaacctaaaacattccagtgaggtaggtaaaaacctcagttaaatgagtggaaacagaattacagaaatgtggagttttgtttaagtaaaggggaacaaaaaaacgcaatcccatcgattttgatgctgacagtgattgcggtattagtgatgttaacagctttaacagcggagcacccaggaccagaaatcatttccgagtctgacgagtgggaaattacagcagagaatctggaagaagaataaccaatagatcaggaaaagcaatacttaaattcacttctgagccgaaactgggcattttgggggatgggcatggcaaacagcagtagagttctttaggaaaaaattagggacgttttcagcagctcccgccacctactatgtccgggttactgcgggatccacagaatggaagttgcccgccaacaggaagaatgtctcctccctctgcagggcttcctttcccccatcgagggcccctggggaccacaggtccccagcgggtagggcggaggcgtggccttgcgaaggtcagcggaggccacccagagctcacagcctcctgccagcgcgctctctgtttctctgcagccccgaagctcgcgaatgtagcaggcgccccaagctcggtcctcaagaagccatggcggaatccaggggccgtctgtacctttggatgtgcttggctgctgcgctggcatctttcctgatgggatttatggtgggtaagtgaacaaaacactctaccccgactccggggctcgtgattctctgcagagataaagggagaaatcctggagctggaagggattgggctgtgcgctagccctggccggctgggctagatatgataaactctgcacatttcagcaaaactagaaaccagatggaatgtattttgggcttgctaatagataaagtgtgcttgaaattcaaatttattaaatgttcactgagttcactaaagacaacctacagctgtcactgtctgcagggatgaaaaaaaatcgttttatttccaagcaacattagtgagtcaaaactttcaactaatacgggcagcattaaaaacaaagcaaaacgaaacaaagcaaaacaaaaccctgctctatacgtaaataaatatttgtggaatgttccctatgtgtcagggactagagatccagggaagaacaacaaaagccatgccttcatgcataacgtgagaaaatgaaagagcttctcttaaataaaactccttttaagcatctaaaaattatattacatatcagaatttacaggttttctgcatttaatataaacattattttttaaagctcaccatgatctacttgtcagataaaggctttttggggggaaggacagaggggtggcttctagttttaataaagtcaaagtgattttgtgtgtatgtgtgcatgtttgtgtattttttttccttaggctggtttattaagcctctcaaagaaacgaccacttctgtgcgctatcatcaaagtatacggtggaaactggtatccgaaatgaaagctgaaaacatcaaatcatttcttcggtaagtttattttacgtatttgatcttaaaaatcatgtttaaaatatcacagtgagaagcatattat

SEQ ID NO: 5310 - DNA, 6000 bp, Homo sapiens
ttctttccaggccattcttcacctgagggaaagattagggcagcttcacgatgctaggcagtggtatatttttttagtgatctgtataaaccatttttttttcaaagctgacagcaagaacatctggagtcttactctattttctctcagggttcaatctactcaacattgttgagtttccctatctttcttgtgaggtaacaagggtctgtatattttaatatatcccactgcaagagtaaaatggccccaggttctaggatcgggcagcctaggttgcaatcctagctctgaaaccactagctcagcaaccttgggtaggtttcttaacctgtgtaaatctcagtttcttcacagtacacagtaatatgttacatagagatgagaggattaaacaaaagaatgcagatgtcccctatgtgtaatgcagagcaattactagatattagctgtgtgctagttactctttatagcattattaaaagtgcttgtcagccatgctacaagctgattaccaaaagaaaattttgcttattttctttgtatatttcatactgaaggagtaaaagctgtcacactttatttatttatttatttatttatttatttatttatttagtgacagggtttcactgagttgcccagactagagtgccctggcatgatcacagctcgttcagcctagacctcccaggctcaagcaaccctcctgcctcagccttctgggtagctaggaccacaggtgcatgccatcgtgcctgctaattattttattttttgtacagacaaggtttcactttgttgcctagcctcaactcctggcctcaagtgatcctctggcctcagcctcccaaagtgttgggattacaggtgtgagccactgtacctggacctcattacacacttaataaaataaatagattgcataatgccactggtcactcatcagccaccaaccttggcaattcacttctctgacagtctgtttccttcttttctagctgggccaatcactgctatctcccaagataccctggttgaaagatgtttgggaaaggtttcaagtactatctggagtaaaaggtgttactgttgggatacatgacaatgagcttctacggtcagatattcatttgagtttgaacttgggatacgtgttgagaaaaccagttctgctcaatttttaaatcctaggacactcggtaagcattcaaaatgttgatttatttctttgagaaaacatctagtaatcttgaaactctcttgtcttttttccctctccttctccagagtttgattttcttcccataaaatttcattatactgttggcagcaactattatttttgccttttgtacaaataatctttttagtttatattcaggcacagcagtatctgcgatgctatagtttacattacagttcactcttggtgttgtacattctttgggttttgacaaatgtataatgacatgtattacccattatagtatcatatgaaacagttcctctgccttaaaaatcctccgtgctcaacctattcatctttccctcaccccaaactcttggcaaccactaatctttttactgtatccataattttgccttttccagaatgtcatataattggaatcaagaaacagtatgtagccctttcagactggcttatttcacttagtaatatgcatttacagttcctccatgagtgttcatggcatcatggctcatttctttttaacacagaataatattccattgtctggatgtgccacacagtttgtttatttattcacctattgaaagacatcttggttgcttccaagtttgggaattataagtaaaattgctgtaaacatcggtgtgcaggtctttctgtggacatatattttcaactcacttgggtaagtactaaggaatacaattgctcgatgcgatggtaagggtatgtgttgttttgcagtgcatcaccaaactgccttccaaagtggctgtatcattcccccaccattttaaggcacagcctggccagccatgccaggatgtagcattgacttcttagataggtgaacatcccaattctttgtgcctatcttgagatatgctattatggacaatcacattccaaggcagcatagggcaaattcctatgtttcatgctcagtttaacaaatgtgtgttattagagggtgtgtctggatggaggtaacttatactgtgtccaactcacctattgctatgttggcgtgtgaaagttgagaagtgccacgatgtgtttgcacctgtaagacagggaaggcgtggctgtctcttcttcctgaaaaagcctcttggctttgacactgcccattggtgtctctttcccctttgctgttgctctcctgaggacatgttggtcattcctcctcattcactggggattcgcctcctgactcatagttttccttttcttaccccaccataatatccacccccgacttctcagttcctttaccttctcatctctaacaacatttttctcaccttccaccagcaacccactacccataatcaccctcagagccttcacagcaacagaatctacatgcctcagacatctcagtttcaaacaactcaccctttcagcaccacaacttacattttctgattcactcaccacaattccttgaagtcacagggcctgcaatctcttgacttttcctttgtctcacagcccatcagcccctctgttttctcatcacccctcattaatgtaaaccccaggatccatcttctcaccaggcccctgaactttcttctgttatttgctcctacccagcagaccccaatcctgactgaaattcactctgccttctccatgcctgtcctgagtagctccaagttgctgattaacaaccactggccaggctgagtggcatcatttgaagccatcatctcaagctgcagggggacattcatgctcctgacacgcctgttatactttactagttaatgtttccactttctgaagtgctccttcatatcttttttttgtcttcaaatctcctacactgttcccctgaatcctggctaatgggtagcctctatctccctgagaatacagaagccagacaagagttctcttctttcctcacaccagtttagaagtgcatctgaatttgcatctggcttctgattcctttctactacaagaaagaaagcctccctctcctaacaaataatatttcttccttgggttttggatgagctcactttaaggagttctggattagctcacttcaaggatgagctcacttcacctctcccttccctctcccttcccttcaacatccactcatgcctctgcatcatcagcccctccgtctccactgcatccttccttctttttttcccccctttaaaggagaggggcaatataacttacgtaaaataacatatgtaaaaataacaatccagaaattttttggtgtttgtttctcaatacccaccctcaaatgtaaccacttttctgatttctattagaaaatagattaattttccctgattttggacttcctataactggaataatatggtatatattttttggtatctggcttcttttgttcaatacaacatatttgtgattaatccatgctgttgtgtaggtcaatcatctttattgctgagtagtattccattgcaaggtcataccataatttgcttatccattcttctgttggtggaaattgcaggtgttaccagatttgagctcctataaacaaggctgctctggacattcttgtacaggtcttttggtggaaatatactttccttttcatttggaacttctggtcatagaataggtgtatatttaactttattaggagctaacagacagctcttcaaagtggctataccattttgcattctcataaaagcagtgtatgagggttctggttgcttaacttcctccacaaatataggataatcagtcattttgattttagtgattctaatgggtgtgaaaagtgctttggggtcataagattagcccccattagaagttatctattattattatcaccagatcacgactcaaacatttttaataaagggcacctgagttccttctttattgtaatcatgcctcaatcttcttcttgtcctaacccctccaaaaaccacatcataacccccaatattggccatacatctatttaagtattatgtgtaaatatatgttggtaaatatgttaaagtattggctttataaagaggacccagtagagacatcatcaatgccccccacaatacccagcgagtgcttggaaaatggctaggttcgtatttttctgcagctccctagaatataacagtctaccctactttgttctgggctctgtccccacatcttaggagttgcattctctttcgggctgcacagccctatgggacgtcaaaccttgcctttcttgacaactgatgggaggtccctaccatcagcaccttctccagtctatcaacctgggttggacgtccctacctagacacagcttctcttggggacgctgtggaggaaatcggggtctcgggtgtggctatatactcagggacagaagctagacgcgctccgcagcctgaggtgggccaggcacctgctgggctcggggtggcagagacagctgtgcggtcccagctgttcctgagcgcaccgctgagggacgcactcccttctacaacggctgcaccccaagtcctcctcccattcctatatttttctccatcccctgcccacgcttaattagttatctcctccagacccctccccactggcctcctcccttgcacacgcgagctgggcagggaagagagcgcccggctcagtactgcgcgcgccctgcggctgtccggggccgcgcggtggccaaagcacagcgcgggagagtctgcgatgtcagagaacggctccttcgccaactgctgcgaggcgggcgggtgggcagtgcgcccgggctggtcgggggctggcagcgcgcggccctccaggacccctcgacctccctgggtggctccagcgctgtccgcggtgctcatcgtcaccaccgccgtggacgtcgtgggcaacctcctggtgatcctctccgtgctcaggaaccgcaagctccggaacgcaggtgagcaccattcctgatgctgggtgctggcatcgggcccttccttgtcttctgatcttgtccctgaccccgggatatgcgctgccttttccctcctcagcccgggctcccctttcccttcactctaacctattccttaagtttgactctgcactcaaaagttagggtgagttttgcccctccgaagtgcggctgcccaggacgcgcttggcacagagggaattgcggaaagttttactggcgcgctttttggccgggcgccggcgctgtgggaacccacgctgctggatgccatcgctaccccgtcgcgctccaatgcgtgtctttccagaggtgcccacatcaggccacagaaatctcaccacctgtacttgacatcccacttccttccttgccaagcactgtagctttatgtagtagtcgcttagaaaatccttgctgaaaaaatgagttaatcaatggaagcatttcagtaggttttgtgtcaaaaacttatctccaggtcatctgaagacccaattccagttgacggagagtaaatgcagaaattgcagattctgcttggactgaactaaattgctttgaaatattgtggtcttttccgaagactgggaattcctgggattaactgtgaaaattaaagcaatgatttggctaaatcgtgttgtaatcctgaaaatatttttcctatttcaatccactctcatttcaatattcccctagtcaggtcttcaaagaaacaaaaccagagtggggggcagtatctgaactctagccctcacaggtcatggggcatgatgaccacttcagcttaggaaggagctcagtcacctgtttgttaattttg

SEQ ID NO: 5311 - DNA, 6000 bp, Homo sapiens
ctagtgaatgccatctcatcccctctttcaatcgctctctcgaatggttcctagtagatacaaaatggttttttctccaatgggaaaatagaacacagggagccactcagtttgctcccaacacccctttccagccactcatagcagctatcttggcaagtattctaggagtataggaaaatgaaaacaataaactcacacacctttataacatacacaaccagttctgtctacccagccaaggtatattcttcttatgtggaatgttgaactatatctgccaccccactaactggaaggcacctgcaccttagtatttctaagtcccgacattaacatttccccaggaaatcagaccctatcagtacccctcaaagctcaagtctgttagtgcagagccatacaactaatacccctacttatggggttaggaatggctactgctacaggaaccggaatagtcagtttatctacttcattatcctactaccacacactctcaaaggatttctcagacagtttgcaagagataacgaaatctatccttattctacaatcccaaatagactctttggcagcagcgactctccaaaacggccgaggcctagacctcctcactgctgagaaaggaggactgtgcaccttcttaggggaagagtgttgttttcacactaaccattcagggatagtatgatatgccacctggcgtttacaggaaaaggcttccaaaatcagacaatgcctttcaaactcttataccaacctctggagttgggcaacatggcttctcccctttctaggtcccatggcagccatcttactattacttgccttcgggccctgtatttttaaactccttgttaaatttgtttcctctaggatcgaggccatcaagctacagatggtcttaccaatggaaccccaaatgagctcaactaacaacttctaccgaggacccctggaccgacccgctggtcctttcactggcctaaagagttcccctctggaggatactacaactgcagggccccttctttgctcctatccagcaggaagtagctagagcagtcatcacccaattcccaacagcagttggggtgtcctgtttagaggggggattgagaggtgaagccagctgggcttctgggtcagatggggacttggagaaattttctgtctagctagaggattgtaaacacaccaatcagtgctctgtgtctagctaaaggtttgtaaacgcaccaatcagtactctgtaaaaacacagcaaccagcgctctgtgtctacctaaaggtttgtaaatgcaccaatcagcactctgtaaaaatgcaccaatcggtgctctgtgtgtagctaaagttttgtaaatgcaccaattatcactctgtgaaatggaccaatcagcgctctgtaaaatggaccaatcagcaagatgtgggcggggccaaataagtgaatacaagctggccaccagagcggcaagctgctcagcttcccttccatgctgtggaagctttgttcttttgttcttcacaataaatcttgctgctgctcactctttgggtccacactacctttaagaacagtaacactcaacacgagggcccgtggcttcattcttgaagtcagtgagaccaagaacccaccagaaggaatcaattccggacacactattttccaacaagttctccatctggcttctattttaaattcattaaaagtaggataacatcatatggaatgtaaaaaattgccaaaactgagggcaatttatgcaactgctgagattcactccagatcctcagaggaacttgctatgtaatgaaaaaagagatacacaatccatcatcccatcacaggaggcaaaatgaactaacttctaggccagaggagagagtaacaagggagggaaggattcattacaactggaggatcctggaaggcttcctaaaaagggggcatttgagcctaaaaaggggccatttgagcctatcggatgattagcttttggcaaggaaagaagggaaatggcacccatgatttcctgactcccagaaagcccctgtcccagctctgaatgtcccaactgacacattctcccaggccctacttattctctgcacctcccttggtataccccacttttcacaataatcactctttctaccttgcattatagttaattgtgtgcatgccttatttctcttgctaagccataaggtctttgaggaaatggaatccattcacttcatttctgcttccccatccactgagcccagaactggcccatcaccagcctctaatatatgcctggaatgtatggataaatgagtgtgaactgggccagttttaaaaagtgttcagattccttcagacatttatttaataatatgaattaaaacatcaactctgtgtgaggcatttgtgctaagtgttgaggataaaagtggtacacatgggcatgggcctaccctcaagaagccgatcacataaagtggtggcaaacactaaataaatgaataaatatttgttgagttgcaatggtgactatttttaagaaggaaaaatagagaacaatgacagatgaaatgtacctagattcacaaggtgccaggcactgggcactacccacgtgttaactcatttggtccttatcacagtcctaagaggtacaacctttttacagatgagaaaactgagacacaggagagtcaaagaactccccaagactaatagctagtaactagtgtggctagtattatgggagaatttcacaaagggacctaatctagtctgtctacttagggaaggctttcccagggaagtgacatcaagctgaggccagaagggtgaataaaggtgggccaggcaaagaggccactgtggggagtgttttgggtgggaaggcctggaggaggccaagggcttagctaacttgaagaactgaaaggaaagcagtgaagctggtggtgaggtaggcagaggccatgctaagaaatttgtattttatgctaaaaacaatgtacactttaagtagaaaagatgatccgactggagttttgaaaagctcatcctggcagctgtagaggagaatggagggggaccctgtctcacatatttcctatatgtggttaggagacaggatggtgagttgaattgggtattggcagtgcaggtggaggggtgtcagatttgctatatttaggagagagaagcaagagaatttgaaaattggttatggcagctgtgagaaatggagtgttgaagatggtgctccaggattccgacttgggtgcacaggtggctggtggtacatttagtaagatggggaagatggagttcaggtttaaggggaagatgaagactgaagtcctggccgttatgagtttgaagccctatgagccatctacgcggagagagctgtatacgctcttggatgtgtgtttagcggccaggctggggtggagaggtacatgtgggagttgaggcttgtatctgtggacccacagagaagggagccaagccctgccccaaggagccctcatgtttgcaggtcctgcctgcttcaaatgttactggtgataacctacatgtcacatttgacagggcttccaaactaagccatctaagaaaggtcttatgattcatggcttagatcctgtccctgagtaaaaaatcttactgtgagtccttcaaatccttttgtcagttcctcaaactgctgatgtactgattagtatgtaaaatactgacattgaaaagaacactgacttgtttctgaatcatataaactttgattttcttgtgcacaaaacattttagcctgtatgttgtcatctgcagccagtgactgtaacctgtgtaccataccctccgatgaaaaaaatcccacctctgatataaggggtcctcctcccttttcctaaactttcttctaaaacccttccaacgtgtaacaaattttgaaacatgcccaactttgctggtaagtcttcttgggtggatcctcacatttagcttccaataaatcaaattatttctacttcaacagccttaatttccgtggacactggtcagagtatttcctcctgtctttccatcatccacttcctatgagctgttcagaagcagctctctgcagccccaacacccacctacctgcaggcccccctctctctgctggctcccggaacaaggctctgattgggatggcagaggaaagagaaacgggaccagcagcgctactcaggcctcgaaactccacactcactaccgtttccgcgccaccctctcacgcggagctcctggaagggtccagcgctccctctgcaaggcaccgtcggtctacaccgctcgattggccttttatggcactgactgttctttgaagcttttgcagctccttctaacccgatttcaccgtgttggaaatgttgggggtggggcgtaaagggggccatcccatccacagaaagagtcgcttgcagaaatgattttaaaactcccgggtgccaggacgtgaggagaatccggcagggagggacgggagaatttccaaaggtgccgctcagtgggaaaatccctttgtcagagagtggcccgaggggcgcggaatgcagccgcgcccaccccgccccgcgtcaccgcgtcttccggaagctccacgcccctgggtacttggtttccccgcatggttccggaagagcgcggcgcagctggctgtgagcgcagggctatcccggcggccgcttcggcagccagggcggcgcggaggggcagggccagagggaagcgctttgttccgcgcgtggttcccgcgcctgggggtgcgcgggagaggcgcgaatccgagtgccgcgcgcggcccggggacttgcacgggcgtgcggggtggaaccgcaggaagcggagctctcgggttcccgccccgccccgccccgccggcggcggaggcagcgagcgcgagagcccagcggagtcgctgggagcctgaggcaccgagacacaaaggcaggcgggatgcgggagcaggcaaagggaaagcgaaagccgcgcgcccggccggtgactgggtgaaggcgccgcgcagctttcccgacgccggctgtacccggacctcctggtcgagcctggcgcgccgcagccatggccatcgctcaactggccacggagtacgtgttctcggatttcttgctgaaggagcccacggagcccaagttcaaggggctgcgactggagctggctgtggacaagatggtcacgtgcattgcggtggggctgcccctgctgctcatctcgctggccttcgcgcaggagatctcgattggtaagcctcgcccaggacggaggggagtggccgccccggtctggcccggtgagctgcgattttacggctcacaggcccgagtctgggtacgcccagctgtgatggtcgtgagcgtcaggaagggcagtggccccagttttatggtccaaagcgttctttgcccaggtgtttcattggtaccctggtctactctgctcgcatccctactcctcagttcttttgttcctcatgcccctctgatcggactgtggcttatagtttatgttccacccttagaactggcaccttgccaccagatttgccaagaatagctgtgtccccgtttttcacccctgtctcctacatatttgtccagccgcctaaaattttacaccagagaagttcctgagtggctacatggaggatgtgaagaccggtgctccatgagaagtgtgttctttcagtgtcttacatataattggtatttgctgagatcttagctctctagggttgtgaatgataggaaatatctgcacttggcaggcattagagggatcctcaacttggacggtcttacaaatgtgagatgaacaagtccccttcctgtaaattatcatttgagcttcataacagttgtgtgagattggaaagtctggtggtttgggcaggatcacgtggctacgtgccttacctt

SEQ ID NO: 5312 - DNA, 6000 bp, Homo sapiens
ctgtcaagtaagtgtacaggaagaacttgagtgcataaaaagtataacactaaagtaaatataataaattcccatattgactatctataacaatttcttttagggccagtacattttcacacttagataaaaagaaaagcacttacaaatttatgttaggtttatttttctttctttttttttttttttgacaaagtcaggcttaagtgcagtgacatgatttcggctcactgcaacctccgcctcccaggttttagtgattttcatgcttcagcctcccgagtagctggaactgcaggcatgcgatactacgcccagctaattttttttttttttgtatttttagaagacataggttttcaccatgttggccacgctggtttcgaactcctgaccttatgtgatctgcccacctcggcctctcaaagtgctgagattacaggtgtgagccaccgctccagcagttttatttttctgtaaaagattttgcagggcaatgaacaatagattgtgggtgtcattgattgtacacaatttttgattttttaaccaacagtccattccatacttatctgtccaactatgcaaggttaaaaaattgttcctgacaaaggaaactgcctccacctatttgcacacagattagccattccaaccacacctgctcactgacgccctcagcatttcctggtaagtacacaatgtaggaagggactcaactgcctttttctctcttcaaggaaaaaaaattaaaacatacttagcaggccaatgttcagacacagaaatctcagagccaaccaagggtaacaacccatttgagggtagcctgaatctcagggagtttatgctgacagagcttggctccgcctagaaagctaggcagtcagaacctattctggggcttccataggaaatatcaaatctgtctctggtgagtaacactgggagagcctttaaaatgaactaggatggtcttattatcaaatgaactatatccttgagaaagaataaggaatgagttcgaattttaggaaccacagttggcctggttcttgctcccaaagaattctgtccaatataaaattttggaaccgaataggtcacttttggcatgttgtgagttcattgctcattcagtgtcataaattaagtcttgaattatggagctctcttctacactacttttgcaaccctcagggtccaaagacccttctccatgcccatctcatcttcatgctggcaactgaaagctagttctttctgtgcaatattttgtggaaactgagaggcctttaaatgcacaaagaatcatttgttaccaaatgtaaaagaatcatggactattcttccatgttcgaaatctaagatgattcagagttcatttagtccagcctcttcattgtaagaatagtaatatctccttccacatgggtagcagacatgtttttgcccacctagcatcctttccctctttttcaggtaacaccacctcattttttcttttgggtaacttctctccccgcactgttattcaagaataacagattattccacatctgttattcagatgggactgattctagctccagaggagggtctaaagagagtacccattccctgaccacagtgattgcttcaagaatgagcactcatcccaggtttggccaatgacagcagtctaatttgatatcatttctgatgcctgttgccaggactatgcttaatacatgtacaatattttccactgaaagcttaagggacatttcaaggtcatagcaagtcattcacatagccaagatctccggatgtcttctcattttgtagtggggaaagagataccaacagataatttcggtgatacattaagggcatacattcattcaacaaatattcactactagaaacctggttccgtggtgggtgttcaggatggaattatgaatgaaacagtcatgatctctggatgtcccatgatgttctgaaaggtgcagcatgtgtgagagtgcacaggagggccatgtaaactaccctggatatatgtttgtgggtatccagaaaggcttcccagagaaagaaaccagcctcctaaatctctctgaatctatcctcctttaattttcttcctcatcctcacagctactgtctcagttcaggccctctttatttcacatctgaattacagcaataactttccaactgcacaccaccacacccctactcttaccctatttttacccaactcactctttactaatgacagaatgattttttcttagaaacttttttctaaagtataatgtccacccataaaagtacatatgtaagcatacagtttgatgaacttccataaccaaacacacccattaaccagagcctacattaacagtcagcattccgcagcccccccgtgtccccatccatatactcaccctccttatacgtaataaaaataagaattcattttaaaaatgaatatcgcttccttcctttgttaaagccttccaaggactttctcgacagcctgcaggataaacaccatctccttcgccaaactataccctagtaattcctcgcctactgccccagtcttccctccctggcctctgcagtgctgctccctctgtggcaactaacacctcagccctcttcctctgcattgtaatgattcctaattattccaggagccacctcctcaaagccttccatgatcccttccctccccactatctgtttctctcgtagatttttgaaggtagaaaccgtgttttgcatttgtttcccaatttgttaaatgaacaagtgagtaaatttattaatttcccataactcctttcctccctttccttctcctctaccctaccaatggctcttttaaaataagaacaatccagtcccctgtgaatgtttgtgcatgtatgagatgcacaatgatcacgtatgaccttcaaccagcaatttgcgaagtcacgactggtttccattcatccagacacaccttactacctagtatcccctcctcccacatcaaataagggtatagtaggggcagtttgtggtctcaaccctaccgaggtaagagggcacaaagaaaattgatatgcatgagacctcgggcattcttcaggtaaaaagatggcttaattggaacattcggaggcttaagagaaaatcgggagtggtggaaggaagcaatcaagcagggtaatatttcccaaatgcctaccggccacgtgccagacacaatgttaggctctatctgtgatgtcttatttaactgaagagggagaagaatgtgaataaatggctggattcttgaattgcataaaaagagaagccaatacactttttcctttatttcgtttaaacaagtaatttgtgcatttatagctttttcttttaattaaaagtaagagtggaaaaaagtcactgaaatgtctaatttcaaataaaatatttgatttctaatttctgtttttcaaacaaacaaaaaaccccagaagcattatgaaaggttttactgtgcaggaggaaatgttactaggttgatgggcctagccagaacacctaacatcctccatctagtctccaaactgaggctgtggccctgcagagagcgccacccggaagccacttttatagaagcttttacacacaatgcttgatttttttttttttttttccgagacggagtctcgctttgtcgcccaggctggagtgcagtggcgcgatctgggctcactgcaagctccgcctcctgggttgacgccattctcctgcctcagcttcccgagtagctgggactacaggcgcccgccaccaagcctggctaatttttttttatttttagtggagacagagtttcaccgtgttagccaggatggtctcgatctcctgacctcgggatccgcccgcctcggcctcccaaagtgctgggagtataggcgtgagccaccgcgcctggcctatacttgatttttaatgaaaacattcttaaattcatatggctaacgcaaatttattttctgtaggcataacatcaaaaacacctggcaggattgccccattcccagcactgtctatttctcccctagtatcagtgggactccactgatgcacagctgtgatctactaaaacttctctcaaaactttctcctctccttaggtcagcagccccgcccctgatctatttggaaatcccctgaataaaagttgaatatcataaaccaaagcgaacacccagaaattcaaattcaacccgtaggtaaaaaatttctcaagtgactgtagacgtagatgtctccagtgtcgcctaataaggtagaagaggccagtgcgatactgtctttacacccttaacttgggtgctagaatatttatcttcgtcatcattttatcatccaaactattttgcataactttcatgggtgcagaaaatgttttttaagtgcttggtaaaattaatagtgatattcattcattcatctcactgaacaggcaataaattccttgacgacaagggccttgggggggtcacatcttcatctttggtttatgagtcctgtgcgtcttggtacaagcaatactactatgagccggcaagtcagacttatttggtaggggaccaaaggaaagaacatgttttgattgctaagaaaacattttgttctctatcctttactgggctggcaggcaaaggaaatgttcttatgagcactcacattgaaaacttaagttcttcaccaaatgcagagactctgaaggccacgccgctgcgggctgcctccacaattcgaccgtctcggcgggccacgagatcctggccacggatgcggtggccgcgcctctgctcgcacgttcccccggcctctggactccctccctccctcaatccctccctccggcgggcgtcgctggcgggtggctaggcccaacggcaggaagccgacgctatcctccgttccgcggcgccgggtccgccttccgtctgttctagggcctgctcctgcgcggcagctgctttagaaggtctcgagcctcctgtaccttcccagggatgaaccgggccttccctctggaaggcgagggttcgggccacagtgagcgagggccagggcggtgggcgcgcgcagagggaaaccggatcagttgagagagaatcaagagtagcggatgaggcgcttgtggggcgcggcccggaagccctcgggcgcgggctgggagaaggagtgggcggaggcgccgcaggaggctcccggggcctggtcgggccggctgggccccgggcgcagtggaagaaagggacgggcggtgcccggttgggcgtcctggccagctcaccttgccctggcggctcgccccgcccggcacttgggaggagcagggcagggcccgcggcctttgcattctgggaccgcccccttccattcccgggccagcggcgagcggcagcgacggctggagccgcagctacagcatgagagccggtgccgctcctccacgcctgcggacgcgtggcgagcggaggcagcgctgcctgttcgcgccatgggggcaccgtggggctcgccgacggcggcggcgggcgggcggcgcgggtggcgccgaggccgggggctgccatggaccgtctgtgtgctggcggccgccggcttgacgtgtacggcgctgatcacctacgcttgctgggggcagctgccgccgctgccctgggcgtcgccaaccccgtcgcgaccggtgggcgtgctgctgtggtgggagcccttcggggggcgcgatagcgccccgaggccgccccctgactgccggctgcgcttcaacatcagcggctgccgcctgctcaccgaccgcgcgtcctacggagaggctcaggccgtgcttttccaccaccgcgacctcgtgaaggggccccccgactggcccccgccctggggcatccaggcgcacactgccgaggaggtggatctgcgcgtgttggactacgaggaggcagcggcggc

SEQ ID NO: 5313 - DNA, 6000 bp, Homo sapiens
cacaaagtatatcagattgaggggtggaagaatttagttcctggtccacaggaggcatacagtctagttctacacctaaagatctacacaaaatgttttaagctggattctaagtacattttggaaatattgtagatgagaccaggaatgtctaatatataaaggtgagaatcatatttgatagcaatatttttgaaggatgattattttgatggagggccaaatatcaaagacaggtcaagttaatgtacctgacagacttgggagacagggaagagatgggaaatgatcaagatgcaacacacatatggccattctttaaaaccataaagaacaaattagactaattctaagaaaccattagacatttttatcccatactgagaagaatggtatgtaaacagtgacaatacagaggtatttacctggtcatgagcaaatgaatctttggttttgtttctttatggaaacaactttatatccagaggtcttggtgagagaatgctacataaaagaaaaattagacatctgtaaaggtaagtgaattaaaactgatagagatcctgagacttaaaatatatccaagaaaaaaaaatagaaatgcatatctaaaggaatctactggatgaaaactaagtaaactttacctttaaattagtaagatttcaacttttacttctattttctaaaatcttaattaactgcaaatgtttatggtttgcataaatagttggaccaaaatgtcacaaagggtgagcataaattccacctacaggagattagatatttgcagcttctgtaagtaagagttggtactgtgaccaccaaaagcttgaccaccacagttgaattagagctcctctctcatacttcttaatggttttggttgccgatgttatcaagacatccacaaagtagactatgttctttagcgttgtttactgaagcagctgttaaattaattaagttggtatattttccaagtctgattaagatatgtttacttctgctttcacaaaacagctgtgatatgagtactgagacacatcttctaagaaactcaaaatataattaaaatcatattttgtccagttcaagtaaaagtttacttttgcttcttcatgtgttactttgcacttatagggaatactggcatatattgaaaatgcaagattttgattcctttaatttttatcttagtacttacccattcaccattattggtaacacattaacatagaggattaaaacatcaaaacagaaaatgcaaatgctaaaagaagctccagtaggcaaggcagatgatccaagaaagatgactgatctagacatgaattcaccattggtctgcttccctacagttatgctatgatttgatggaacataataatagttatgatctgttaactagaacctagaacttatctgagtcaaatgaagggaaagagaaaggagggcatgatttcaataaaaatctgttacacaaataagacaaaagctcagaggcacctcaactgctacagatgtgctgcatctgcttgcttgcccattggggacgatgagataaagagattaagacatttacacaaagatggctagacaacaagatcagatcagcaacatgacagctaggttgaggtgtcataaccatagcatagagaaagtgacctactgaaccacttaccccacttacaaacaatgttttaattaacttaatgtacaaatgatattttaccagggtacaggatgagctggttaattcaaaaatgtcattagcatcaaacagagaaaaccagtgatcttttaataatgccattttattaagaaaacagcattggaatttaataatggggcatacatacttttatatcttttaaagacaaatcttacatcaaaacaactataacttaaaatcccattctcacatgtcaatagtagaaaatcttggtcatggtatgtgaaaagatttgatgtttacttggaaaacacaaggtagtttgtttctttttagtggaactctaacaaggagttttgtttgtttgtttcttattttaagcactgttgtttctctaattccagacattgacctgcttaaacctgaacactgtggatataaaaggatacagaagtgtacctgatctatagagcccttactctccaagcagaaaattgtaaaaatatacagtacataagttaactccataacagcaaaattctaaagaaagatgagtcagatagactaacagtttgtctgttacatatatagatattaatagggaatatataattgtatattattacaaattagaacattaaaagtcataaaagacatgagaataaatatagtcactctttctgggtcctgaatgaagtgtagccaggtaacctagtcacccccaaataatgattgaagtcaacattttaaatttgaactgacagaaatagaccttactatttttaattaaacagattcaacgtttcctttctctccctctaaagcatcagataacttcgcaaggaaaagtgctattacattatctacttgtttcaaaaatatattcacaccatagtcttgtgataatattgctctctttataaaaagtagaaacattaaaagcttttatttagttcttgcttaagaaaggagaaatatttagtccatttacatcatgtaaaaggtaaattttcttgttcatgttaatggtaggagggcaccatgaatcatgtgaccgatagcatttccttctttacattggctgctaacaaagttaatggcagacctagcaccatttgtaacaaaaacatcaatgcagttttctctataaacctcatttctggcttcatcttatctctcctcctatcactttaccgtttgtcttgatctcactgacctacattttttattcatttttttaaactgaatagatttttataagccaacttacatcctttctagggcaaagctagttgaaagaaattatgtgacataatgactcaaaatgcccaaattatcggatcatgggtaatatagaatggtgttctaagaagggaagagaactttcagaaagctttctacactcccgatccctctttcaggctgcatgtgctcaattatacacttttaaaggcaaaaacctcatcgaacaataaaaagaatgcgttagagctcctacactttgaatttattttgtgatgtatttaatgtggttataaaagtcctggtagttctctctgtgaaccgacagcctgacagaggagaagagccagtggggcagagaaaaagccacagaaggggaatctccacaacgatccctcagttaacacataaagaagataacctagttactggaaagcaggaacacgaatataaaaagtatggaagagtggagaagtattaaatgcacacaaatttgtctttgctacagaacaagcaatcagcctagatcctgaggatagcgattaaaagcagagactgggtgtttgtacatcattggatgaatgagaagcagccaagaaacaggaaaagactaattttaattaccagaaaaactgcaagagaaagaacacagggctagtggtagacggcttccagctacaggctgcctggcactgtactctccttgccaattagagccagtcagaccccatcgggggattcagtgagcagaagaatcagcgtcagtccagggtcaggctgctctcaaacacacatgaaaaacggacaccagcggacacggggtgcgaccctagactcccatgcagtttcttatacagacacagagatagaaagcagtacgtgggatttcctttccattaaatacaggtgcaaaccacattctctatggaaatatattgcaaaggaaatgttatataatttatttaacaaatacccaattaccatcagcccaatcgtgggaattggaaaacgactcaaagactgagaggaaaaaaaaaaaaaaagtagagaggaggactggcagaacaatggcactaaagctgccacactgtggatttactacctgtgttatttttccaattacagccattgtaatataaaaattccgaaaaaaaggttgctgagaccattccttcgcttttttttagaactgagtcaacaccccaaatcaaagagaaatataaacaggcagagcctgatagtccttagatgaaacgcgtaagtgcagaaacaaaagagaagtgcttcccattcaggacttaagaaaattctgcaaagtgaaaaagtccactctcaaaccgacctaagtgaacgcgtcagtctgtgctgctgctgtcagaggtgtgagccggggactacaggaatcagagtgaagacaggagcggaggaagggactctcgcctggatctcccgtgccgactccagccagcacgtttgctttgtaatctatgaatgttaaatacggaggggttgcagagcagaaacgctcggggaaggggggcaggtcctctgtacttagcagggaaggaaaatgccggttgactagtgagacgagtggagaaacacagagcaccctccgggaggcgcacagttcgttaagcccagggacatgctcaatgaacctttgcagcaagaggcagtgaggcgctggacgcgggcgccggtgacagcgcgggcggccggggaggggcgaggggccgccccgggaggacacagccagtcagaggcgcggggcgcagggcgcgcggacgcattggaggaaaacacgcgagccccaaacacaccagccgcaggaggcgccgcacctacttcccaatataaccaactacggcgtgggggagcggaactgcgagaaggcggcagccaaagtgccattaaagctcggggcggagaggatgcgttacctgggtcccgtctgctgcgagaggcagggcaagctggaggattccctctgaatgattaagaactccgcaattcgcctctgccacaggctgcaaaggacccgaggaaccgctctctctgaactgtgctgatgggcaggaggatgggagacaggaattgagagtcacagaggaaggacagtggagtctggcatcttattggtaagtggctgacattcctttgccagtgactgcgttctgtgattgtgcacttcatctcccagccacttaggatttttgacacactctgttctgcaaagccatcctttcttgccatgttgccagaatgtaaaaactgtaagatgaagcttttttaaataaaggaaacaaaacacgactttatttcctgctgggattttatggcaaaaagttgaaacaagagtaaatataacctatttgtatatctcctaatgccacccaaaataagagtaagcaattcctacacgcaaattgcaaattgtaaggcaataaatgccaggataaagtgaggatgtttctacaaaagaaactaaatgtttggaaaataggatgccgttctcaggtactgaatgtatgccttatgtttgagcaatgagtttccgagactaaataattgggcatctggcattgcaataacttgttaaaattcagtagggatgctctataagtggagttctacaaagttcgtgagactgagaaaaactgtatcttggattatgctgagcttttttctaaaggttgtataggattgtgatagattaaaaaattatgttcagacatccttaccatgttttgtagggagatatacggaagagaatatcaatttgcacatacacaaacctgagaattactctgatgacctgaacaataagttgtttcaactatatttatttgcgaaagaaccagaatccactaaatattttagaattatattacttttaaatcttagaactgttctcccaagaaaaatacaatttcatgtggtaatttaaatgcaggtgagaagcaaaaaacttttaaactgttgtatgttcaatgccttacctacatttcattcatttgtttcttaatttaaaagagaaaatcatttagagggtcaatacttctactttgattctcaattac

SEQ ID NO: 5314 - DNA, 6000 bp, Homo sapiens; identical to SEQ ID NO: 3221

SEQ ID NO: 5315 - DNA, 6000 bp, Homo sapiens
ctgatgccagaaaaaaatcatcataacaactgcataaatatatgatgggtgggatttgcaaaacaccccttgaagctgtgcagtgcacaacccacacaaaggagcactggttctatgtcaacctctgtctcatttctcccgcgtttgggagtccccagcaccattgagctggattgactgatgagtgcccgctagtctttaaccagtgcctgagccagccttgaacagggaggaagcacatcagttgccccagccccgccatgggttagagtttgtaagtaatttctcacgtcaatcagatttggaacatgagaagctaagagtgagctgggagggtcccgagagactttcactctttagctttgtgggctcaagtttacctcctggtccttacactttcctggctcatgctcagttctttggataagccagagaataaatagattaagttggactttctcaaaattaaaaatgttactatatggaaaaaacactataaacagagtgaaaaggcaacccatggaataggaaaatattttcaaatcatatatctgatgagagattggtatctaccacatataaagaattcctatgacttaacaataacagaacaaacaacccagtaaaacaaacaaacaaacaaacaaacaaaaacgggaagaagattttcagcctctcttagcctcaggtcttaagttgtcttaagacctgtctcttgtgttggtcttaagatgctgtgcttctcagactccattttgcctgtatcaatagtgaaataaagttcttagggtatctgtgagtcctaagatcaaacctggggtctccattgtcaataacaataggaaagaagctctaaattagggcactattccaagttcatttttcaagttgtgtaagtcaagctagtgcataaggtcttggtggtgctgagcaagagttaacaccaatttaacttactttataacctgataataaagtcctcacattaaaagagaagaaaagaaaactgtcttttaagcctccttctcccacaagcttgcctccctgccattatcccactactccttcaacatcacactgctggagagagtagtccacacccctggcttctctctcctcccctccctttcatttctgggaccatgatgtctccttttccctccattccatgaatactgttcccccaggggccactaaggactttccaatggtcaaattcaggaaattcttttaaatcttcctcttttttgaccacctcaaagctttcttctttaggttttgtgacattgtcatgtttcaattttctttctagctgtctgtttttcagtatttcattgataagtccttctgcctgtaccttaaacattgatgttctctgggccctctctgtctgtcttccacacatttccacttggatgtctctgaaacatctcagacttagcatgtgcagagctgacatcattgcttctttgcttatcacctggtctgaatctgcccctcttcttctgctccctgtcaatgttaccagcaactattcaattgcccacactggacccttagcggttgtcactttctcaagatctgtatcacatacacccgtatagctccactaaacaaaatggtaatccctctccgccccagactctctgtccccttatctctccttattgctttccttagcacttatcaccatctgtacactactaaatgtttaaggatttattctctgtcttcccccataagaaggaaatcccatgagggcaaaggctctactttgtccacggctacatccccagtgtccagagcagtgccaggcacttagttgagaatccataaatatttgttgaatgaatgaaaggaacttggatttcttcctctgcctcatacttccatcttcacaacatacccaggtccacctgttcttatcttatcttggaattgcaaatctgggctcctttttgcctcctttcccactgtcgctttcttaattagtccctgtcaccctatccagagctatcatggcctcctagcttgtctccttgccatggctgtcttcttggaccattctctgcttcctctctaaagaactttctctctaaagcacagtctggagtctccttcctctgcctcaatcccatggatgttcactttgtagatgctcattaatgtgtgcctgacagcctgggcctctctctggggagagaggtccagtgagggccacagttttgtccattttaaaatgaggatcaggaagggattgaaacgcaacagagctcacagatgtaggcaccgactagcggagatatacagaattggagacaagtgacatatcctgttaaaagaatttgggagtgatactgggagtgtggactggaatgactggggcagcattctagaatgaatcattacaacagagatcaacaaccacacggggtagggaggggctggagagagagagggaaaaaaaagaaattcagtcatactcaagtgagattggatttccacacttgcctacattgaaaagctaaaaatagggacatttggggagaaaaatagtgaggagtcttttaattctactgacaggactataaggagggaggtttgcagggaagaatgtgtctctcactcttaggggcaaaattggaaaaatttttattttgggggccccaaccttcactctccccactctaccccctgcctgttctctctatctttcctcaccatcaaaacctcttttttaaggaaagagtctgataacattcatttacataaatctgtaatatttaatgtggtgattttagatgttagaagcagaagtctgaaatcaaagacacttaaatacagcaaccattaaaaaaagacgtatataattcactgcatctagcacagggctaaacccagtggttgctccgcaaatatttgttgaaagatgttcaaaaaagccttatttatattatcaaactccacaaacaatataaatatgcaaaaatggggaaaccattgcaaaatcatccatatgaagaaatattacatagctataaaaatatctagaaaagctttttaatgatccagaggaataaatgcttatactgatgttaggcaaaatcagcaggattcaaattgctactataatatgtcaattataaaaatcatatgcacatacagaagacaaaatctatgagtatctctggaatctgtgggatttggggttatttttagttctttctacttttctgtacttttgaattgtttatacttggaatgagagaaatagcccaaagtaaacgttgtggaagatttacttgggggaagaaatacttttcaggggtccaagctaattacactgtactggtgtggcccacttggtctattatagaggaggaaagtggggaagagatggggcctgtccaataaggatggatgtcctgacagtagaggatggacttttaaaaactgctacagcggctgggtgcggtagctcacggctgtaatcctagcactttgggaggctgaggtgggcagatcacgaggtcaggagttcgagaccggcctgaccaacatggtgaaacaccgtctctactaaaaatacaaaaattagctgggcgtggtggcgcgcgcctgtaatcccagctactcaggaggctgaggcagcagaatcgcttgaaccgggagcagaggttgcagtgagcagagatggcgccactgcactgcagcctgggcgacagagcgaggctccatctcaaaaaaacaaaacagaaacaaaacaaaacaaaacaaaacaaaaaacctgctacaggagtggggaggccgacctttgaagaaaaacggagtacccggtaacattagtgctttaatgcctttgaacttatgcagacttcctctgttagagggtttcagtgttctaggctaatgggttaacctgacatctagaacacctttctcacattagttccttacatacccaagccttcaggtgctgagacatgattcttttcaccccgctttctccaccccctacttttgaaaacacgggtggaattttaattaaagcctattgtgttggtacctcagtaatattatacattaatatctttaagaattaaggtcacgtccccatgtaagaaaatattatttaatgacgcttctatatcataatacctatataaaagcctggctattttaataaagagaccacagatttcagaatttataaacaggaaaacattttcttcgggttatttctggaaatctcttccaaacatcggagttttcttctaacttaagtctcttcccacctccttcccaggggatctgctgaagggtgttgtatgtctctctgtgggagagcaaacttcacagttaggataaaacaaacaaacaaacaatatccaaacaacacccagcaacggcaacccccatccctctccaaagttctaatttcccgcacttaaagtcctgggctatccttgtgttgcaaggatcttagaatcgaaatggagggatttgacaactttacctaaccaaatctaaaattttgcttttattatttactagttatcaaaatatgcaaactgctgattaaggaaggctgggtagcaggagcgcctgcgaaggcgtagggtagaagtgtgaaaagaaatcccagctctcccagggagactgcgtgtgaaagagcccggctcccccaaaagctccaggccgcgttttgcaggcttccgcatctgcctccctgtctctcttacctccttgatgttcggcactatttgtggccggcgtggtggaaggacacagtgaggttctcacccccgccccccgctcctcgctcccatcccagttccatcaaaacgaacccgggccagcgcaaggatctccgagttgcgagtgtgctgaggctgggactgtcactcattctccgatcagcgcgtgaacgcagctcggctgccgctggcaggaaacaattctgcaaaaataatcatactcagcctggcaattgtctgcccctaggtctgtcgctcagccgccgtccacactcgctgcaggggggggggcacagaatttaccgcggcaagacatccctcccagccagcagattacaatgctgccaaactaaggatttcatttggactttgtttttcctgggaactgcaggtacattttttttttttttaattctcaatctggtttgctaattaccccttcctcctactcctaggaggaacgctattattttgggtggttttacgtggactgctaaggctggtcattttcgtttagctgtgaaaggagcgcgtcgcccttgctgcccagccgaaccccgctccctccagggctgcgctgcacggggctgcctccccgagccgccagcgcccggcgcccctccggcgcgtccgcccttcccactttgtgcgcccgcggcggtgggagcagagccggccggctcctggggactcagcggccgcgctggtgatgggcagcgctccttccccaaaggcgggcggcggggcgggggaggtcgcggctcgggtggtgccgccgcacgggctcggattccgagggggaagtggcttgtcagccccggctccgggaagagtgaacaataaggctagggcagccgccccagatcgttatattcctgggtctaataaagtcaggatcgctgctttgcttcccccgccccagaagaataacggtttgcaaaatggggcaaaatgggcagaatcgcacggccgttgttgttggtgtgaccgttgttgcaccccagtcgacatgacgttagtttttcatttgccaaattgctggttagttgcaaagcctaccctcggccgcgagcactgaaggatgggagggtcgagcgccgcgttttgacaggaggaagtgcggaggggcggagggcgaggagggcgtgattggggctgcctggtgtgtgcgcgcgcgtgtgcgcgcgtgtgtctttacacgcgccgcgtgcccagtgttgcacggggcgggagaagaatggca

SEQ ID NO: 5316 - DNA, 6000 bp, Homo sapiens
ctggtgtgaataccagaatacacagaactttagggtggacttttcagaacactgaaaacaaaacaaaataaacatgtggattccgtgtttctttttcttccttttcaagtatagtaatcacatgcctgacgtaactcctattctgggtgctctccatgaggcagcaggatacattggaatagcctgcattcaaatcctggctctgccctgagctaggtattaacctatgttagccactgtggttttctcatcttaaaacaagagtgccagtttacccactttccagggttcttaaaaaatgccatattccctaatctccaagtaaacacttccttctgtctggaataccctccctatccactcttcattagctacctcctattcctccctcaagtctcaacttagatgtcacctccttcaggaagttttccttatcttctatcccaagtgtggtttagtgcctctgtcttttgtccagtcagcctgtacttgccttcccagagcacttaccactgtgtattaaaatctctgttcactttctgcctctgcccagattgcttcttggggaaagggacttagttttgatcaccattttattcctagcatcattatagcatctggcccacaacgagtgtgcagtaaatattgtcatatgaacgaattaaaaattttgatcctccttcaaaatggtaacgcgtaagactcttatacgtcaacaaaaaataaaagtaaagacaaggtcaggaactggccaggtgcgttggctcacgcctgtaatcccagcactttgggaggctgaggcagatggatcacttgaagtcaggagtttgagaccagcctggccaacatggtgaaaccccgtatctacctaaaaatacaaaaatttcgccaggcgtggtggtgggtgcctgtaatcccagctacttggaaggctaagacatgagaatcacttgaacctgagagatggaggttgcagtgagccgagattgtgccgctgcactccagcctgggcaacagagagagacgctgtcttaaaaaaaaaaaaaaaaaaaaaaaattgccgggcgcggtggctcacccctgtaatcccagcactttgggaggccgatgcggccatatcacgaggtcaggagattgagaccatcctggctaacacggtaaaaccccgtctctactaaaaaaatacaaaaaattagccgggcgtggtggcggatgcctgtagtcccagctactcgggaggtgaggcagcagaatggcatgaacccggaaggcagagcttgcagtgagccaagatcgggccactgcactccagcctgggtgacagagcaagactctgtctcaaaaaaaaaaaaaaaaagttctggaagaaacatcacagtgtctttctcttttaaaaggtcggggtaactaagtagttgtttcagaaggcagctacaccccttgggtcatgacagggtactcctgagcaatttaccatcttaattcctcacttgagcaacagagagtataaaaaaaatcttcacacattaaaaaagcctggggcttgccctctccactcatctgggggtgtggcaacaagagctgtctcctgagggtggcccaggctgatgatgtgtcctggtaggcctgcagatatcactctcccccatccatgtagctgaggcacccctgccttcgctgactatcgtcaagagtgaggtctttctagtcccaatgtagactcttagatacaggatgggatctcccaactcccacccccagccaacctggcacactttcagtccaggccactgggcagagagatttccgctctgaaaatattgaaatagggtttatatctccacaaaccatggggataatgcctcactaactcctagaccacgcacagtgctggtgtcacacacctaagttaggggccctttctcaaaagctgcagtaaataaggccctccatgtgggcattgggcactgccagggaaacctcccaggagcaggtgatagttacaggaggcagtcaaatgcctaggcagatagggcgggtccctggtgaaaccccacctccaagttgaagacaacttaaaacctgaaagccaagctgcaagttaaatcttcagaccagattgagaacctgtcttcccatttggcacgctttcctctgattgatccccacccttcacctactttacatacacctaccctttcctaattggttttctacactgtcgtacccacctttgagtggtattttcactttaaccttttttgcatactcacaaaccaatcggcatgcactccctattctgagtccagaaaaagccctggatccagccacactgagaaaaaaaaacacccaactgtgggagcggggaaccacccccctccccatcccctctctgctgagagctggtccatcactcaataaaattattctctgcccatcctcacccttcaactgtcagcgaattctcattcttcttgaacacaggacaagagctcaggaacaaatgaaggtacaaactacaatacaggcagggcggggtatggccgggtgggtggggcagcaggcctggagtggggccttgctggccagaaatgtcctgagcccctcttctttggtttgtctgagaacaagggcagggcttgagggatgcacacacagtcccaaacacacatatgcacttggcaaacagacaacgttctccacaccacaatgaaatccaaatccacagactggccactgcaaatcatatatgactgcaagtgcacacacacacacacacacacacacacacacacacacacactttgaagcaggtgtcagcctccaagaaaaagtgatggacagtctgtctctcatatcctcacatatttggttcacctggagatggcctcagatgagccaagtgacacagaggtgcgagagactgaggatgtgctgaggtgttacccagcactccagtagtgctattacccaacacaaaaattggtctgaatatcagatttcaagcaagcaagggaaacccagaagagactgggagaagtccttatggaggctaaagcaactccatgttggatgctaatccacagttttggccgtgttggctttggagcctcccagaagacctctgagattcccaatttatcaattgctccttgtgtaagtgcaaacacttactgtaaatccggcccttaggtcaaacaaccttgatgttatcatacttcaactgtcctacacatcttttctgaatcacccttcccctgtggtctataagccctggtcctgggggtgaatcatggagacacaaacgtagcttctgtttataagtccttattaaatgtttttttcgaagaaactggatgtgtcagcctgtaacctgcaaaaggatctggctgctctctgcttgtagaaagaatggataataaaggaaaatctgctagctgccatgctagcaggggaagagcagcaaacaattccactcttcaattcatggggggaacgcaggggttttttaagaaaggatctgaaatgcagaaaaggcaagggggaggttaggaggtaccaggtggtgtgacttgctccagtggtcctctttaattatcgtcttatttggtggaggggctggtgcaatcgtggatcctgccaggttataaattagttactcttcagcagggtatatgttcaactcctgaagtaagcttttgttggagagagaattccggaggtgcctggtccctatcaggacgcagctcctgaggcatctaaggaaatatatgaccaggtaagagcatagcgtgtgcttaacaagcacgtaggtaaataaacgtgcgtaaggcatgggagtacagtatgggacaggaaagggagtggaggtcacagcacgtcctgaggctgtgttttaagatgagaggtaacatacatgcagtttgtctcaaaattatatcttgaggcccagaggaggaagagaaaaaaggaaagaagagaaactaagtttaaaacacggtttaaggctgggcgcggtggctcacccctgtaatcccagcactttgggaggctgaggcgggtggatcacctgaggtcaggagttcgagaccagcctggccaacatggtgaaaccccgtctctactaaaaatacaaaaattagcccaggcgtggtggcacatgcctgtaatgccagctactcggaaggctgaggcaggagaatcgcttgaacctgggagacgaaggttgcagtgatccgagatcacgccactgcattccagcttgggcgacagagcgagactgtaaaaaaaaaaaatagataaaaaaattttaaaaatcgcggtttgaggctcagctgctgagctgctggttaaaagcctctttcttgggtctctcagcttcctgggactttgggggcaggtctgcataaactgcttagttgtggacccccctccaacaattaggtaggggactactcagtattcatccatcggtgtcctcagacccccagacggggaggccctggggcaacgccaagactcacaccggcgtcctggcgcctttgccctcaagggcctgcaactacctcctccccattcggagcggccgcggccacatccttaacgccaagccggcacgccaggcaaaagcggctcggacgccctcaccccaccttccgcactcagggccgaggctgtgcctggccacctgcttcccagcacatgcacacacgcgcgcgcgcacacacccacacacacgtacccacggccggccgggctacccggaccactttgatccgaaggcactggaggcccagagggaaggaaagggaggggtggccggagcccgctagcgccccaggacagcctcgggttgccccaggcggtagccctgtgggacagtggttccccgtccgcggcctcgggggcggggcgtctgtaggcctcgccccgctgacgtcagccctgcggggcgctggcggagcgggcggcggagctgtcagtcccagcccaagggtagctggaggcgcgcaggccggctccgctccggccccggacgatgcggcgcgcccaggatgctgccgtgcctcgtagtgctgctggcggcgctcctcagcctccgtcttggctcagacgctcatggtaaggctccgggacgcggcccttccctgccctgccctctccgcgcccgctccattaaagttctccatccagtggagagccctggctggctggccctctggcagagcggtgcccgggtgctcccttactctggcaaacctggatctcaggctcacctgttgtggaagtggaagaggctgaaattgacaggaactgacggattgggaaggatagagaagtatgcgcaaggccaaacccccaacccgcaaacctcatcatccacccacttctagatgagccgtaagtttagctctaggttttttgctgtttaggttcaaatgatgggacttcttgtccccttggggaataattttgatctcctgactctcccttctcttagtcgactcttcaactaacctctgtctgtccttctcccatctcaccttcatccctcactgatcaccccgatctgatcccccttgctccacctgtagcccccaactcactcccactgccccctgcctctctcctcctaacccagccagttcaggcttctaacccagttcaggctcctaacccagacagttctccggcaaggtttctgcaactaagaaaagtaaaccccagagacagaatgaaagagccgggagttggaaggaccaagagcagagacagagagcaaggaccgaaactgcttcttcatgacaccaaaatacaaagtaaaacatgcagtcagccattcacgtgatcgagagctgagtcggagatgtgcagcccaaataccacaacgactcgctgcatttttcactttccgtctaatgtttcgaaatcaaggcactgacgtgaagatcaaagacggtataagaaagaaagcaagagacagatgacagagtcctcccc

SEQ ID NO: 5317 - DNA, 6000 bp, Homo sapiens
ggatgggtggatggatggccaggcacatatagacagatgagtgggtgactgctgatactgagatcaaatgcacaatcagaaacaactggcagccaggcaccgtggctcacacctgtaatcccagcactttgggaggccaaggtgggtggagcacctgaggtcagcagttcgagatcagcctggccaacacggcaaaacccgtctctactaaaagaaaaaagttagctgggtgtgatggcagagacctgtaatcccagctactccggaggctgaggcaggagaattgcttgagcctgggaggcagaggttgcagtgagcggagatcgtgacattgcactccaacctgggtgacagagctagactccgtcctcaaaaagaaacaactggcaattgatatatcatcctacaaattactgtagctaagcaaaaatatctaggggaaaaatgaaggcaggaagaaagaaggaaatcaggcagggaggagaggaaggaggaagggagcagagagagctgtaaaaatgaaaaaaggtttccaaacccccaagtgttctctttttatctctactagaacatctttttaagcttactgtgatgtgtggatgtctcctgtctccttcagtagactgtagggtgtttgtattcagagcctgtgttttatctcctaatccacagtgcctaacacaagaggtaggcctagcatgagctccataaacacacattttgtgaaatgaatggggataacagtgccatttacaacatctctcttaggcaccaaacacttcacatggaagtgaaggtcttgtgttgtcgttgttgtttttgagacggagtctcgctctgtcacccaggctggagtgcagtggcaagatcttgggtcactgcaacctccacctgggttcaagcgattctcctgcctcaacctcctgagtagctgggattacaggcaccctccaccacgcccggctaatttttttggtatttttagtagagtagtttggtatttttaatagaggttttgccatgttggccaggctggtctcaaactcctgacctcaagtgatccacctgccttgacctcccaaagtgctgggaatacaggcatgagccactgcgcccagccaggattatctcttaatcttcataacaaccctatgaggtcagaagtattgttatccccactttacagatgaagaagatggcgtgcaagaggattaaataagatgcccatggttacgcaaatcattagtggctgagattaggaggcaggaccccaggccactagagctcaagctcttgaccagggaggattcaggttttgagaggcctgaagcttatgcattttgaggggcttggtttttttcaaaaagcaacagactctttaatgtggtttaaaatacatccagatcaagtccccggctgttgtgaatgccgaaaagagacaaaaaagctgccggtgcagcttcaaacaagtctgagcgtcaggctggcccataaggaaagcagttgcagggacaggaggcagccccctcctccaggaagggcaacaggagcagccgggtgcctgcctgtccctggggtgaccgcctctgtgctgtgcaaggcgggagggctgtggcaataggccttggacctcccccatggacaccagcgagttcccctggcctctgggtcagccctcagcagcgccgccatgatggggtggaggagggttaaataaccatctttacagaaataatattctcctgcagaacgtgtctgagctcagaccattgtccagaaacctcatagaaaacaaacaacaaagttttttaaagtgctgctgacacctctcagaatctggtgtgcatagagctctcagctggacgagacctgttggtccttaaactgaggtcacctgtatgggaccagcctgggtgaggaaggctctggccttcactcacagggataggccacttcttgaggggctttcttgaagaaaaagcacgtcaaagaaatattcagcaaaatttacaaaaacgtatgattgtgtgaacatattgccgggccctttcccagggccctggaaggaaccgtgcaagtgaggggctctgaagcttcagcttcaggagtttcatgataactctgcctcggatcttgacacacatgctggaaacagataaggaaagggaagaaggaagagaaaaaaatgtcaaaaataaagaggaagagataaaagagaagtaatgggagggaaagaagagaggaaaaacaggaggaggatctaaagagatggatgggcaagagaaagaagcaggcaggacagggctgagggagagctgaggcttcctccgggagaatgggggttctgggccgggtgcggtggctcacacttgtagtcccagcactttgggaaaccagagcgagtggatcgcttgagctcaggggtttgagaccagccttgtcaacatggtgaaaccctgtatctacaaaaaatacaaaaataagccaggcatagtggctcacacctgtaatcccagctacttgggggactgaggcgggggaatcccttgagctcaggaggtggaggttacagtgagctgaggctgcaccactgcactccagcctgggcaacagagggggaccctgtctcagaaaaaaaaaaaaaaaaagaatgtgggttctggtccagctggttttccctggcacctgggagaggtgggcctctgttgtctccaggccactgtgcctccctctgtaaaccttcacccccacctgcaggcatcacagccaccctgcccagtcctgcttatgtgccttcttcccggacctctccacaaactcccagacccaaatgggagcagaagccaggagggctgagtcatcatccctccaaccagccatgcccagcagccttcatgcccagacagctgcctctttcctggttcatcacctgagcaccaggtaaagcaatgcaaacctgtgggccagatgtttagcctggcacatagaggaaccaagacaactgaaaacgtggctcccagtggcccactggcttctcactgccctgctgctggggaggtgcctgcctggaccatcacggccctgaccctgaggtcacctgagatcacaggctcttgcctctgcccaagacttccaactctcaaggccaccagccatcagtaaggaagggctggggctgtgctggctccagagccctgcaggccagcttcagatctctgctgctcagagacaagtccaaggccacactgcattcatcagctgagatttggccaataatccattacacagatccggtattcctcctgctcagacatcactggggtcctccatgggccatattatcccaaaccatgaacctggggctttcaaacacttgtgttccattcagcctgttcacaagcctggcagtgtgaaccagtaagagaaccaggttccagccccaactctgcccgaaactacttcatgtccataggctatagtttcctcagctgacaaatgggaacaaaatattggggttgttgttggagaattaaagggctgatacacagaagcacgttatcaacagaaggacaaatacacacgtctaacccaggctggtctcctgggagggtcaggtctgagaaatggaaggagatctggattcatatggaaccagacactaattcattatgtgactttgggtcattgactttgcctctctggaatttagttttgtcgcccacagaatgggggaacaatgtggacaattatccaagtctctcccagcaaaatatctgtggctgtaaggtttcaccttgcacatcccctggccagggggcagctccagctatcaggatgtggcagaacgtgaatcagaaatgatcctgtggggctgggtgcggtggctcacgccataatcacagcactttgggaggctgaggcaggtggatcagttgaagccaggtgtttgagaccagcctggccaacatggcaaaaccccatctctactaaaaatacaaattagccaggcatggtggcgcacaacacctgtaatcccagcagctacttgggaggctgaggcaggagaatcacttgaacctgggaggtggaggttgcagtgagccaagatcgcgccactgcactccagcctgggcaacagagactctgtctcaaaataaaataaaatacaaaaacacaaaacttagctgggtgtggtggcaggtggctgtagtcccagctactcgagaggctggagcacgagaattgcttgaacctaggaggcggaggttgcagtgagctgagattgcgcccctgcactccagcctgggggacagagagagaccctgtcttaaaaaaagaaaagaaaaaaagaaagaaagaaagaaggaaatgactccgtggacgaggagacgtgggctctagccagagcaccaatagtgattttcagaatattgaacggctgctgaggcaggggcaggaagcactagtacattggctctgtgcaggacagcttcacttctgggatccagggaaagggggtacatcttacctccctaagagaagaaactccctccttctctgtggactttccaatcctattgctccacacctggcaatgatctctttgtactgagctgcaaaccctgtcgcccaacccccagaccactccaacttcccacaaccccaaaccaaagcacccacacagtgagaagtcatgcacctagaaggtagggggagggggggcggaaacttctggcatcaccctcagccaacacccagttgggtggaagtcattcaggcgggaaggcttttgttacgccttaggtgtgtcacctgttctgaggccgaaggtcccatgaatgacttcaggtgttgttccagcccctaagataggtgtcaggttacaagacacataatcattccagtttggcaacttcacttgtagggctgttttaatcaagctgcccaaagtcccccaatcactcctggaatacacagagagaggcagcagcttgctcagcggacaaggatgctgggcgtgagggaccaaggcctgccctgcactcgggcctcctccagccagtgctgaccagggacttctgacctgctggccagccaggacctgtgtggggaggccctcctgctgccttggggtgacaatctcagctccaggctacagggagaccgggaggatcacagagccagcatggtgagtgtggggccctctgctcccaagacacaggaagggtgggtctccccatgtaaggcccttcaagcagcctgagcatccatcagctgagaattctgtgacaccttctaggttaaaaaaagaggccacacccaaatcccctcacaccccagcccggtacacgtctcatacccacctgccttcctctcttcctccattgccatggtccttggaccagctcacctaagaagctgagcacagagccagggctgtccttcccgactattctttcctgaatcctgcatgttcttttgcccaatgtctccaggtctgttggttagaggttggcactatttttccaaggcagggggctgttctgatgccacggttgccctctgccactccctggggaaactgattccttttctttttaaagaaaagtgtagactgggtgcagtggctcacgcctgtagtcccagcactttgcgaggctgaggcagacagatctctcgaggtcaggagtttgagaccagcctggccagtatggtgaaaccccatccgtactaaaaatacaaaaaattagccaggcgtggtggcaggtgcctgtaatcccagctacttgggaggctgaggcaggagaatcgcttgaacttgggaggcggaggttgtggtgagccaagattgtgccattgcactccaacctgggcaacaagagtgaaactccgtctcaaaaaaaaaaaaaaaaaaaaaaaaaaaaaaagaaagaaggaaaagaaaacagtgcagagatgcctccaaacaatctagggtgtttgtggtcatcttttacttgg

SEQ ID NO: 5318 - DNA, 6000 bp, Homo sapiens; identical to SEQ ID NO: 597

SEQ ID NO: 5319 - DNA, 6000 bp, Homo sapiens
ggtggcgcgcgcctgtaatcccagccactcaggaggctgcggcaggagaattgcttgaacccgggaggtggaggttgtggtgagccgagatcgcaccactgcactccagcctgggcgacagggcgagactccgtctcaaaataataataatagcaatacattttaaaaagaaaataatattggaaatttgaccctgaaaacctaccagaggtaaacaaggaaagtgcctttaaaaaatgagagacagcttttctggcatactgatagttaaaaatagaactgcatttaaaaaaaaatttgtgatctgttttgctcgtaatagtggatatgtaatgtgcagtacttactatgtaggagcacttagtttttttgtggggagcacttagattatatcatctaatttacttcacaaccttatgagatagatgttactgccaatctacagattaagtaattgaggcttagacagttaaagtaacttgcctaaagtcactcataataagcgctgaaaatagcagccaaacacaggtcagtctgattcctaagtctctgcttttaaccattataagatactgccactatgggactcctcaagaagcatgcttacagggttgctttttcttctgtggtttaattcagctaccgttatatttccgaagaagcagcatcaactggtctttgctgagcttctgagatccaagttggaagccctggaaggtgctacaataaggcaatagtttctaacaggatttttacttttctaaaaaaataagaatttgttccatgtttcttaaaatatgtctgctttttgtaacaaaaattaaaattgggccaggtgaagtggctcacgcctgtaatcctaggactttgggaggccgaggcaggtggatcaccagaggtcaagagttcaagaccagcctgtcccaacatggtgaaacccccatctctactaaaaatacaaaaattagccaggtgtggtggtgcatgcctgtaatcctagctactcaggaggctgagacaggagaatcgcttgaacccgggaggcggaggttgcagtgagttaagatggcaccactgcattctagcctgggcgacagagtgagactgtctcaaaataaataaataaataataaataaataaataaaaagttaccccataaatgtgtacagttgttatcttttttaggacatttcatcatcccctaaagaaagtttgtacccattgtcactttttttttctttttttgagacagggtctcactctgtcgcccaggctggaatacagtgacgagacctcagctcactgctatctctgcctcggggttcaagcgattctcccaccgagtagctgggactataggcatgggccaccacgcccagctaatttttgtatttttagtagagatggggtttcaccatgttgctcaggctggtctggaattcctgacctcaagtgatccgcccacctcggcctcccaaaatgctgggattacaggcgtaagccaccgcacctggccagtgggtacaagtattatgtgtcaattagaaaatttaaaaataggccgggagctgtggctcacgcctgtaatcccagcactctgggaggctgaggcaggcagatcacttgaggttaggagttcaagaccagcctggccatggtgaaaccccatctctactaaaaatacaaaaaactagccaggcgtggtcgtccatgcctgtaatcccagctacttgggaggctaagtcaggagaatccctccaacccaggaggcagaggttgcagtgagctgagatcataccattgcactccagcccgggcaacaaaagcgaaactccttctcaaaaaaaaaaaatttttttttttaaaatattgactgggctcagtggctcattcctgcaatcccagaactttggggggacaagatgggagtactgcttgaggtcaggagttcgagaccagcctgggcaacatagcaagacccccatctctctaaaaaagtttttttaatgaaaaaaaactttaaaatacagtttgacatatatcctcccagacatataaaatttaaaaatatttgagctttctaaagatttctattagaaggccattggagatggaattgatacgggtaagagcaagaagtctataatgcagtgcttaagggtatagtccaaagttgaacagcctttgtttgaatcctcgcttacctactttttagccatgagacctgtggtgggatagttttcttctctgtaccttgatttcctcatgtgtaaaatggagacaataaaggtacctatctcagaggattcttgtgaggattaaatgagataatctgtgtgaagttagagtaatggctggtatgctgtaagtgttcaataaatgttagggaacacacaggagatacagaggcagtgtgttttaatggaaaaagctgactttgtttttttgtttgtttgttttgagactgagtgttactctgttgcccagtctggagggcagtgttgtgatctcaactcactgcaacctccgcctcccaggttcaaccaattctcatgcctcagcttcccagatagctgggagtacaggcatgagacaccacgcccagctttttttttttttttttttttttgagacggagtctccctctgtcgccacgctggagtgcagtggcatgatctcggctcactgcaacccaacctccgcctcctagcttcaaggattcccccacctcagcctcccgaacagctgagactacaggcacgcgccaccatgcccagctaatttttttttttttgtactcttagtagagatggggtttcaccatgttggccaggatggtctcgatctcttgaccttgtgatccgcccacctcagcctcccaaagtgctgggattacaggcgtgagccaccgcgcccagccaggagaaaactgactttgaacttggctctaccacttactagttgtgtgagtttggacaaatgcttaacttttttgatcctcagtatctttatttggattgatgtaaaagattggaaataacatgtgtaaagtacctgacacaaatgaagcactcaattaaaagttgctattatacttaattgtggacatacaggtttaatatggatgagtgctgttcggttgagctaaggatgtaggataaaatgatttaaggaagaactactgaatcagctatactctgaaaaatctgaaatttggcatacaagaaataacatgagaatcacaagaacagattttgagtcttggttccatcatatactggtttagaaactttgggtaagtcacttaaacttttcaccattttcttcatatacaaaatggacatgagcacaactgccctgcttccagtgcatgtttttttaaagatataatttacaaatcataaaaattcaccttttaaaattatacaatttagtggtttttagtatatttgcctctatctagttccagaactattttttttttaagagtctaagtctcacaatttgcacaggctgacctttaacccctggtctcaagccatcctcccaactcagcctcccaagtagctgggactctaggatcatgccaccatgcctggcttaattccagaatgttttaattattccagaaataaatcttacactaattaactgtcactctctattcctacccttcctgagcccctggaaatcactaagctagtttctgtctctgtggattttcttctattctggatctttcgtattaatggaatcatatatgagtgccccattgtatccgtcttttttcacataatattctcaaggttcatccatattgtagcatgtcagtactttattcctttttgtgactaaataatattccattgcatatatatgccacatctattgatgaatggatttgtttggattgtctccactttttggctactatgaataatgctgctatgaacattagagtacacatttttgtgttgacatatattcagttctcctgggtatgtacctatgagtggaattgctcagtcatgtggtaattttgtttaactttttgaggaactgccaaactcttttccaacgtggctgcactattttacattcatcctcaccaacaattattatgatagccatcctagtgagtgtgaaatgacgtctcaccacgggtctgatttccatttccctaaggatattcaacatttcttaatgtgcatattagccatttatatatcttctttggacacatatctattcaaatcttttgctcattttaattttgtgttttctactccctccattttgcagatgaagcccatttttagacaggaatactgtatttgtctttttattgctgagttataagagttcttaggccaggcgcggtggctgacgcctgtaatcccaacattgggaggctgaggcgggcggatcacttggggtcagaagtttgaggctagcctggccgacatggtgaaaccccgtctcaactaaaaatacaaaaaacagccgagcgtggtgtggcgcgtgcctgtaatcccagctactccggaggctgaggcagaagaatcgcttgaacctgggaagtggaggttgcagtgagccgagatcacgccattgcactccagcctgggcgacagagtgagactccatctcaaaaaaaaaaaaaaaaagttctttatatattccggatactggtcttttaggcacacaggttatcctgtatattaaataatagtggctgtgccagcggcttgttaaactgtaagatgtgacgcaaaataaatgaaggcgatgacagtgaaaggggagagatacgaggttccacagctggagggtgaacgccccctacacctcctgggcttaatcgtaaccggagcggggtaccctcaatttccccagcccacaggccccgcccccccccccgccctttgacctgcgccgcttccggttgaagacgtggcttggggccgccatcttggcaagaggcgaagcggcagcggttcctgtcaagggggcagcaggtccagagctgctggtgctcccgttccccagaccctacccctatccccagtggagccggagtgcgggcgcgccccaccaccgccctcaccatggtaagatccgagccaggacccgaactcctggggtccgagcctcaccgtctctccttgtcggcgggcctggggcaggggccggaggagccccgccctgagggtctagggcagagtgcttttgctccgggctcggggagcagtgtggcctcctgtgcccggtctcctggagatccgatggagctgactccagtccatctgtcgtcgtgcccgcttccgcaccaccccccaaccagctggactccctcgtttgctgggacctgcccctgagacggcccggcgtttttgctctgcgagaacttcgtggtggtggtgcgggtcccaggctgcggacctcggaactgatgctgtcccgccggttccctggcgcttaggctcagcaggctgggcctgtctccggaggttctggtccttctgttaatcagagcttgtctcccacccccggtgtttgctaggccgttgataactcgaaatgcaaatccactggtgtccagaaatttttctttttgttcagaagggggaaatggagacacagagcggaaaggagtaacttctaacactaatgtataggacccaagtgtctctgaaaccttccactacttccgcagaactcacttgtgtccatttgttagtgtgactcggggtacatacactgtgtagaccactgggaaaatgtgagcaggttccagagaacacagggtttgccttcaaggaacttattgtccaggtgaagaaaaatgtgtatgtggcatgtcgtagtcagatgtctcacaggaggtggagtaagagggatgggttagcctccgagaccagttacttgccttcccatgcgttatctttgtatactcatctgttacaaggatgagaaaggttaatgtggttgaggatgga

SEQ ID NO: 5320 - DNA, 6000 bp, Homo sapiens
gttgccagtcagtacctgtcctccttgtttctctatttttggttatgaatgttggggttaccacctgcatttaggggaaaattgtgttctgtgctttcctggtatcttgttccgaggtactctagttctgtctttcaaccaagaaaatagaattgtggtgtttcttttattgaacttttaacagtctctttagtaaatacaggtagttgaataattgtttcaagagctcaacagatgacaagcttcttttctagaaataagacattttttgacaactttatcatgtataacagatctgttttttttccttgtgttcttccaagcttctggttagagaaaaagagaaaaaaaaaaaaggaaaatgtgtctaaagtccatcagtgttaactccctgtgacagggatgaaggaaaatactttaatagttcaaaaaataataatgctgaaagctctctacgaaagactgaatgtaaaagtaaaaagtgtacatagttgtaaaaaaaaggagtttttaaacatgtttattttctatgcacttttttttatttaagtgatagtttaattaataaacatgtcaagtttattgctgcacatggttaagcttccttttggctttggttggagagggtggagaaaagcgggaggggcatggcctgtgacctggtcacaaagtaccttccacagtcctttactttaaggtggcatcactaaattattccctgtagcccaccttcaggtccactccacactggctctcttgactattttcttcctttattcatcagtgatgtatgttcaggacctaattaattgtggatatgaggcagggtcaagaggacaaaggaacagggcctttaccttctacatagctcccctgtttcatccaaggaggttaagtattgatttttatcggttttctcaactgtgaatataataaactgaaagcatttcagggagaagctggagaacaccttctctagctgcactccaccttaaggctgaagctggatttgtttactgtttctcctgggggcaggggcagttgagaaataaccaagtagtctgccaagccagggtcaaccctccaggccacaggttgagcaaatgctacagccatggacagggagacactcctcacgaaggggtggtcctcatcctttcagatcaacttcctgctggaggctccaccctcaccacgtccctccctcttctctcatctggagtcaccttttgggattttggagttgagcaccatggggactccaaatgatcaggcagtgctgcaggccatcttcaaccctgacaccccatttggagacattgttggattggacctcggagaggaagcagaaaaggaagaacgagaagaaggtgggcatttgatctggagtgtagctctgcacataggctggcctgctggcctcccgaggtagcagagagggaggtggttttataaggccccttgttccatgattatgattgagattggaatcagagaggttggctgctccttagcgcactgatgggggtttggtaagagatgtcctgccaagaggagtaagctggggtttgtctctcgatccatcagctctcatgcctctgaacttaccacttaattgactgtatgatccaagcttaactgccaggtgatgttaaactctcacatttttgtcataacagagaataccaccaccagaacagaagactgaaataaggcagggcatggttgctcagttgagtggttccaatatagcaagcacaaccagtaaccgttaaacactgtcacaagccaagctccaaactaactcttccgcagtgagtgcgttcactggcttttccattaatccctaatgaaggagtttttgatcctttgtttctagaggagtaaagcctacaccttactaactcaggccgaaacacagagggatacgtcagaagtgatgttcatgatctgggaatgtcatggtggcctttgcataagaggcggtgtagtagagtaaaatgcagacaggagccagaatgacctgggttcaaatccaagctctgcaacgtatggcctgttgaggccatacacaaagaacttgagcaacttctttaacagattgaggagtctgggcttcattctcttggcaatggggaaccaaccaaggccccttcccaggtctcttggaactcaggcaatgctagctcccagccttagtgacctcatctccccctaccccaaacactgcaactgacccctgctgtgacccatacccagtcagctctggctcagatctcagaattccaaagcctgaggtggctttttcttcttgctaccaactgcacacctggcttctcctggctccttccctggcccagatgaagttttccctcaagcacagctggaacagtccaaggccctggagctgcagggggtgatggcagcagaggctggggacctcagcacagccctggagaggtttggccaagccatctgcctgctgcctgagagggcttcagcctacaacaaccgtgcccaggcccggcgactccagggagacgtggcaggtaaggggagatgccctgtatcctctgcaaaagggcccacgggagggcacagaccagaactgaagtggctgtgcggctggggtggccttgctaaacccctgtggagcctgtcttcttacctataaggtaggagtagtatcaggggacctgctaatatcatggggttaatgtgaaattcagaagagactgcattccattgattaaggaacagttaatgagagcctactatgtggcagtaggctggtgctgaggacactgagataaaaggtatatggatcaccaacatttatatagcagtcactatgtaccaggcattaatcactttacatacaaactagtaaatcaatcctcacaacaaccctaaaaagtatgtactattgttatccccagtttatagatgaagaaactgaagcatgaagaggctaagtaacttgcccactatcatacagtcaggcagcagcagagctgggatgtcaaccaggtggtagggctcgagtgtgtgctcttaatccccacatgatactgctcctcgaaaagctcccagtccaggaggcagggcagacacataattctgagaccagcaaaacaagttcgagaggggtcagcgtgggacctgttcctgaagggcgagttttgaaggatgagtgggagttagttggtgggtggagaaggtacagtctgtagaggtccaaaactcctgctgcattcaggttattctaattaagtgaagacaatgggaccatgctggggaccaaagatgaggctaatgtgaaggtataaaccacggaaacctagtactacttgactgttaggagcagtggtgacacaggtgctcccagaaccagcaatgccaggctagggagttttgagtccactccaggaacaatgggaacctcccaggagccccttatccaggcttatctgccccagatcactggagacagcctgcagaccaaaaccccagagagatgcagtggtgattccaactggagattcctccagaccagctcctccgagggaaaccaaggagtactgcattctgagcgcttctccggaggctcaggctctttgggggactagagaacatgagtgaattgaagcagagcccgaaagaagccagcctggtggactttaagaaggtggctggctgcctgaagttctgagttcagagttctgaggcccaacccaagtattttatgagaataataacaataaaaatggtgcaggccagctctggctccaggaccaaggaaattagatacatggagataaccaaagaatgatgaaaggcaatcagtccaggatacaggggagagagaaggtgttctaaagaaagcaatggaaaagagaaaacggccctcaaaaggaaaacaatgagaaactgtcttgattgtacttgtaagaaatgattgtgcggttaatattattttttgaaccctgacattcagagtcagtcacctggcacatagtggatgcttaataacaggtgtggaataaattggctgctacttgcccgggcagtgggccagactcataaacatagtggccattcagaatcctgcaacgttcatgttttcgtgtattagcggtggaaaataataggaacaaggcgagacctggacttcagtcccagctctgccactaagtggcttggctgtagagcttaactcttccacagtcttcatctgtgtaatgggaataacgatccgtacctctagcaggtgcgaggcgggttgtaaatggccacgcccgggagccgcaagaaccacggtgatccgcgcggccgcaggtgggctggggctcgggcaaggccgccctggcctccgctgacccccgccccgcccgtctcgtcggtcccgcaggcgccctggaggatctggaacgcgcggtggagctgagcggcggccggggccgcgccgcccgccagagctttgtgcagcgcggactcctggcgcggctgcagggccgagacgacgacgcccgcagggacttcgagagggcggcacggctgggcagccccttcgcgcggcgccagctggtgctgctcaacccctacgccgcgctgtgcaaccgcatgctggccgacatgatggggcagctgcgccgcccccgtgacagccgctgagcgccgcggacccgggcgtccgcgggcgaggggacgggactgggccctgaaccaataaagccgtcgggcctcaccgactccgcctgctcctgcgtcctgcccgcgcccggagagaagggcactcgggggtactcggcgcgggctggggaccagccggggggtggtgagccgcggccgcccacctgccgggtaagggcccctcgggcccgtggtcgggcatcgattggccccgcctggcgcagcccccgcccctgcagcggactgcggtgctcatcagacctgagcagttgctccggcggcgctcggggagggagccaggtgagccgccccggtggcggggggcgggggcgggatgctcggcgaccccaccctccgaccctctcctcttccgccgacatccaccggagccaccaacatcaggaaagggggcgtagggcgagggatgggagagagaacagggcaggagagaggatgggaacagggcaggagagagaataggattaggagaaaggcgatccctttgggggaggggcgcgtggagtatgtgtgtgagtgtgcgtgtgtgcaaggtgtggttgcacggatgctcgttgcttctgcgtatctgcgggtgtgtgcctctttgtattgtagcctggagtcagtgctcgcttctgcgcctgcaggatgtccatgtgtctgctgggtgggtctgtgcctttgggctttgccgttcgtgtccgtgccttcgccactgggggctggtctacatttgcgtttccgtacatggttctttttgtttctggagagtaaattcctggagcaattgctaggcctgcctgctgtcacctggctgacaggcccgcccccttctctcagcagcctagggcctaggcccgggccaccatggcgctgcctccaggcccagccgccctccggcacacactgctgctcctgccagcccttctgagctcaggtacacccctgttcagtcgttgaccaagtccttctgggttccaaagccccctctctcccctgtctgcacttctgtttgggtacccactccaggccccaagccctggagtccctgtccccttcacccacctaccctaggtccaaccagccagtccctggtgagaggactcaggtgccctttcctttggcctgctgctcttctcactgggccaattcctggtcacagcacagtaccaaccgtgcctgagcccttcccagaggcctcctgctgtgttccaggttggggggagttggagccacaaatagatggtcagacctgggctgagcgggcacttcgggagaatgaacgccacgccttcacctgccgggtgg

SEQ ID NO: 5321 - DNA, 6000 bp, Homo sapiens
caatgatctccagcatttcttccacacctttattttaaaccatttttacacctgtcacatagtttgacctcctgagtaaggaaggggtcttctctttatatactttatttccagctctgtcacccaggctggagtgcagtggtgcaatcatggctcaccaaagcctcagactcctgggctcaagccatcctcccgccatagcctcccaagtagctgggactggaggcatgtgccaccatgcccagctcattgtttttttgttgttgttgtttgtttgttttttgagatggagtttcgctcttgctgcccgtgctggagtgtaatggcatgatctcagttcactgcaacctccatctcccgggttcaagtgattcttttttgtatttagtaaagaggggatttcaccatgttggtcaggctggtcttgaactcctgacctcaggtgatccacccaacacagcctccaaaagtgctaggattacaggtgtgagccaccaccctggcctgttttgtttttgtttttgagacggggtctcgcactgtcacccaggctgaagtgcaatggtgggacctcggctcactgcaacctccgcctcccgggttcacacaattcccctgcctcagcctcccaagtagctgggattacaggcgcacaccaccatacctgctaattttttgtatttttagtagagacggggtttcgctatgttggccagactggtctcgaactcctgactttataatctgcccgcctcagcctcccaaagtgctgggattacaggcgtgagccaccgtgcccaggcttttttttttttttttttaatagagaagagatgtcactatatcacccaggctggtcttgaactcctgggctcaagcaatcttcccaccttggcttcccaaagtgctgggattacaggctgtgagccacagcgcctggccataatttttttttcagttttgtagagatggagccttgctgcgtcacaaggctggtctcaaactccaggtcccaagtgatcctcctacttcagcctcccaaagtgctgagatgacaggcatgtgtcactgtgcctggtgagtctgccattttttatttcattttattgagatggagtctcactctgttgcctaggctggagtgcagtggcatgatttcagctcactgcaagttccacctcctggattcaagcgattctcctgcctcagcctcccaagtagctgggattacaggcatgcatcaccacacccggctgatttttgtatttttagtagagacagggtttcaccatgttggccaggctggtctcaaactcctgacctcaggtaatccacccgcctcggcctcccaaactgctgggattacaggcgtgagccaccgcacctggccaagtcttccattttaaatgtgagaacattgaagtccacctaaagttacatggtatctcatcaacaagaggacagtagctgccatcagaggctgacatggccatgcagccaagtagacatgtttttctaattgactgggaggcagagagtggcactctggaaggagaaccctgggcatgtcagacggacctgggttctgatcccagctctcctggttgaagaactgccatagttcaagtgaaaaaaaaaaaaaaaaaaaaaaggtgccacagtccagaaagaagtttgttttaggagatagtcttctaggctgagcagactagagctgttaagagctccctgagggcagagacttatcttacctttatatccctggtggctagtgcagttccaaggacatagttggtacgcaataggagtgcttgaataggagatttggaagagaggaggcaggggagggaactcaagagagtttagaatcaagaatccaaggaggagacagcctagaaagagtgggtccaagacagagacttcaggcatgtggccctggttcccttactccaagccattgggaaatcctccagaggaacatggtgctgtggctttaactgacttcagcattgtcaatgaatctgctctgctaaaagagttatcctcttgctcctgggcttggcctccccctcctctcagctccccaaacccttctcggctgctgtgatgggataattagatgcgagagctcagcacagatgatgctccagttgcttagcaactaatggtttccatggagaccgcaaagcacagcctccagagcagccagtgagcagctcggcagggcagggagaagacgcaactccccgctcctccagaaacctggggagggctggggtggggaaggtgggggggggggattggagggagaagggagagcttaaaggcacagggccctcttatccctttaaaatctgatcagagatctgccctcccctactccactctgtaccactcataattttagatggggatgggggcttaagagtggacccaactcaacccaccctgcaataaacccaacctcttctttctgcttcttggttgtgaatgaggagaaagacctcccagttcaagtgtaaacaacttactggtgggtgacaggttttgaggagtaccaggaagatcccctcaccctggcattccaccatttaatctgtcccctctctcccaagttgtccttaatgtgcaagagaccctctttccatttgtgcagtggtggtggaatcaaaagccaaggtgcaggaaaaacagaaccaaattcttcacccaaaagcagcctgttcgggcagattgggaaggaacacctgccctgatccctgatgtccgtggaagaggatccagctgggggtggggatgctgtttaccaatacagagcagctggcaacttcaagtgtgggcctttcagaccggcatcatcagtgttacggggaagtcactagaaatgcagaattgattgggcacggtggctcacacctgtaatcccaacactctgggaggccaaggcgggtggatcacttgtggtcaggagtttgagaccagcctggccaacatggtgaaacctcatctctactaaaaatgcaaaaattagctgggaatggtggcacatgcctataatcccagttactcaggaggctgaggcaggagaatcgtttgaacctgggaggcagaggttgcagtgagccgagatcacgccactgcactccagcctgggtgacacagcgagactctgtctcaaaaaaaaaaaaaaatgcagaatttcaggcttcaccccagacccactgcatgactgcatgagaagctgcatcttaacaagatccctggtaattcatacgcatattaaatttggagatgcactggcgtaagaccctcctactctctgcttaggcccatgagttcttcctttactgtcattctccactcaccccaaactttgagcctacccttcccaccttggcggtaaggacacaacctccctcacattcctaccaggaccctaagcttccctgggactgaggaagatagaatagttcgtggagcaaacagatatacagcaacagtctctgtacagctctcaggcttctggaagttctacagcctctcccgacaaagtattccactttccacaagtaactctatgtgtctgagtctcagtttccacttttctctctctctctctctctcaattttctgagacagagtttcacttagttgcccaggctggagtgcaggggcacaatctcggctcactgcaacctccacctcctgggttccagtgtttctcctgtctcagcctcccgagtagctgggattacaggcacacaccaccgcgttagtttttgtatttttggtagagatggtgtttcgccatattggccaggctgatctcgaactcctgacctcaggtgatccgcccacctcggcctcccaaagtgctgggattacaggcatgagccaccacgcccggctgatctcttttctattttaatagagatcaaactctctgtgttgcctaggctggtcttgaactcctggcctcgagtgatcctcccaccttggcctcccaaagtgctgggattacaggcatgagccactgtgcctggcctcagttctactacaaaaggaagccagtaccagctaccacccagggtggctgtagggctacaatggagcacacagaacccctacccagggcccggaagacgtcctgactcctctcccctccctctgctcagaactcctctgcttctttctgatgtagcccagggctggaggaggcagtcagggaagttctgtctctttttcatgttatcttacgaggtctcttttctccattctcagttcaacaaatggttgctgcccaaggctgactgtgcccacccccaacccctgctggccagggtcaatgtctgtctctctggtctctccagaagtcttccatggccaccttcgtccccaccctccagaggaatctgaaaccgcatgtgctccctggcccccacagcccctgcctctcccagagcagcagtacctaagcctcagtgcactccaagaattgaaaccctcagtctgctgcccctccccaccagaatgtttctctcccattcttacccactcaaggccctttcagtagccccttggagtattctcttcctacatatcagggcaacttccaaactcatcacccttctgaggggtgggggaaagacccccaccacatcgggggagcagtcctccaaggactggccagtctccagatgcccgtgcacacaggaacactgccttatgcacgggagtcccagaagaaggggtgatttctttccccaccttagttacaccatcaagacccagccagggcatcccccctcctggcctgagggccagctccccatcctgaaaaacctgtctgctctccccacccctttgaggctatagggcccaaggggcaggttggactggattcccctccagcccctcccacccccaggacaaaatcagccaccccaggggcagggcctcacttgcctcaggaaccccagcctgccagcacctattccacctcccagcccagcatggcacccctgctgcccatccggaccttgcccttgatcctgattctgctggctctgctgtccccaggggctgcaggtctcttccatctctggcaggggtgggaagggggctgggggcctggacagggagcactgtaccttccagggctctcaaagagaggtctggacagttgggagtcagggctggtgatggcagtgactgggtatcagacactgggctcagggtacactcctgatcctcctccagacctaggaggcagagaggtgtgggcaaggatccgatgctgcggggaggggtgaggttgggcgctgcccgactcctggcatccaggttctggctctggggaccgcttggtggagggtgcagcttctgcagcccaagcctgccacctggtggtcatactggcacaggcctggctgttctgcccagggttcacagagtggaaagggagatggctccaatgggaccgggccagatctgttggccaggaggggtcagtccccatcggagctccctcctgcctcccatcagacttcaacatctcaagcctctctggtctgctgtccccggcgctaacggagagcctgctggttgccttgcccccctgtcacctcacaggaggcaatgccacactgatggtccggagagccaatgacagcaaaggtctgctaccttctcccaaggcatccctctagtccccaaagaccccttcctgcgacaccctctgcacccttttccccattcatgccttcctgtccacccgtctcctggggtacccacactctaaaagctgccccttctccttggggcctccagaaacttgacccagtcttcccctcccgccacttctgcccagtggtgacgtccagctttgtggtgcctccgtgccgtgggcgcagggaactggtgagtgtggtggacagtggtgctggcttcacagtcactcggctcagtgcataccaggtgacaaacctcgtgccaggaacc

SEQ ID NO: 5322 - DNA, 6000 bp, Homo sapiens
tgagacagagtcttgctctgtggcccaagctggagtgcagtggcacgatcttggctcactgcaagctccgcctcctgggttcatgccattctcctgcctcagccgcctgagtagctgggactacaggcgcccaccaccacgcccggctaattttttgtatttttagtagagacggggtttcaccatgttagccaggatggtctcgacctcctgaccttgtgatccacccgtcttggcctcccgaagtgctgggattagaggcgtgagccacagcgcccggcaacactgcacttttaaaattcacttcaaaattgcttgattttgttttgttgttattataattttttttttgagatggagtttcactcttgtcatccagcctggaatgcagtggcgcgatctctgctcactgcaacctctgcctcccaggttcaagtgattctcctacctcagcctcccaagtagctggaattacaggcatgtgccaccacacctggctaatttttgtatttttagtagagacagtgtttcaccatgttgaccaggctggtcttgaactcctgatttcaggtgatccatccgcctcagcctcccagagtgctgggattacaggcgtgagccactgcgcccagcctataattttttaaaaatgcaacagcaacagcagagactctgtctagtctctgaggggtcgggagaggcaatcaatagttacccctccacggcctccactccagcgcctatgcacatttttcctttctgccttggggagccacaggaggactggagagctttgctgctgcgtaccggcaggaaccctgaagccagctgagtgggtggggcagggtgggggtttgtagtcagtctcctctttatccacccctccttcctggtcctgggctgcatctctccaagtgaccagcagaggggccttcattaacaaatacactttaaaaccattctgtccagaggtgacagaccgtcatggtgggcaagggaggcacagtggaagagagacctgggatggtggaagcagaactggtcagttccaatatccccccagtcgaattcctttccagctcccacaggaccctgttaaccctcctttttttccataggcccacaaagctgcttaacaactgcttctcccacaaatccctgcccacagcagcctgtgtctgttagattagctcctggcactaagctgagatgggaattttctgcttctgccttgctcctcttaagccagttatcatcaacccttacatgtctgggcctagggaaacatgccctggatggaggctctgtcctgatggtgggggtgaggagatctggggtgggagttgggagaatcctagagaaaggggagaatccgtctcagggaatgggaggaggtctgtttggaggaataggggaggatccacctggacgttgagggaaagtctggtgagaaatagagggtttgttctggggatgggaggtctagactaagcaaagaaggttcttttaagcaatggttctcagaaggtggtccctggactagcagcatcagcatcacttgagaacttattagagatgtaaattctctggctccaccccagatactgaatcagaaactctgggagtggagcccagtaatctaatctgtgttttaacaagctctctagatgatttggatgtgcgctcaaatttgaggaccactgctcttgagttacaaggtctactctaggagttggaagtgtgtgttctcaggaatcaacggtccatcttgggggatatgtggtgggagtggggagtatctctaggatggagaaggtctgtgctaggacctctggaaggctggaaaggttctatatcctagaatgagaaaggtctgttcagggcaactgagaaaatctgctttataaagtgggaaggtgacaataggtaatgaggaagtttgacatcgtagataaagccatggtttagaatcactgagacctggatttgaatacctacatccatcacactagctatgtacttcatacttgtacttaacatttctgagcttcagttccttatctaaaacatggaagaataatactgacttcataacattgttacaaggactggttagactgttcagtcaatgggtatttatggagtgcattttcttttttttaatttttaattttttaattttttttttgtatagagagggtctccttacattgcctaggctggtctcaaaatcctgggctcaagcaatcctcctgcctgagcttcccaaagtgctgggattacaggcatgagccaccacacccagttttgactgcaatttctgtgtccaagttctaggaatgtagtggagaaagactggcctagccccttactcagagatcaaccatatctccatgctatgtgcctagcaggtagtagacattcaataaatgtagtttcccctcgtttgctaaggaaaggaagattcatctgggggaaggaaatgagcctgaaccgtggtgtgacctgggaagtaagaatgtatggtctatgcaatggcatgattatggctcactgcagccttatcatcccaggctcaagtgatcctcctgcctcagcctcccgagtagccgggactacaggcacacaccaccacgtctggcttatttatttatttaattttattttttgagacagagtcttgctctgtcgcccaggctggagtgcagtggcacgatcttggctcactacaacctccgcctcccaggttcaagtgattcttgtgccctagcctccaaagtattataggcatgagccaccatgcccagctaatttttgtaatattagtagagatggggtctcgccatcttggccaggctggtctcgaactcctgacctaaagtgatccacccaccttggcatcccaaagtgctgggattacaggtgtgagccaccatgcctggcctatagtctactcttgagaataaaaaatcttaatctgctgagtgtggtggctcatgcctgtaatcacagcactttgggaggctgaggcgggaggatcacttgaggtcaggaattcgagaccagcctggtcaacatggtgaaaccccatctctacaaaaaatacaaaaattagccgggtgtggtggtgtgtgcctgtagttccagctactcaggaggccgaggcaggagaatcgtttcaacctgggaggcagaggctgcagtgagctgagatctcaccactgctctccagcctgggtgacagaacgagactatatcagaaagaaagaaagaagcaaagaaagagagaaagagagagagagaaagaaagaaagagaaagaaagaaaggaaagaaagaaagaaagaaagaaagaaagaaagaaagaaagaaagaaagaaagaaagaaagttgtgtgccaaagaataaagctgggtggcattaagacatggaggttatctcaggaggatgaagagcctgtctagaaaatagagggagacagtccatttgggaataaggttctgagaggcccaattagcagggtaaaatcagggactttgggattcaagccctgctttgccaccaactattgcttaacctccctatgcctcagtttttcatctctaaaggggggttgtaaaacctgtcgcatagggatattgtgaagattaaataacataatgcctggtacaaagtagttaataaatgcaactgttgggggatggggaggtctatagtagctgatgagaagttgacttggagaatggagggtccatctggagaacaggaggttggtcctgaggaatggtggtgatgtggggcatggagttgggggaagataggaaagactggatccaaaccccacacaaacctcagagtaacagggcggggcctagagaaatcctccagggatcgccagcttttagggctgtggagaggtggttgggaggggggccagcaggggagaggtttgactgctagtaaccctcaactgctgcagtaaggagaagcctcagcggtggcagtcacaccagcagcctcagagccttccctccccatcgtctctgctgtgtgacaggtgggaacttaaaagctcagatcacgtgtcttggctagctaacctacttaccccttgaagacatagtggctgggacaggcaagggccaagaggaattggctgagaaaggggcagagcaggggaaagccccaagtgtgttctggggacctacatttgaaggctttgggggcaagggagagaatgtgcaggtgcatgagatgcccagggcatgtctgcgagccctgtgcatgccctggcacacaggtccctccaggatatggcatgtgcctgtcttgaaggcctgtatctggctaggtgactacagtcggagcaggctgagcactgggttccagtttaactctggagctactgcaggctctcccaaagctgctgccattttcccttctttattagtgtcctaactcagagaaagtgtgaatggggagacaggaggatgttccaatgtcccaaggctcctgcgtttttgaaagcctttgcacctcgtttggggattcctggagggaggcctgcgctcattcatgggctggaactgagggaaattgttgggggactggtatcgtgtgtgaagacagactgacacctttacaatccctccactttcccccacccccaacacccttgcctaatctgtcttccagggacttgtccccacggagtgactccagctctcctttcctcactgcctccaagtcggccctttgccatcaacccccagtcctgagttcacccctgcacctcctccggcccccgcgccgcaagcgctgctctctcctttgccgtcctcgccccccgcgggctgccgggcggcgcgggccctttaagaacggcgggaccggcgagcagtagctggtaggagagcgcagtcgccccgcgggctcggaggacacagcgtccgggaccaggctctgggaagcgggtgtgcacagcccagcagagtcagggcgcgaccccaaccgcctctcaccatccttgccgtctcctccgagccgagggccggccctcctgcctcgcctgccccgccccggccccgccccggcccgggccgccgggaccgggagccgggacgcgggtgccgcagcccgaggcaggtaaggggagccccggctctccgtccccggtccgtggcagcgctgagcatcccggccccgcaccggcccgggggcgcgtcaaggtgactaggcatgcgggagatggggcgggggcttgagctgccgtggggcgcttagttttgagtccgggtggtgcgcctggctttggggacagcccggggcacgcgggcccgggggtgccggcgggaggggccggcctgggcgtcgcgccaagggatggggagtgggacgcagccggaggcctgaagcctcctcctctccgccttcccctggtccgccctgcactcaccctgctaccccgacctcctagagcgggcagcctctgccggctgcctcttctcccccgccccctattccttcagtccccaggggctgctggcctgcggggtaaggagattagagaagccgccgggaggaaggagcgattgagggcttcaaggggacgggctggggtcaggctggagctgggctgcccgggactgagcgtctccgtgcggagagtggggggcgggggcagagtgcggggctaacagtcgcggatctgccccgagaaggaggtgggcagtgggggcgggggaagcattagaacgccagggagctttgagccgggctcggtggtctgccccaaactgagcaggccctccccttgcaggtcggcggcgtgatggcggagaaggcgctggaggccgtgggctgtggactagggccgggggctgtggccatggccgtgacgctggaggacggggcggaaccccctgtgctgaccacgcacctgaagaaggtggagaaccacatcactgaagcccagcgcttctcccacctacccaagcgctca

SEQ ID NO: 5323 - DNA, 6000 bp, Homo sapiens
agataggaggttggcacaagatacagatcataaagaccttgctgataaaacaggttgcagtagaggagctggccaaaacccaccaaaaccaagatggcgacgagagtgacctctggtcgtcctcgctgctgcactcccaccagcgtcatcacagtttacaaatgccatggcaacatcaggaagttaccctgtatggtgtaaaaaggggaggcatgaataatccaccccttgtttagcatatcatcaacaaataaccataaacatggttatgtctatggagtcaccatccttttattccaacactttcctaataaacttgttttcactttactctatggagttgccctgaattctttcttgtgcgagatccaagaaccctctcttgggatctggatcaggacccctttcctgtaacaaaagtgctgggattgcaggcatgagccactgcgcccagcaaatttttgtattttttatagagacagggttttgctatgttgcccatcctggtctcgaactcctgggctcaagcaatccatctgcctcagcctcccgaagtgctgggactacaggcaggagctaccttgcttggtctgggaacttttttcccatggaatgattactgtccccattatacttgttaacataaaggaaaaaactggcacaaatttaagtagagagtttacttggaccaattttgaggacagcaatccaggagcgtagattcaagttgccctggacaataggctcagattatcagattaatagcagttacaaacgtgtgtggggttttttttttttttttttttttgagatggcgtttcactcttgttgcccaggctggagtgcagtggtgcgatcttggctcactgcaacctctgcctcctgattcaagtgattctcccgcctcagcctcccgagtagctgagattacaggcgcccaccaccacgtccggctaattttttgtatttgtaatagagtcagcgtttcgccatcttggcgaggctggtcttgaactcctgatcttgtgatccgcctcccaaagtgctgagattacaggcctggccaacaagtgtgtttttaaaggaaaaaagaggccaggtgtggtggctcatgcctgtaatcttagcactttgggaggcccaggcaggaggatagcttgaggccaggaatttaagatcagcatgggcaacttgcgactaccaccaccccaccgaaaataaataaataaataaataaatagaagaggcagttcctaaactgtttgccaatcacttacattaacacagcgtaaggtatttgattggctgtacgttgttctttgtgtcacagattccacgaacatgaagataatgggtgaggcagctagtcagggaccaaatgcctttaaaccattgcccccaggcatgggtcggggatttgtgactgaagtcccatactcatgtctcgctgggcctgataattttgcatacctcacatagttcagactgctttaagctatttttcttttctcatcctgatgcatagaatgatattagaatagagattgcagaatacaagcaactatacctcagaagagaatatagtttccaaatacgttcagtcaatggactttcctttttttgttttgagatggagtctcgctctgtgcccaggctgaagtggagtggtgcgatctcggatcactgcaacctctgcctcccaggttcaaggcattctcctgtctcagcttccagagtagctgggattacaggtgcccaccaccacgcctggttaatttttgtattttagtagagacggggtttcgccacgttggtcaggttggtctcaaacccctgacctcagttgatccgcccgcctcggcctcccaaagtgttgggattacaggcgtgagccactgtgcccggcccagtcaatggactttcaggtgcagaatgaggatgtggtttggggtgaaggtgaagtgggataagaaaaaggctacatgttacacgatgtgatgcaggatgaaccaactctagcataatccagaatgggaatgacattgtgatcaacagtccaaccccctctcttgtacattttctaaagcaagcgaaataaaaattgtggcagggcacggtggctcacgcctatagtcctagcactttgggaggccgaggtgggtggattgcctgagctcaggagtttgagatcagcctgagcaacacggtgaaaccctgtctctattaaaatacaaaaaattagctgggcatggtctcagctactcgggaggctgaggcaggagaatggcttgaacccgaagtggaggttgcagtgagccaagattgcaccactgtactccagcctgggtgacagagcgagactctgtttcaaagaaaaaaaaaaggtaaaaaaaagggtaatcttccttttcttattaactttatttatttatttgtttatttatgtttttgagacagagtctcactcttgtcgctcagcctagagtgcagtggcacaatctgggctcactgcaacttctggctcctgggttcaagcgattctcctgcctcagcctcctgagtagctgggattacaggcgtgcgccaccacacccagctattttttttgtatttttagtagagatggggtctcaccatgttggccaaggatggtctcgatctcctgacctcgtgtcccacctgcctcggcctcccaaagtgctgggattacaggcgtgagccaccacgcccggcctcatttttttatttttagtaaagacaagatttcaccatgttggccaagctggtctccaactcctgacctgaggtgatccgcctccctcggcctcacaaagtgctgggattacaggtgtgagccactgtgctgggccgaatggattggattttaaagcatacttcaggcagatggaataagggaatagtctgagtaacggtgatgagaaaagaaagaattggccaggtgcggtggctcacacccatgatctcagcactttgggaggctgaggagggcagatcccctcaggtcaggagttgaagaccagcttggccaacatggtgaaatctcatctttactaaaaatacaaaaattagtcaggtgtggtggcgggcacttgtaatcccagctactcggggggcagaagttgcagtgagccaagattgtgccactgcactccagcctgggtgacagactctgtctcaaaataaaataaaataaataaataaataaaaaagaaataattgtatttgatgacttggtgagtcagctagcataagacatgtgtaccagggagtagtataaaactacaaggttgtttagcttggagttagagcaacttgtcaattttattcccgaggcaatgggaggtgtttaaagtttttttgcgatgctgtctgaactatactttaggaagcctatggtggcaggatgaattgaaggcacaggaaaaggtttcaatattcaatagtccagggaaaagaaacggaggacctgcaactaggtgttggcactaagggatggagctttgcctagattttccctttgtagattcttctcttcctggatggaaaatgataaaaggaaattcttctgatagtaaattataatgttgactccaaaatcaattctagataaaggcgattaaattgcaaacccaggatgcctgtctgaatggtccctgcattcaaagatattttcccctttacaggagcaccggataaatttaactccctaatctgtcaagggctttgtggaagagcctggagggggatcgaaggcggaactgatactgacacacctgggtctgcaaactcccaaaactgaggctcagaattagtaaattagggcagggcacttccctctttggaagggaagttcctattttcaaagttcttccaacggaacttttacattagagaagtgtaattgactgagaagtggaagtgaccaggaacagcatttctgttccctgggcgggagagagaaccccctcgggcggagccagcagcaggtcagcttctgagggggccctcatgctggcggcgccgacctgtggtgcaatgctctgagtaggagaatcttaaatacatgtttgagattcaattcccagaaacgtaactagtcttcacaagccaaaaaaataaaaataaaaaataaaaaaaggaagtgatttcttttcaagaggtcaaagggcctggaagaagaggtcctggcttgagtgtctcaaggctttctggggcctaatccggctggaatgggccgcagcattcatattcctgtccttggtcgtgtcttaatgaagaattgaaaataataaggggtggagaaataactttcctttttctcccaccatcctcccacagtgtaaataaacaaataactctaagctcgatttcctcatttgtcaggggtggggaaagacttgacatcaggactcttccattccatcgccacctgtcttaatttaaacattcccatgacccaccccagaagcgccaacctcccgcccacaaggagcatggaagtcttggtttctggctactgcgcagactccaccttggacctactccccaaccccccgccgctcctttccccgtttctccagcagagggcgcaggcccaaaggttccgccgaccccgccccagcctggccccgccccgccccggcgtaggggcggggaagacgggcacagaaacctggccgcggctttccgggagctgtgggcacgcgagctgctcgaagccggtggcccggggatcgtcgctgcccagtccggccgcggccggccgcttccccgagcttaccagtaagccggtccgcctccgggacgcgccccgcccgccccgggctcgcgcgctctgaaggggcgcgtcccgcgcactcccggcgccgcccactcccctccccacggccgctcctccctccgcccggatagccggcggcggcggcggcggcggcggcggcggcggccgggagaggcccctccttcacgccctgcttctctccctcgctcgcagtcgagccgagccggcggacccgcctgggctccgaccctgcccaggccatggccggcaacgtgaagaagagctctggggccgggggcggcagcggctccgggggctcgggttcgggtggcctgattgggctcatgaaggacgccttccagccgcaccaccaccaccaccaccacctcagcccccacccgccggggacggtggacaagaagatggtggagaagtgctggaagctcatggacaaggtgaaaggccggctgagcgcccgctgttgcagggtgggcgtgggcggagggccgcggggaggggaacgagcggacggaggaagcgggggaggggacgggtctggtgaagccggggaggcgcggagccggggtgaccggccgggggcgtgggggcagggacgaggccgggagggtggggggcggcgtgggggaggggctgccgttgggagtcggggaacgctggggtgccgcgtttggggtagccagacaaagatggagtgggggctggggcgaaggttaactgggaagtcagtggggcggaagtacaatgaggggtgcggagtttggggctctgtgcagggtgtagggatgtaggtcacggaattggcctgggaggttagcagggagggggtgaggaagagtgatgtaccggctggggctcttggctgggtgagatctgactagggaattaggttcatgggctctgactgaggaacctggctggggtcaggacagctctcagggaagctgtgctctgggtgagagtatagtcctttctcattaagatgtaacacgaagataaaagacatattgatgtttaagtgaggcaaggaaagaactttcctccccatctagcgccggctcaagttttttgttaccctcagaaacactggatgtgatccattgctggtgctgagatatgcactgattaaaccacaagttctggttagaactattatcttctgaaagatggactggctgagc

SEQ ID NO: 5324 - DNA, 6000 bp, Homo sapiens
ttaaggcagagggtaatttaataatcacatattagctgggcttggtggtgtatgcctgtagtcccagctactgaagagcctgagatgggaggatctattaagcccaggaagtcaaggctgcagtgagcaatgatcatgccgctgcactccagcctgaacaacagagtgagaccctgtctcaaatatacatatttgtctcatgtatatatatatatatatatatatatatatatatatatatatggcttcagaatgcattgtgacttttggttaggaggttgaaaggcagcaaacctattcttgtgttttttcttagattaatacaaatttaaatagttaccgttggagcctgcagtgagccaagattgtgccactgcactccggcctgggcgacagagcgagactccgtctcaaaaaataaaataagtaataaatagttaccattactgagataaacgctgacctgtgggaaagagaggcccttcaaaaatgtaatggctgatggggaaaaactaaaattaggattaaacacttcttgcaaataataatatccacacaggaaacctaaatattaataatgaagagttaaccgctccctgatgtttgaatggggctttaaaaattcctatttcacgtcatgaagtgggagaaggcctaatggtaatgtttactttctcaagaaaatatctagttaaaaggggccaggtatgtagcaaagagacagcaagaggagccttccgcagtactttaagtaactaaggggactgctccaccacccatgagcccatctgtgcatatctctgcacacatacacatgcatgcatgcattcctccctgtatgcccatggatgctagagctgacccttttctacagaagtcctggctaccttgacatcctactcaggtgagtgctgaaagctgatcctctgcattgtccaaaacttggattttcatccatttgcccgtgattttttatgaaagaaataaacagaattgtagcctgttcagactccagtagctttccttgccaactaacttggacattgctgaacagaatcaagcctgaaagtgagcaaggtcacctttcatgtctgcatgattctgtaaaatctgtaattccagggaagtttaactgaagcttgattcgccgcctcagcatctaactagggacaagagaatctgagggcaaccaccagtcattgccaagggaggaaaaaaaaaagattgttgttgctacatttcaaattgtattttttttttttttgacatggtgtctcactctgtcacccaggctggagtgcagtggcacgatctcggctcactgcaatctccgccccccagattcacgccattctcctgcctcagcctcctgagtagctgggactacaggcgcccgccaccacgcccagctaattttttctatttttcagtagagacgggatttcaccatgttagccaggatggtctcgatctcctgaccgcgtgatccgcctgccttggcctccgaaagtgctgggattacaggcgtgagccaccgcgcccaaccgaactgtatttcatactctgatgtttagttgactcaaaacgggtgggcccagctctgccctcctaagacaaagtaagaacttttggtctgactcagagactgagtttattaaccctaggactcaaagcaggaaccctggccggagctcccaggttgccagggttcctcttgtgctctgtgtggccccaccatagctcacctgctgactcttctgcctcttccttctgtggggggaactccttgcagttgaggctttttttttttttttctgtatccctgtggctaacattgtgactagcacataacaggcagttatgttttttaaatataaaattccctttttttccctctaaatttttaatgcccttcactgagataggagttgtgaatacagcagaatacagtgcaaacctgcaggaatttttaggtaagtggaggcagcatatcacagtggttaagggcattgtcatgccagacccctattgacttcaggagggatagcaccagattcaagaggccagagaccaagagccaacaaatgcgacatagggtttgttgaggggaacttacataagagggatccggtggcaacaggctggacaggagaaccaccactgcctgcagaaagcacgcagtttacatggcactctcatctaacaccctcccgctaacaacctccacctggcaaccttcatttaccccaaaacaaagggcctcagccccctgtatggcccatgttccaagggctgggccaggggctcagatgttcctcatacataaggaataatctctgggttggccacgcttggaacactagacacacattcaggtgtgtctgccacacagggtcattctcaggttatacttaagttaccgctgtcaggtgcatctgccatacaggcgtgatctccagagtcatattgcctgggtttgtaccctactctgcctcctactaaccgtgtcatcttgggaaagccttgactgctccatgactcagtttctcacctgtaaaatggagataacaataggtcccatcccatagaattgtttgtgaggattgagtgtgtgtatatatatatgtgtgtgtatgtgtatgcatatatatgtgtgtgtgtgtatacatatatatgtatatgtgtatatatatgtgtgtgtgtgtgtgtatatatatatatatgtagtgcttggaacaatgcctggtacattaataagggcagtataggtgttatttgttattattgtgattattattctcattgctattaaattggtggagagcttcctgtcccctgctctccttaacagcccagaatttctgggggatgctaccggtgacaaggatctgatttggtggaacagggattgtggccaaagatacatacatcaacaaaatttaatcctaggtcatgaagcttgaacctagaatcccagtcaccctaggataaaggcccaatattttaggaagaactggctccttcccttttaccttaccccctcagcctttaggctcctgaaggctttagtaccctacttttgtgggaaatgatggcagcaagaagaaagtccagattcagatactagaaaaaaaatactgcaacaaaacaaatgggggaaagggtgagctctgcatactctccattcagtgaagtggagccttccatgttttacttctccagactatcattacctgttatccggtctatcctaacacatgtgtaacaggccttctgcaattcatcttacactgattttaattgagtattgctagagctggggttctcaactttggttgcacattggaatcacccagggagcttttaaattgattgatatctacacagagattctgatttacttttttcggagtgtgccctgggtattaggattttaaatagctcccaagtgatactaccatgctatcaagattaagaactacgacccaaatgtgtatacgaatcactggggaacttgttaaaatgcacattctagtttggtaggtccaggggtaggttctgagattctgagtctctaatgaactccaaggtgatgcagattttgctggtccatagaccacactttgagtagcaagggcttggagagcatgataatatgattcccttgttcaataacatcatgagcttccacataataagctctctcagcctggcatcttaggctggcatcagaggcatttaaggactctaacagcaatggttatcaaatgtgatcgtctgaatgactcctgggcaggttttaaaaaatacagatccctggaccccataccagacctaataaatcataatattcaaggtacagcctgcacagggtatttgaaaacacttcccaagtggcatagttgatcaacacactttaggaactgtgatatgcttccaagatagtttcccaggctcatttcacattaattcaacatacaaacatttattgtacctgcctcatgctaggtactagggaaacaaagatgaaaccagtgccatccttacctttgaagagttggtaagataaatgaccaaaactagaatatttactattccccaggcacggcctaaacactcacacctctgctaacggtcttctcctttgagaatgtctaggttcctcagcacccgggattgcctgtcctgatcaatcaagacagacaccgtctttaccccattcgagcctccattcttatcgctcaaacttactctgcttggtattaaaatagaaccagagaagaaaaggatttacccaaagtgaaataaaacagttggtatttatgtagtgacttccatgtgccagtcattgttcaaagcactttacacatgtaatattttaaaattctcaaaataaccatatgagataggtgttattactatccccatcctcaggatcgaggaaagggaggcaacagaaaagtaacttgcccaaagaggtaccaagcaaggttcactttcaagccttatgctttactgtcaagttggttacagggctgactggaatactgtaacttctaattctcaggcctgagcactttcctgctcatcaattcctgtttcacgacttaaattcaagcacgagggcaagaacgatgtcttacatcccccacaatgcctagtaagggtgcaagtacttagtaggtactcgataaattgattggatgagctgtcccattgaggggaggggagaagtggataatgatttaaacaaacaacaacagctaaacaagagcagcggcctccaggtctcacgtcaccgctagatccctcttgacccccccgccagagaaggaggaccctcccgcgccctttcggagcgtcggtggcccggctccggctctgcgctccatcctcccagccagcaggtgcccccagacccccggctcctcctccgccgccgtcacagcctcgtcctccgcctctggctcctccgcttcctgttgccgcgatccgggccgggagctgcgggcgcccgggcgcccgaggcttcccggtgcgctccgccaggtaaccgctcggcgcgaactgcccggccggggtgggcacggggcccgcgcggcccattggtggggaaggaggcggcagagggcccgggctcgcctccgaaggggagcgggcctcctcctgcctcggacgcccgaggccttcctgcgccaggctgcggcgccagcgggatgcggggataacggtgcctggctccggctcttggtccgggcgtggccgagcgtcgcaggcaccgccgcgcggagatgcgatcgccgtccctgcgaggccccggggcccgcgctcgccgccagccacgcctgctccaaggctcctcctcgccagtctggccctggaacgggagaaaccaggagaggagccttggacctctgagccgcgatggccttccaaatgcccttccgttctttggcaaaaaccaagagcaaaaagccgaaacccacacagggagttcccaaggtcacagagttgtgtctgccatttacgaatgtctgttcttttatttaagtgtttgtaaatgggctactgttttctctgttctgccaaggaattaggattcagagaagaagactctaaaaatactaataggcatatccaaatgagctgatccgcattactggccagtgaccctggcctttagaaggagataagggagggcagttctcttcacctgggatactttgtatttctggcccttactctgagaattggccttgatgttttacaaagtttatctcagaactccatgtcagaactggaccggactgtagagttcttcagtcctagtctctttctttcctttcccttcctccccttcctcttccttcttttcttttctttaatttcttctttttttttttaactgtggttctagaggttaaagtgatttgcccacactcttatggctagtctctctagggacagagacagaattggaacccaggtctattatggaca

SEQ ID NO: 5325 - DNA, 6000 bp, Homo sapiens
aatatgatccggcaatcccaatactgggtattatatccacaggaaatgaaatcagtatgctgaaaagatactctgtgcttccatgtttattgcagcatattcatagtaaccaagatatggaaaccacctaagtgtctgacaatggctatttttattagcactcattttcttgattttcatagaaaattatttctttgcagactcaaattttatcagttcatgcaattcaattaaattatatacgtatgaggcatacaatggaaatgaagtttgggaacaaacataactgactcttggggagtattccactcagctagtggaagcagatgtggaggagtaaactaaagtgaaggctactagctatgagtcttcagtattttatgagaatcagttggcatatttcagaaagggaatcaagaatattaagtagatggttagaaaaactactgtatgcacatatgtattttctggggacagagtccatagatgtcatttaatttttggagggatctatgatcactaaaatgttaagtactgttaacttaaaaattatacaatttataaatttaagaaaggagagaagaatttatttcttataaagtgttgcagcctgcaaggtgaccaacccacaggctgggaagtgtgcctccagccgagaccagagataggcactttgaagaaggaggggctggagtaggagctttatgctgaacaggttggctaaacatgcatgttttacaggaggagctatgaatattcatgaagctgatcctgacatgcatattgaacaaacatgcatgtaacatatgaccatgttcactttaggatggagagttaacatttaaatatattacaattaggccctatatgtcaaaatgttttttcaggacatgaaggcatatagatgtgcaacttctgtaaactgatcagaaccagcccatgggtcagtggtattcttatcaggagaaagttattaaaaccagtctttatccaatgaaagccgtagttgtggcttgtggaatagggggtcagttagcgtctggtggagctgcaaattgttttaatattgcttatctgaaggccagtgtttgtttagctgctagagaaaaagaaaaatcttgtgacagttagaacatagtttattctttacgtgtagggtacatgacttaaccctcgcctggcacgaccttaggtcctatttataatttggtattgtatcgccacaaagaatctgttctgccagttttatgatttctgttttaacatcaatgccggtcagtcgtgtctaaaaagggagggggtataatgaggcctgtctgacctcatctcatcatggctgggaactaagtttttaaggcttttctggaatccctttggccaagaggtggtctgttcagtctgctggggggtttaagattttatttgtagtttaaagtatcatactataaattaaaatagaatccatggggccaggttaaggaataaacactttctcttcctgtaatctacttttggacacttgtgcatccacctttttcatgaagattctcttctccctaaaaaataaattcatgcaaacagatgcttgtgagccagtggcccaacgagttcatcagaaacattcactctaaatagcttggtgcctagtgttcttagtacagtccagtgtgatgtaatgaagagaggttgatacattactgatgcattcagtgacaacatttcattaagaaggctgttctgttttacacatctgaaaaccagttagaaagtgacatgatttggatgtttcctcccctccaaatcacgtggtgaaatgcgacctccaatgttggaggtggactgagtgggaggtgtttgggtgttgggggcagatccctcatgaatgtcctggtgctgtcctcacagtaaagtgagttctcactctatgagttcacatgagatctggctgtttaaaagagcctgagtttaaaagagagagcctcctccctctctcttgctccctctcttcatgcgataggcctgctccccctttgccttccaccaggattgtaagcttcctgaggtcctctcaccagaaccagataccagcaccacacttcctgtacagcctgcaaaactgtgagccaaaataaacctcttttctttgtaaattacccagtatcaggtattcctttatagcaatgcaaacggacgaatgcagaaagaaagggtcttcatttcctaacttcagaaactacagtctttgtagtttcctttgtagtacctttgtaaagacaaaggtctttaaacagtttagtgcttagtgttctcattaaagtataatgttatataatgaacgtgggctgataaattattgatgcattgaaaggcaacatttcattgaaaaaaattcaaactcaatctcagtttagaatcttccaagtgaatgaggacttctaactctgttcaggtcaaatgtagccctctcagagaaactgactgaccatgctgtctgaagttaacagcttccgttaattttgattctcttaccccattttctttttcttcatagcactgtccgacattgtattatatatctatttatttattatcagttttctgtctccttactagtgtgtaagcttcattagagcagactttgttttgattatcagtatatctcctgtgcatatgacagtgcctgacacttatcaccattacataatgatttattgagtaaataaattgagtaatttaatgattaaatggtttgtttccatgttcatgttccatccagacacataggcaggtattgtggcttatctctgaattccttggtactggctggttggtaccatagacccttgcaaacaatgaataaataaattaccctgatccatcagtgtgcctggatagaaaagacatgtaggaatgctgcaccccaggatgtgctattaatacacttatacaccacggaatactatgcagccataaaaaaaagaatgagttcatgtcttttgcagggacatggatgaagccggaagccatcattctcagcaaaataacacagaacaaaaaaccaaacaccacatattctcattgagtatgtgggagttgttcaactgtgggagttgaacaatgagaacacatggacacagggagggaaacatcacacaccggggcctgtcagggggtggagggcaaggggagggagaacattaggacaaataactaatgcatgcagggcttaaaacctagatgacgggttggaaggtgcagcaagccaccatggcacatgtatacctatgtaacaaacctgcacgttctgcacatgtatcccagaacttaaataataattaaaaaatacacttaaatttatttttaaacaagattgttctcttgaggttaacttattactactttgagttgtcaggagtgattgcaaatttcttgggaatccctaagtcaccaagaataaagaccacttgtaatagctaaggcatattcaacaataaaattctagagattcaggatatttgatgtttgcttataacatttcacttttgagcttttattcgtttaataaatgttttatcatctatgctcaataacattttaaagtgtccattcaaatcatttcattgggcaaaacaatgttccttccctaatttccctcatcagaatagccattttgtctctgtgctcagcctataccaccaattactgtttatttcctgtccttgtaataagcaacatagttatttatacatgcccatttctcccacagcacataagctttttaaggttgggaaccatgtctttgtcattattgtaacatctctttccattcccggtgttcagtacgatgtgttaaacgaagtagacactcaaaactttttaaaatttatttttatttatataatgagtcttttttaaaaaaaccacctacactattttaaattcatttgaactttgtccagtatcctatgtacatttgaagtttaactaccggaaaagtcttttgaaggcagatcgaatcatgttatttttttcccttaaaaatccctcatttctgtcatgtattccccatattatttatgtaataggtaaagtggcccagtttgccactttgaagttgctgagctggtatcacaagtcagtcccctctgttttaatctctgtttaaggaaagtcactctgaaacgacagatcttttggttccttatttctgctttcctccgtcctcttctgcctgtgaagccaccctcctctgctcagctctgtttcaggaaatcggagctgctcgattcatgtgtagcaaatcaaagccaattagatctgcgttaaccttggttttcaacaacttgtatcgtgaaaaggtttctgtccatgtttaccctcatcttgtcaccatttagacccctacatacaccggctcgcggagcctccagccattcagcgctagaaaatcggggggactacgtcttaaaaccttgagcacctgtttgggaacatctgcacctcctcccttgagggagaaaacgacccagacattcgcgtcaaaggaagtgtcgtctatttccctcaacgcagggcacccgttctaggaatgtttgtataaacaccgtaaacctgcctggtaccaccatgaatgacacaagagctagtttaaaaagaaagcaaagaaacaaacgcaaaacccgaaaccgcatcctccaccgcaaaggtactcggatggggcgcccgccctccccttagtcagaggacaaagggggcgtggccgagcgcgcggcgcccacgtgaccgcggagagctgcgcgcaggcccttcgcgcgatctgccgtcatatcagcttatggcgccggtcgctgattggctggccgctccagcctcccggcccgcttgctggctgcccagctgctaggacagtttgcagagcagtggcgtgcggagcggcggcggaccacctccaggtggggacggtgggtgggcggggaaggaagcggaatacacctgagcgggctgggccggggggcgatggaataaaagaagatggagagacttcagcgcctgggactcgggtgggcgaggcggaaggtgtcctcgcagcacggcttttctccgcgccgcggttggttagcgagtgccctctgggtgctaggcgttgggcggatggtaggatcgcggtagcatacggatccgagtcctgcgccgagtgagaggagaggctggcaggtagcctggcatcccgaagactggcggcgagggctgggccgggggacctcggggcctggagggctgcgccacctgggagtccgggcggaggggccttccgctcgcgctgggagggatcgcggggccgatagggaggcctggacttgaaggagccgaccgtggacgggcttaaagaaaatgcagtgtttgatgttgggtgttgcagatctcttactcaagggaattctggtctggctgctgaacacgaatgctttacttttcccttcgttctgggagggtttttttcttttaaaggccagaagaatcaggctgaagaactggtcggtatcagaactcctgaccattgcaagcctctgttgctgcggcgtaattagaatgaagggacagcaatctggggctgaggagactgaaaggaaaagggaaataatctgttccttttgcatcataaaaggaaaaataatgtatactgacatccctgtgttacagcagagtagatttggaggtggtgtaagtgaagaaaacaagacctcagtacatagagtttccaaactggaaagtttgtggcagctcggtacttttagaggaaaccctctggaagttatttgtctttatatcactatcattttttaaagtttctaatgattgatacctagtaaataataactgatccttgatcatttacagagtgcttttccattcgttatgtaatgtaattaattagcatggggtggtactcagaatccctcatctgcatataaaacatcttgagagataacataacgtggt

SEQ ID NO: 5326 - DNA, 6000 bp, Homo sapiens
gacttcatatcaaaaaaaataaaataaagtaaaagttaaaaaaaagaaaatctgaatagtcaaatattgactaaggaaattgaatccattactaaaattccacacaaagaaaatcccaagactaggtggtttcacctgtaaattctgccaaatatttaatgaagaaataataccaatactgcacaaactcttacaagaggaggcagataaagaagaaatacttcctaactcttttggcatggccagcataacctgccaaagacctgataaaaaaggaaaattaaatcaagttctttcttctttttaaatagaaatgtaaaaatccttaacaaaatattagcaaactgaaaccagtaaaaaatttaaaaggtaatatatctgaactaagtgagatttatttcacagatgcaagagtaatttaacattcaaaaattgatcaatatatctcatcaaaataatacacataaagataaaaatcatatgagcatctcaaagtatgcagaaaaaatatttttaaaaattgaatattcattcatatcaaacacacttagcaagctaggaataaaggagaacttctttaatgtgaaaaagaattcctaccaataaaaaaaaaggaaaaaaacctacaatgaacatcctgctcaataataacactgaaaactttccgcctgagagaaggaacaagacagagatacccattatcactactcatattcaatattatactggatggcctaaccagtgtaataaggcaagaaaataaataaaaggcataacgatagaaagaaagaaagaaagaaagaaagaaagaaagaaagaaagaaagctgtgatttttcataaatgatatggttgtatagatttttaaaaatctgaattaatctacaaactattagaatcaataaatgaattcaataagattgacgtatacaagatcagtgtacaaaaatcagttgtattttcatatgtgagcaacaaacaattagaaaatcaattttttaaaaaatatatggttaacaatagcatcaagaaacatcaaacacctaggaataaatccaacaatagatgtgtaagacatctgcacttaaaaccaaaagttgctacggacagaaagacgtcttttttttttttttctttgagacagagtttcacttttgttgcccaggctggagtgcagtggcacgatctcggctcatgcaacctccacctcccgggttcaagtgattcttctgcctcagcctcccgagtagctgggattacaggtacctgtctccacgtccagctaatttttcgtatttttactagaaatgggttgtcatcatgttggccaggctggtctcgaactcctgacctcaggtgattcacccaccttggcctcccaaagtgctgggattacaggtgtgagccactgcacccggcctcagaaagaagtcttaagcaaatggagggatatgccatgttcatagatttgaagactaaatgctgtaaagaaggcaatttttcccaaattaagctgtaaattaaagtcacaatcaaaaattccagcaggtttctttcctgctgaaattcaaaaactgatggtaaaattcatgtagaaatgcaaaagatccaaaatagccagagcaatcctgaagaacaataaaactggaagatctacactacaggtgccaagacctactataaagctatactagctaagatattgtagtgttggcaaaaaaaaaaaaaaaaaaaaaaagacattgtcagctggaacacagtcacctgatttatgaccatgacaacactgcactgcaatgagaaaggaaaggtcttacaataaattgtgctgagtcagctggatagccatatggaaaataatatttcttgactcatatctcataccatatgttaaaaaaaattatagatgaactgcagacccaaatgagaaagataaaacaaaaatattttggagaacacctaggaaacatttttcatggtattgtaattaataaccaattgcttcttaaacagaatacatatagcactatccatagaaaaaaatgatacattgactgtattaaaattagaaattctggtcatcaaaagacaccattaagagaatgaaaaggcaacaagtggagtggaagaagatataaataaaacatattgctagcaatggtctcacatccagaatatttgaaagagtactacaaatcaataagcaaaagacagacaacccaacagaaaaacaggcaaaagactcagacgtacacccacatccatccacaaaagaagatatccaaatggccgaagtagccaacttcattagtcaacagagatattcaagttaaaaccacattgcattactactatacaccttccaaaatggcttaaaaaaaattttaattccaaaagtgtaatgtcaaggatgtgcagcaactaggattttcataagctgttggtgaaagtgtaaactgaaacaacctcttgaaaaactatagagataaacatatgcatagcattatgacctagcaatcccacccctcaatatgtacccaacataagtgcatacatatattcaccaggagacacatattaggatgttcacagcaacagtatctcataacatccagaacctgaaaactcaaatatctgtcagcttatgaatggataaacaaattgttatatatctacacagaggaaacgcatttctggtacatgcaacatggtgaatctcaaaaatatgttgagcagagaatccagacacataaacacatgcacatgattccatttacataaagtacaaaaacaggcaatgaaatggatgattctcataaatatgatgtggagcaaaagaagccagacacaaaagagtaaatacacaagattccattttcataatgtataaaaaagcaaaactaatcaattagaagtttatataatgcttaccgtttggaaaagctggaagagaggagcacagaggtggtttctggggtgctcgtaatgttctgtttcttgatcagacgagtatttattaaactgcatccttatggtatgtgaatttttctctcgttttttggtctttttaattttttatttcaatcgcttttggggtacaaatcgtttttggttacacggataaactgcatagtggtgaggtctgagattttagtgtacccgtcacccaagttgtgtgcaccgtacacaatactaaggtgtgtacattatttctcaataaaaatgtatttttaaaaagtaaaaggatatgcatgcatacaaactaataataaacatttggcaaaaacatgcctaattaaaagatacagaaatgtggtgtggggagggtaatggggaatagaaataaagggtcccttctgctgccccatgacccatacacgccagttagcccacgcggggcagctctgaatccaagttggcctctagcctgtgggatggggagagaggtaagcccagcccaaacatttgtggcctaggagaaaaaagttcaaatacagatccacataccatatatctaaaatattaaaagttataaaccaagttaacaaactgttaaataaaatatgttattcttgctcacctagacatatatagacaaacacaccccagcttcataatgatcaggaatgccagattcaaatttagaatcctcagactctcccaagcccctggcccaatcttctcttcccaactcagctaacacccacattgcaaaaaacctcagaattgcatgtgtggacaccccaagatttataaattgcatccaaaccctgacaaccagccattccttgggcctagaagtgcacaccagcagcacaatcttcccttgggcagttgcccctgaaaaaaaggcccacacaggtctgggaagcaggctgaggccatttgggcagggccttagagagtggtttctagctgggtgcacagactctgaatggacacatccccttgggcccacgtactccttgcctcatgagaaggacacaaccaaagaggataaggttaagagcctctattgccagtttaagggcaacactagagacaagagtgccctattctccacttacccacccccaccaaattgaaataagagctgacacttctgctacactttacggtttacaaagcaccttcacaaacaatactcttaatcaatccccacagtcttgtaagcttgttacatatcacaatttgagagatggggaaactgagctaaaagtgacttgcctgaagtcacacagttaaaacctgagtactcctaggtctccagtggaggagtttctcctccgaatttcaaaggttgtactctttccatgactcaacactgccatgcatcccccagctttgtaaagaacccaagggctaaaaaggaattggaaattgtaaatatgtagttgaaacattttggaaaaaagaccatagtcagggaaggaaatctaacaccaaatacagaaaagttctgggaaagagtctgggcccagagcaaaaatcatcactgggacaaagactactatgtagggtagcaatcccagctgggtcgtggggactccattcccactccaaaccacaaaatgagtgccttcaaaacatttaagcaatcctcacccaaattccacacaaattacatggaggggggtcctggctccacagccctccttctctccactgaaaatactttatcaatgacagggcagcataaagccacagacctccatctgctctaggacaatccagacagcagcgtggcaccaggcccaggtaaggcccgaccctcctccagcaaggacccgctaaggctatgcctccctctaattagcagggcctggctcagggcctgggcagttatttagagaaccatcgcctgctcccagcagagatatccataaggctggggtggcaggcactgtctgcccaaagtcagctgcctgaagctgccgtctcctcattccaccatcccaggacccctgctgccacctctgcacccccaagctcagcagcatcatgtcacttgcacacacagctgcagagtacatgctctcagatgccctgctgcctgaccgcaggggaccccgcctcaaaggactgcgtctggaactgcccctggaccggatagtcaagttcgtagctgtgggctcccccttgttgctgatgtccctggcattcgcccaggagttctcctctggtaagttgcttccaagacccagtgcgcaagagagactccccctcatgtcactctctgcatgggctctgaagtgagatggtgcgcacagtgacgggattccatggcttcgggctgggctggattatccaaaaggcagatggtgcatgagttcagggcaccagcaaagcagaggcaccaaaaaattttgaaagtcatctccaaaatgttacagtaaaaaaaaaaaaaaaaaaaaaaattgttgtaattttagtattcatatattttatgtcatttcaaatgatgaaagctttattttggctttcattatggatgaaagaagttgacactcctggtaatgtttttagggccttagacctcttcatcttagctgggctgtcgccaagtctcttatttgctctgggccctcttcccacccctaacccgccaactccagggttattgacttgagaacatgtgttaagtgcctgagggccatgcacattggagatgctgcataaacccactgcttcctgtctacaaaccccagccgcacacacagacattagcatacacatacatctagggtttcaggtgctagattcagtcagcaaatccactacctttgttaaagagaatgtggacttcctgagaactgagacttctggctttcctttctggcagtgccattagcttactacatttcccaaacaggtgtgccagcctcccaccgcctctttattcatccacaaccagggcagaagaaatggctcccacttcttcctctttctggagaatgatgtgaaaacaaaaaggcaggaactctcctccaagtccactttc

SEQ ID NO: 5327 - DNA, 6000 bp, Homo sapiens
ggtgacggttagtaggggtgaagcaggtgttacccagggtctcagcatggtgccctttgtcctgagacccaaacctgcttccctgtctaatctaatggattatcttccatggatctatggaatgaaaactgttcaagcaggaagaagaggaatgtgtttaccacaacgtgttagaagactttcatatgattacttcatgtgatctttataactatcctctagaagtcaaatttgggaaattggggctcaggcaggttaaacagcttgttcagggtttccccactagtaagtcacggagctgggaagtagactctgaaattgtctaataaaattccctgatgtttttgtgaatacatttaactactttgcccaagttcacatcactgctggagacagacgatgaactagaatcataggaattctctgaattttgagattgacaggaatggggacctctccctgcccagctgcctgctcattccctaccctggttccttgctctgtccccaggtcctgcttttccccagtcagtcacttcagccgacggggcgcttctcagtgtctccaagaggccaacttaacatcaccgcggtgcagcgtggggatgctgggtactacgtgtgccaggctgtcagtgtggctggcagcatcctggccaaggccctgctggagataaaaggaggtacgtgcccatggagataggactggatccatggcttgggaggaaataatggcctaaagtgatgtgtttctcttggagtctatatactatgtctgcaagaggagagatgtgttcctgaggcatgaccttgaagtttggaaaccagcagcagaagccactaataatggctggtcctgggcagagacttcagatgattatcaaagccccctctgatcaccggaagtttcaggggctggggtagggagggtgaaggagcagagaatgaggacaaggggctgcccgcggggccctaagctcctcccctgaggtgcacacgttcttcctctctcagcctctttggatgggctgcctcctgtcatcctccagggaccagccaatcagacgctggtgcttggctcctccgtgtggctgccctgcagagtgactgggaaccctcaacccagtgtccgatggaagaaggatgggcagtggctgcagggggatgacctccagttcaagacaatggccaacggtaccctgtacatcgccaatgtgcaggtgagtgtcacccctggggccctagtagctgagaatggctatctgctccacgttccttacacaagtaagtactcactgggcctgtagccccatctttacccctctgttctctcagagcacctagtatccaacatcttcccatccttctgctacccgcctccaccccctcactggatcttgctccactctcagtttgccagtgctctgccctctcttccaggagatggacatgggcttctacagctgcgtggccaagagttccacaggggaagccacatggagcggctggcttaagatgcggggtgagttttttctttcttcccttattttgataataccttcctccaaacctgcttcaacaggtagtcgatacctcctcaaactccgggattaactttatgtcacaaatgccatggttacggtggtgaggatgagaaggacagtagtggtacccatgggaggcagatgtgagtaggggttcatatactatagcccactctgaccatcaccgcagctcagagctccatagctcccctggtaaggagacaggttacactaggattatcctttccctatctttctacttaaagattatctcccactgcagaagactggggagtatcaccagacccccctacagaacccagttcccctccgggggctccctctcagccagtggtcactgagatcaccaagaacagcattaccctgacctggaagcccaacccacaaactggggctgcagtcacgtcttatgtgatagaggccttcaggtatggagaaagttttgaatgcaaacctggagagttaaaaggaggggatcctatgcccttagggtctttgctattgtgaggtgggattctccagtaccctcttgcaaggggaagacataatggtcgttcatagagagtggatgagatggagtaggcaggttgggagttcctggcttagacaaccctgtcatctccttcttgttgtagcccagcagctggcaacacatggcgtactgtggcagatggcgtgcagctggagacacacacagtcagcggtctgcagcccaataccatctacctgtttctggttcgagcagtgggagcctggggcctcagtgagcccagccccgtctctgagcctgtccgtacacagggtaaggtcagagtccctgggctcatgagcatgaaatgtaacatcataaagcaaccctctcccccaaaaccatgacaccacggcagttcatacagttctttcctgctatgccaggtctatactggtggcccggcctggaataggagatcatgtttgcctctcacagaagagacaagggaggaggaaggcagggagaggggaggagggaagaaggaaagggagagaggtagtcattcattttggcagcttctgacttctgagccttttacccatagataataatatagattattaagactagaagggaccatggaggggccatcttcatcttagagatgaggaactgaggcctttaaaggatgcatgtgtaattatgctagctggacaccgaggcccatgtctggaagctattttcctgaccagtcccctcctgaccatggggtgtgctctggagtactaagtggagcagggcagaggtaggacacgagcacactctcagccctatctccctgtccctggtggcctctgctgaatgggttccttggtcaacagatagcagcccctctaggccagtggaggacccatggagaggccagcagggactggcggaagtggctgtgcgcctgcaggagcccatagtcctgggaccccggaccctgcaggtgtcctggactgtgagtgtggtatggggaggagattcagggtggggatgattatgaggcacatgagggcctccaagagtgagtatgggagagtgggaggtgagtggctggggaaggcggcatgagtgggaggaggggctgggcctggatggcctggagggcctgtatggccccagcctccccttctggtgtgccttgtcctgtctcccacaggtggatggcccagtccagctggtgcaaggtttccgggtgtcttggagggtagcaggccctgagggaggaagctggacaatgttggacctacagtccccaagccagcaaagtactgtgctaagaggactccctccagggacccaaatccagatcaaggtgcaagcccaaggccaggaggggctgggggctgaaagcctctctgtgaccaggagcattcctgaggagggtaaggagggccaccgaacagatggatggacaagagggaagaaggggtgggggtggaggtggaggggggatgaaaatttgcaggaggagagcagggtgagtgggtgggaaggaggaatggctctcagttccctaagatgttagaacagggagggggaatgttggggcaggaggggcagcttgcaatgactatttgtgtccttctcaccatgctccaccctggcccagcccccagtggccccccacagggagtggcggtggccttggggggtgatggcaacagcagtatcactgtgtcctgggaacctccactcccctcccagcaaaatggggtcatcacggaataccaggtagagggattgaggagggactggatgggagggccaggccgggagggagagggaggacctagtggctagaattagggtggaggaaatctattacaggtttggctttagggttggggatgagtttaggggagaagagagaggtttccaagtgttgtttccaggttgaattacatctgtataaggcttctctaccatttggagccttaagtttcccggtgaggctaagaatcccatttctgactctaaatccgggactcggcctccctagatctggtgcctgggcaatgagagccgctttcacctcaatcgatctgcagcaggctgggcacgctccgcaatgctccgaggactggtgcccggtctcctctatcgaaccctggtcgcggcggccaccagcgcaggcgtgggcgtgcccagtgccccagtgctggtgcagctgcgtgagtccacccgagggcagtgctgaggatcttgacgggggcggggcaagccccccactggggtagctgtgcctgccgggtcgggaatgaccctttcccagttccagggtttcgggcccctcctcccctcacttctctgacccccacagcgtccccgccggacctggagcccgggctggaggtgggcgcggggctggcggtgcggctggcgagggtgctgcgggagcccgccttcctcgcgggcagcggcgcagcctgcggggcgctgcttctcgggctctgcgccgccctctactggcgccggaaacagcgcaaagagctcagccactacacgggtgagctcccggcctcggagcggacggatccgggagggagccaggcggcccatggggaggggcaggggcttagccgctggcgagtgaggaccgggtcgggagaaaggggtcgcacctggagttcagcctcttgggtaggggcgggatacgtggggcgactcgaggagctgccaggactagggagggctgcgggccaagacggggcgggatctggatgacgtttgcctctaagacgccacgaggaggccaggctttgcaaccatctccataaagaaggggcaagttcgaggacggaaagcccactcaaagggcggggggcggggcctggcaagagggggtgtggccaggatcccaggcagtaaattgtgcggcggggtctggatggaaaggcggggcccgctgaaagaaggcgatccgagttctgctacttcctagtaagggacgtctctggagagattctgaggtgtttgaggtcagtggttttcaatcttggttggctacacataggaatcacttgaggggcttgagaaaaataccgacacctgagtcccacccccgagaaattctgatgaaatgggtccagggtgcagcctgagtggtggaactgggaccggggcctaggcgtggacaagtataggggtatttctgacccttctcctcatttcacctcttctttctcccacgggttcctttctggaagcctcttttgcctacacaccggcaggtaagccatctctgccccagtggggttcagaccccccgggacgggcccttctctcactcattcgccccctcattttccccagtgtccttcccgcactcagagggcctctctggagccagttccaggtaattctcttagcccatttcctcaggatgacctccaccgacaggccactcttcttccgccccgctgacgccccaggtggagggagcatggccacctcccaccccaacaccaccgccactgtcctgaaactcccgaatatcgccacctccctttcctttgctggcctcttcaggctctccgtccccaacgctcacctgctctccctcaggccacccatgggccttggccccgccccctactcatggctggcagattcgtggccccacccatctcgaagcccctcggcccaggaacccaggggaagctgctgccctagcaatcctgacccggacgacagatattacaacggtgaggagttctcattccctcacctggcttcagcgcacttctcccgacctactggggcaaaccgaagggcgcccgggagcccggtctctctgaggttggtcagtccctggggaggatgtgagctggggaagcctctcagacctacctccaccctggtttaggatgtaaggcttgtgtgggggaagaagttgatcccgtgggatttccctttg

SEQ ID NO: 5328 - DNA, 6000 bp, Homo sapiens
agagaaagaaaacaatgaccaattaatcatttaggtaagttcctctaatcattcctcttcacgaggaatcaacatcggaatcagctcagcagcttttccaaaacacaaataacaacacctggctctggaggaaatttaagtaattatggaaacaaaaggtaatttaaaaaattctagtaactattttcacagagatttcagaagctactgcatccataaagtaagaacagatttggccgggcgccgtggctcacgcctgtaatcccagcactttgggaggccgaggtgggtggattgcttgaacgcaggagtttgagaccagcctgggcaacgtggtgaaaccccgtctctacaaaaaaatacaaaaattagccgtggtggctcgcacctgtgttttccactacttgagggctgaggcaggaggatcctttgagcccacgaggttgaggctgcagtgagctgagatggtgccactgcactccagcctgggtgacagatgagaccttgtctcaagggaaaaaaaaaaaaaagtgacactgaagaggctaaattagtgaactgcaagataatattgaggaaatcttccagaacatacagcaaaaagatcaagaaaaagttaagaatggtagaggtatccaagaaccaggagataaaacatttgtccaacagcaacttcagaaaatgagaatagaaaaatggagatgaataaaatcaaagaacatttcctgaactgatgatacaaattgtagttttcagactgaaagggcctgccaaatgtaaagcagaaaaaaatgaaagaaggtgaaacacatagatgaaatctctaaggaaagacaatttatcagagagggaaatagattaccgataaaggaaagtgactcagattggtgtcaggtttcttaaggcacagtggatcacgaacaatatagtcacagaggcttgaaagtgtgcttttatgtgtctgtgtgcatacggggtggggtgggtgggtcccaattttgttcctaaaattctaaacccagccatgctattaaggacaaaatacagatattttctaacacgcaaaggcaatgtttgcttccattcagcctttctaaaacacttacttgaaaaaaaattcatcaaaagtgaaaaataaatctaagaaatagcaagatgtcttatcagatgataatctatgaaaaaaaagaaaaagaactatgtcttattaagacaaaacacccaaccaaataacacgaaacagtggaatccagaagtgcattcaggggaaatcccagtaatacaactttgcacacacgtagaaacgtggtttctggagagaacagcttggagaacacagatactattactctggtgtgctacagatgagatgaaggcatgagtttcgtttgattaatgatatacaagaaaggtaaactgacgctttaagaaaaatgaaaagctctacgaaaaagttctaacttctacatcaaaacattccttttaagcaactgatgaaatagtaaaagcattgttttctgaaacaaccagttcaaaacttttggacttataaatcaggagggaggaggattaactgatacactataattcacgtataaactgtaggtttattttcttttattttgagacgaagtttcactcttgttgcctaggccagagtgcaatggcgcaatctcggctcacggcaacctgcgcctcccaggttcaagagattctcctgcctcagcctcccgagttgctgggatcacagacatgtgccaccacacccagctaattttgtattttgagtagagacggggtttctccatgttgatcaggctggtccttaactcctgacctcaggtgatctgccagccttggctccccaaagtgctgggattacaggcatgagccaccatgcccggcctatttattattttattttagagacagagtctttcttgctctgttgcccacgctggagtgaagtggcgtgatcatagctcattgccgcctaacttctgggctcaagcaatcctcctgcctcagcctcctcagtagttgggattacaggccagcacgaccatgtccagctaattcttaaaaattatttttgtagacactgcatctcatcatgttgcccaggctggtctccaacccctggcctcaagccatcctctcgcctcaacctcccaaagtgctaggattacaatcttgagccacgacacctggacctccaggtttgtttataataattataaagactttcctatgagtttgttttcctttgattttattcacaaataagcctttcctcatggactggtatcaaagactcatcctaaaaataggattagattttcaaactttgttctttttttttgagacagagtctccctctgttgcccaggctggagtgtgatggcgcgatctcagctcactgcaacctccgcctcccaggttcaagcaatttctcctgcctcagcctcccgagtagctgggattacaggcacttgccaccaggcccggctaatttttgtatatttagtagagacgggggtttcgccatgttggtcaggctggtctcgaactcctgacctcatgatccgcccgcctcggcctcccaaaatgctgggattacaggcgtgagccactgcacccggccccaaactttgttttttaatagtacattttgacttgtgaaaaggtttacttaatttgatcacttggaagcttaaatgtattctaagaaacatgtttaatacttttttttttttttttggtgggagagtcttgctccgttgtccaggctggagtgcaatggcgtgatctcagctcactgcaacctctgcctcctgggttgaagcaattctactgcctcagcctcctgagtagctgagattacaggagcccaccatcgcgcctggcctactttgaaaaaaattaataaaaactctaacatcttaatattctttttctttttttgagacggagtttcgctcttgctgcccagactgaagtgcaatggcgcgatcttggctcactgcaacctccaactcctgggtttaagcgattctcctgcctcagcctcccaagtagctgggattacaggatcctgacaccaagcccagctaatttttgtatttttagtagagatggggtttcaccatgttggtgaggctgttctcaaactcctgacctcaggtgattcacccgcctcggcctcccaaagtgctgggattacaggcgtgagccaccgcgaccggccttaatattcttaggttaatacttaaaaaaaaacaaaagaaacttgaacacaatctttctaattttaatgcccccctccccgcttttttatttttaaagagaaaaaacttctttttgagacggagtccagctctgtcgccaggctggagtgcagtggcacgatctcggctcactgcaacctccgactccctggttcaagtgattctgtgtcagcctcccgagtagctgggattacaggcacgcgccaccacgcccagctaatttttctatttttagtagagacgggtttcaccatgttggccaggatggtctctacctcctgacctcgtgatccgcccgccttggcctcccaaagtgctgggattacaggggtgagccaccgcgcccgaccaaaactcgtattttgaagaagcatttactccaagttctgtaattccttcaggctcagcttcagtttccttttgttaaagtaaaattacatcgaacacttactactaaaaacaaaaccaaaaaaaagcagatctattgaatcataacgtcctggggcgagcctggtcatgtggattttgaaaaaaatgcatgtgattctgaagcagtgatttaaataatgacctttcaataagtggtgggttccgttcatgggagaataggaaactgcgtgagtggtagaggcaacaagttcgaagagctgcgagacgttcccactctctctggtgtagccttggctcaccgaggcgcgcagggagtggaagtgcctgaggataaaggtgtacacgtgcgagtctgagatgatggaattgctgctcaaacttcgtccccttctctgccctcagcaaacttattgggggtcggggagcgcgtggggtgcgagagaagagaggcaagttaggatagggagagcggctctctggccggtattttaacaaagggctgaactgactaagcatggccgggctgcctcccggtctcccgaggaagcccgcttgctgctggggagggctgtgcctccgcggcggtggctgtctcagctggcagtagaaatgcttccagcttagccccgacaacccctttaggcctaggcacgctctttcacaaaaccaggggctgtgaactctgtcaaggttcccaggtccatcgcagttaccaaggcacagtaaaagctcgagtcaactatcaggcacatcctgcaaaagacgaactgtctggaccagtccgcgtttgagttttaattgagaataaataggtagaaaatgcttccctcctctcctttcaccttgtattaggtaacaatttctaccttaaaaaagacgggagacgagcggctccgcattccgagttactgggacttggagcaagggcctatttcagcgtagtttccgcttcttgtcacatgacgggagtcagtgggccgcgccttcccactgcgactccccgtgggtccgcaaaccgacacgtcactcctcggccctcaaccaaactgcttggggcacgttctttccgcgctcttgactcctacgcgccggcctatgacagctcggcgggagcatacagacctgcctctagactgctaagtgatagctgtaatgaccaattaaaaacttgaatcgcggcccggtttacgcctccggatttgacagacagttccgagaccctatcgctctccagaagcgtcctattggcctggagccagccaacgggggagcggtccgggaggcggacccggctcctgccagggttgggtgcgccgctgaacggatggctgagggagccccgcggatcgtttaggaaagccggccaggtgagaaggccgtagaacgtaacttgaaaatcagcggcaggtgcagtccatggcgttgatggggctgaacgaagtgcaggaggcaaaactctaaatgggggtggagagcagagcttagggccttgcagaggagggggcgtggggcgtggtgtgggggcttcctggatggaaggatgcgaaggtctagggagggagggtaaggtgggtcttgagaacagagcgtgggaaagactgggtcctgggactagttatggaggggaaggcgcgtaggatgctggggtgatgagtgtcccgcgctgaggggtatcagaggtggtcagttctttgagggtgggaagaagagggaggtgggacccgctggaacgaccggaagggagaagagagtaaaagatcgtgagagggtgtggaaacgtgtgtaggaaaacggggctggggaaattgcagtctgggaaactagaggcagggtggcaggagatgccacagcttgcagggcacagttgaggagagcaggttggtaagtgttttaagaaaggtgtctttgctcttatttgcttggcggtgtgcgaaagtgaccaaagagcacgagatgaaatctcccttacggccctgccctcaatgactagctcgtttactcaagttttcaagtagagatcctagcagtctcattttggtgtgtggctcgtatcaacgcagtggtgttaagtttgttcctatttcaggcattccagaaaacagctgcaaaccctgagagatatggctggattgttgacctcctggagtagttaggcctttatttttagttgcaaagtaagctttccctttgggactatacttaaacacatttctaaactgctcttctgggacagttaattatggagaacatgcttgacttctcagtgttggggctagcattctatatgccttccacctagtccagtgttgttgttgttttgttt

SEQ ID NO: 5329 - DNA, 6000 bp, Homo sapiens
agggttaaataagaattttgtgggacatagtaatcactcagtaaatgttctggtctgagagtgaccaaaaggatggaactagagatatttgggcaagatatttgctatggcctgaacgtctgtgttcccctaaaattcatatgtggaaatcctaacacccaaggcaatcgtggggcctttgggaggtgattaggccatgagggtggggggcccccattaatgggattagtgcctcataaaagagatcccagagtcacccctaggcccttcctctcactgtgaggttacagtgagaagatgaccttgtatgaaccaggaagcaggctgctggcatcttcatcttagactttctagcctacagaactgtgagagatttctgtagtttataagccatccagtctacattttgtataacagaccaaacaaatattaaaaataacttcgtgattagaagtgctacaaaatgctagactacgcatggaaccaagagtttctatttatttactttttgagacagtctcactctgttgccaggctggagtgcagtggctcaatctcggctcactgcaacctccgcctcccgggttcaagtgattctcctgcctcagcctcctgagtagctgggattacaggcacccactaccacgcccagttaatttttgtgtttttagtagagatggggtttcaccatgttggccaggctggtctcgaaattccgacttctggtgatccacccacctcggcctcccaaagtgctgagattacgggcatgagccaacactcctggccaaccaagaggtttcaaggaaaaaagccgtaaacttttggtggttaactgactgtggtcctaaacagaggcaggggctgtgtgcaatgacttctcaggatctctttcagcctacaggttcctggaatgcatttcagctaacactacaagagtgatgtcccttgctactgagaaccctgggaacagctcagctccatggtccagccatataaatctgataaaaataggagctgaaataccatcctggagttgctatttttaaaatcatctgagatgctggatggggtatatttcttcctcaaacacatcttgctgtttcctcctcttggtgggcaggatgctaacgtggcacatgatacaggagctgttccacgctgctgctcacacccactcctgccagagaggggccgcagggccagggcttcccagatctagatgcacctgctcctccctctgctcctgaggcccctctggttgccccagcacagaggtgtcctgccacttccaccaagcagaaacacaggagagtttgggaggcaaaggaaatgggaatggaggcagcactgatggcttggaaggggactaagacctgttgttcctctggttgccttggtcccactttggcacagttaacatccaaaagaaacagtccccatgggccaaagccctgcttatcccatcctactgcctcttgctgagccgctcatcatgtgttgtagttgcaccaaaggggggcctggggccaaaaaagcacatggagaggagagaggagagaagaggagaaggaaagatggaaagacaagaaaagagagagagagaggaaggaaggaaagaaggaaggaagaaaaaaaaagaaagaaaaagaaagaagaggagaaggaaagatggaaagacaagaaaagagagagaaaggaaggaaggaaagaaggaagaaaggaaagaaaagagaagaggagaaggaaagatggaaagacaagaaaagagagagagaaaggaacgaaggaaagaaggaaggaagaaaggaaagaaagaaaaagagaagagaaggaaagatggaaagacaagaagagagagagagaaagcaaggaaggaaagaaggaagaaaaagaaagaaaaagagaagaggagaaggaaagatggaaagacaagaaaagagagagaaaggaaggaaggaaagaaggaaggaagaaaggaaagaaaaagaaagaagaggagaaagaaagatggaaagacaagaaaaagagagagaaaggaaggaaggaaagaaggaaggaagaaaggaaagaaagaaaaagaaagaagaggagaaggaaagatggaaagacaagaagagagagaaaggaaggaaggaaagaaggaaggaagaaaagaaagaaagaaaaagagagaagagaagaggagaaaggcaccagaattgcttccctcctgccccaaagatgacatggcttctaggcagtgagctaagcttgtggccatgctgttaagaaactggagggaaaagatcatcatgagtaagcacattgtggcctaacctgaggggagcagaattacggttagcttctgggcacctagtaaccaggcttgggataagctgggggagaggcctgaatacagcttataggttagaaaaggcacgccacctgcatagtaacagcacacacttatatatagcaggttatgctttcagaccaaattcgcatccattgcctgatttaatgccaacaatagccctttgaataagcagttatttcctttcccctccccccaccccagtaagaaaactaaagctatttagtggcagagacaagagttggaactcaggtctccaggaacaaatgctggttcttaagttccattttctggtagagtgacatttacgtgattcacggcaagaactgcaaactgtgcttagatctagttcatcaaatggccaagtttagaggctgggctgacgcttggatcagttctgtcagattcacttagttatgaagggcagctgcttactccctttgggccagtcttcccatctgtagaacaaggaggctcttccctcttcctcgacttgcccgaggcagggacttagtcattgtgttctttatacccagcttaattccaggcctggagatggcatgcaataaatagttgttgaatggctcacgcctgtaatcccaacactttgggaggccgaggcgggcggatcataaggtcaagagatcgagaccatcctggccagcatggtgaaacctcgtctctactaaaaatacaaaaattagctgggcatggtggcacgcgcctgtagtcccagctactcgggaggctgaggcaggagaatcacttgaacccgggaggcagaggttgcagtgagccaagatcacgccagtgcactccagcctggcgacagagcgagactctgtctcaaaataataaataaataaataaataaataaataaataaatagttgttgaatgcatgtctgactgattaagccaaaggcaccatattcaaacaaaatcagacactggtgcaatgccaaacagcttctgcccgtgcaaggaatgatttagcatggagcacagtcacctgcagaggaacaacttggaggcagactctccttactcagctcacttggagcagagcttcctgagttgggggttcttgacagataagccctccagcttcagcagaagcaggcttggagctgccacttctctgaacccccttgcacttactgtcagtcactcacaccttgcacttattcacatcctatcctgcctcgttcttgaatggagtccatggtgagccttctctgtgccgctggatggtaagcttcctggggacagggaatgggtctgatagtttccttggagcccctggcgctcccggcactgggctgttgatacgtggggctccggaaacactgtgctgacctgtgaaagggactggcctaaggggctgtggattgtcctgtagggtgacttctgaactgttcttcagcctgggcagttcccaggtttatttggggggatgcctgggtccaaagaaccagggtcaggggcccaggggtttcttcctggagacaggatgcctggcgccttcaataacggaaaggaaactgagaaactttctgaggccaagataaagagtatgcaagtgaggggtgcagagagagcagtttaggggcagcaggccccaaccgaagcagaggaagggcccacgtctgggcccaggggactgactggctgccttgcgtgcatggggcacgggaagcataggctcccggaacaggaccctgccccagtttccccagtgagggaaggacaccgttccccgtgggatagagcactgcaccctttcttgattctcattgttcccgggagcgagcgccttggctgcgctgggcatacccaccctggcgccattcacaggcagtgcctgccctggccctgtgctcaccccatcaggcctcctcttccgcctctctggcacccacggcgcccctgcttgcctctgtccgggtctcggaggcgcgaacaccatcccaagcctgcgaccgcgcggcatcacccccgcccttccccctcctccaccccgccctttctacccctcccgggagctcctgggagtcgggccgccgtgtgcgcaagcgtgtccagccccttccccgcccccaacccgggcccgggtccccgcctcccctgcaggcggactcgcccgctcccaggccggacccgcgcccgggacagggacccggccgagtcgagccgtcgcgccagcgctgcgccgccggtcggtgcgcctagcggatcggagctgcgcgcggaaccgtgctgccccgccccgctccacccgtgagggtgagtacgcggcggcggtgcgcgggggcccgcggggcggggcggggcggggagccgcggggtcctcggccgcctgaccccagccggcgccgcgcctcccggagggggtcgggccctgcacgtgggcgcagcgcgggtcggggtggggctgccacagccctgcggagctgctttccggggtccctttccctggaccagattttcgcgggaagccggatcctctccgttcccttggagtgagcaagcgggacagttctgcggaaagtttccgcccccaatcccccagccctgcgcccggactgaagcggcggcccccacctccagcatcctcgagcgatggtttctcccacaactaccccggtcaggtccagcacttgggagctgactgtgctggaggtgacaggctttgcggggtccgcctgtgtgcaggagtcgcaaggtcgctgagcaggacccaaaggtggagttgtcagtgggaggccggctgtgcccagggtcctagggccacgttatgggggtcgtcaggcctaggccactgtgcctcagggctgcatgggtggtgagcagtgggagggatgcgatggggggagtgggctcagctgtctgctgtgggtgtttcctcggggacctggctggcagggacctcccggccagcccagaactgccaacatgtctgccagcactgcccctccattcccagtcctggggggaggctctgtctgggcagcttgaggcctgacctactgtggctgcttcctctgctccccagcctgggtcctgagggcctggcttaagggaactgctgccagaaggctgggagtgtaggcagtgttcgggtgcccagctgtgccctgtctgacctcatggccacccacaagctggcaccccccacaggcctcttggggaagcctgtactttccaccgccggaggcgggtaccgcgtggaagccaggctcaggcggactcattctttttgaactttgggaacaggcctggtacaggctgagttctcacaagagacacacacccgtgtcactgtctcctgagctgtgccggacccgtcctacagactccacctcctctaggtcctggccctggcatctgccagggggattttaaatgagttgatatatgctaagtgctttgaaaggcgcctgcacggagggagagctgtataaatattcactattggtaatatttctcccatgctgttactctccaaagctgcccgataattctagagtgggttccggggacgtgcccgctgtttggggcctagaaatgaactcgggaggttgttttgcttgctgagagctggtctgggaatgccccttgaccgttccctgccctgctcctgg

SEQ ID NO: 5330 - DNA, 6000 bp, Homo sapiens; identical to SEQ ID NO: 3612

SEQ ID NO: 5331 - DNA, 6000 bp, Homo sapiens
cactcacaggcacacacacacccacctcctcctcctcctcatggtggcattctgtctgccagtccttcaagcctggcccaccatgtgtgagtgattatgcatcccctctcctatgtctgctgtcagggttcagctgggatttggacagcagggcagccaggtcccacagtgagcttactggacttattgtctatcgttggataaggtgacaggtgttcatgggggcagtttacagagaatcaatccctatttgtactagctcattgcacacagtgcagattcctaagctgcccgatgatgaaaggtttatgaaatgcaatcctagctgccctctccaaaggagttaaagacctcatctgtttcccctttcttatttttttttttaatttttatgccccttccttgtttcttatctgcaaacagaaaaatcatgtctgtagtaaagttcttctaacttcaaggagtgtgggtggtgaaaaattatcattctgtctagaatttaaggtccctttccagacattaattttgtcttacgccattcatactcctctgcaaaaaaagtggactcatgaactgggaagtaaatggtgcataacacaaatctggctaatgcaaaaggcaaagtgagtcctccaggcacctgatgagaagtacttgagccttctaactcagaggaaggagctctgattgttgaggagggaactgcgatttcaaagtgtccccttccaatcatagctccccccagtcatagcttcccccagtcagaggttctttagtcattggctcacttctactggcagaaatctctaaccacagtcacgagccaccccaaagcagaaggaccaagctgtgcattctttggggtagttgcaacaatggagattctcagtcctaagcctgatagatcctgagactagaatggaaaatggaaaggaagtttgctgacagcattggtgagaccggttccattaggcaagagatgtgcttggttgaatgaaacccttctgtgtgtagcctaggatcagctttttcgatttgtaattacagcaatgagcagctgactgatccaacacgcctgtattggtgatgctgtgttaaacccaataacaaaggagggaaaaagatgccttctctagaaggaggttaatggtgtgcttttgtgaaacctgaaggccattgggaaattttacttcatgtggcaaattcaagcattgaaagagctatagctctcaagatagtttagcatttagcagtgttcagaacccaaattagacttctggttcggcaatccctgaggatatattttgcctcaatgaatgcacagagcataatgctgaaactgctctgtccaggagtcttagttcccaagcacagatagcttctaccaatgacacatggtagaccacatccatctcaacttggttaaaaacagtaaaattaatgaaaattagttgatggttaggatgtctggctatggttgggatgggggtgtaattgctatcctgtttcagatgtggagttgaaatgactcaacctaatctcacagcccctaggggacagaactgggatttggaccccaagcaaagcagccctaagtccgtgctctcattcaacaagtcatgtcagtgacgcccagtgtctgtgcctgccaggtaccagacatggttacctcacctgtgtgcagaaagtaactgccaagcatcatattatgctaaggttcatttaaaaaatattttcaagctcttcttgctatacagaatggtaggatggggaatctcagacaagtcactagaacctcaaatatacttggtgtatttctaactctagtttttaattcatggtattctcatccagcaacgtccttccctctgcctcagatctaggatcagagtcactctcacggtattcatgactcccaccgtctccaaagaactttacaaaactatcatagaaaatgaccacctattgtgtgctgtctgatgaaattaattatatgtaccaaccattggaaactcagttaagattgaaagcagtatatgagtcttcctgtagttttgtatcaacatatgtattgttttgtaatgtttattaataatctcatatgctattgaaagcaacaaaaagattctacgctaggatgcttgatatctatttgagtccctcacagtatttagcacaggatattattattgaagttgatctaagatgaaaatgctcaggtttaaatcctgattccattccttaactgttgtgtggctgtggacaagctttttctgagcctcaatgccctcatttataaaatggggatgataatatcaccacttcataggttgtgattatttaatgagaaaaatgcatgcaaaacactgagtatcatgtctagcacattgcaaataaatatcaataaatatcaactccgatgattaatttcttattatctgtacacacctgggagcttaataaacattggtaactgtatagatttattacagttcagggtaaggacatttacaaatgttattgtccacctctcctgattgggactaaagacttaccagtggcccatgatctttatcatcgttctggagagaaatgaaatggtggtgaaaggaagccaccttccttctgcactgcactgttatcacctgccgtcacagttgttccaaagcatttaattacacatgtcactatgctgagcaccgcacaaaaagactcatctacagataaaattcttgtccattgggagctcacgatatcaaggacattttgatagatatgtgaattagaacttaatggcaagaagaaaaaaaataccagttaacataaaacatctttaaaatgagaaggagtataataaattattccagttctacaattttatagacaagaagccaaggttcacagaggtgaaaggacctgcctgaggtcccttagttgtgcagaactatgagaaggatcttgaggtccccagatcttgaggtcccagggccccttcctctcaaggtcacaagatcccacattccaggcagtgttgtccctattcatacacaacacaaggtaaacttgtgggaggccaaggctggaaggactgcttgaggcaaggagtttgaaaccagcctgagcaacatagtgagacttcatctctactatgttgtagaaaattaaaaaaaaaaaaaaaatagctgggcatagtgggtaaggcaggagggttccttgagcccaggagttcaaagttgcggtgagctgtgattgcaccactgcactccaacctgggtgacggggcaagagtctgtcaaaaacaaaaacaaaaaagaaagaaaaaagaaaaaagccaaggtaaatcgtacgtcttagacatgtgcaaaatggcagtgatgttttcatttcacctctgtacactaaaatacaaacagacaatgagtacttttcttctatgcagtttgaaaatacatgaacatttttatggggttacaaggaagtataataattagcggtggagttctagaagaatatttttaaaatgtgtgtcaaggcatagtaggggtatgaatgtgtcagaattagctaaggaaggttctgtgagaaactacattttctttttcttttcttttttttttttttttttcttgagacaggggctggctctgtcacccagactggattgtagtggcgccatcttggcttactgtgatctccgcctcccaggctcaagcaattctcctgcctcagccacccaagtggctggaaccacgggtgcgcaccaccaaacccagatatttttaaggaattttttagtagagatagggtttcaccatgttgcccaggctggtctcgaattcctgagctcaggctactggccttccttggcctcccaaagttgtgggattacaggcgtgagccacagtgcccagccaggagctacattttctagattttttgttcacatcctctaacttgcttctcataaggggaagccaaagattagaataaacttccaggccctagaattagacctcttaagaaatcatttatgtccattagattatttctgttcggtttttattctttcctatcaccaaggaggttaatgtcttcaactgtctgaggaactacacaaagtttacactcagaaagcccctccgcatgtctaccctgaatctttctcgctgcagtttaaatcacagatgcttctatgattgctttagtggatgtggattgaccaagtcatggggaataaactcctgctttgttttcttttgaagaaggttctccatcttcagactatagagcttcttctcaaataccaggtactttgtacctttccattgtatcatatacacatggatgaatttaggaaattgacttctaaaaagtgaatgaaaaagaggagtaacatagatgttctgaaacagaagtgacaggaggagaaaatagaaagttatttactattttcaaagcaactaagtagaaaggttgatgaaagagagaaaaaaaagctgtcactgaatgatatttccattggaggggaaaataggtaccaacaaatgaaaattgcctcatctttacaagtttcactgagcatgaaaatgtccctttaaaatttcccataagccatggctggctatgggatttttccagtgcaaagggaatctgagttcaggaggccagggaatgccagggggaaagggattttctgatactcagaagactcagagactgtcagtttaaaaaatgaaagtaatatagaaggggcaaagtggcatttatcattctatctctccaggctcctgtctctttaatcagctagcctgatttgcccagtaaatgattcctgagagtgtgtgtgcgtgtgtgtgtgtgtgtgtgcccgcgcgcgtgtgttgtagctctgtcaatccttggattagaaccaatgattgcagcttgtaggagggctgtccagggccagattgtacaatgtgtctcagtgccagagtatgagtggagataattacggagaagtcatactctctcacaccctcggctttcttgttgtgtccttcagcaaaacagtggatttaaatctccttgcacaagcttgagagcaacacaatctatcaggaaagaaagaaagaaaaaaaccgaacctgacaaaaaagaagaaaaagaagaagaaaaaaaatcatgaaaaccatccagccaaaaatgcacaattctatctcttgggcaatcttcacggggctggctgctctgtgtctcttccaaggtaagagcttgctattgatttgccttcggtagacccaggaattgtacagtgtgctttataagatttgcagactccccgagtcggctgtgctgcgctgtttgcaggtggaggagagagcgtttagacagcatggctgggacttcattctcccgactaggctgtgagaatattgatttgattctggctgctaccggaatgggggaatatgtatgtgcataagtaaaatgtgtttggtgctcctgttaggactgtgcttgtgtgcaaggctccctggcttcatgcacattcttgcacacatacacaacggagcacacatgtaagcagggggaaatgacagattcggagggcaacagggttgctaatgtgttgcttatgcgactgggaagaaattacaagaggaaactttaaatatcggccagcgaacttgcaaagcttttaaaaggagcaaaggggaaaatgcaggctagaaagaatcaggtgcttcctgtgaggttctggtcagcgatccagctgcaagggatgagtcaatttgcagcagtgggggacaactgtattagttttaaatgtgttcgggggtgtgtttgtggctggggtcggaggtgtggaagcgaggggagccggggctctgaaattctaaaaagcttttcgaagttgaagggagagaggcaataagagtcgaatgctaattttctgtttatttatcggctgagccgggagccctgggggctgcagttgagtgcaagctttgatgtccc

SEQ ID NO: 5332 - DNA, 6000 bp, Homo sapiens
tctgagtcacataaattgctctgtcaaatgcctggcccagagctctttggaagagctttccccattccaaagccctgaaaccgagggttgaccctggccgggactctgtgtaaagtgcaagatctcagcagcagaggagggaaaagagcggaggcccaggtctctcactggtgccgccaggaagtaaacactccatggtgtaatttgtgtgaagagaaaattatctctaattggagggctggaataaaaatatctcccatctgtaaacaaagtagttggagcatcctggaggcacagaactggagcaccagagtgctgcaggtaccctgtgggccaccccacccagatcgtctcagccccaacccacaagcagcgggcgctccgggacctcaccggaagccagtgaaggcggcatacctgtccctgaggctcatcagtgtcctcagccccgaggcacagtccagaaaacagcttctcaccttctccccaggccagggcaaatattcaacaagtcaggtgaagagggtaaaaaaatgctggtctgttttatgtcatcacagggatccctcctggaaggtgactggggactgctgtttactggctatctcagacatcttttctcagacaccttttctttggtgtctgcaggggcacctgcttctccacatcctcaaagaaagaattgaggcagacaccctgacacaggcagagtgggtgatattcttcatggggcctgaagtgagaaattcccaggaacatcagccctagggaagcgattctgtgtcaagggctttccttgtgttattgtccactgttggttgtcctgttgtgttttaaggtgcaccagtaaagagcccttggctgatagagataccaccaggatactttaactcctgccctagcataagggtgtgactctctttaactcctggcatgtatgatatttctactgaaagacacacacacacacacacacacacacacacacacgaacacctagccttcttttggtgaaatgcaaaaggtttattaaatagctgcttatgaaagcctctctctaggaagccacttgaccaaaatctgccattggtatataaactttttcagcaaaggagagaaatgtgcaaatagatcgaactgcggaagaacttttcttcttttgcagaccacaagcggcatatgttattggagaagatggaagttttgtctgctactgtttccttagagggaggtgggagaaggttttcctatttaaataaaattaaagaaatactttgaaggaaaaagcaggggataagagttgagataaaatgtgggataacatagttgaaaatattgtgaggaagatgggacttaaagagaggagagatggagaaacagaaacatacccaggtctttgaaaagccctgaagaagaatgctttaaagaaggactctgaggtcagagacttccattagtcaaaggatcccacttctctcatgcgatgcgggttgacttcagatgattgttcagggctagaatagcatagtaaaggaacagaagtcatggatcacattcctttttttcttttttttgagacatgaggcatcggtcaatacatgtaaggtgtacattggttctgtctagaaaggtgggacaactataagtgggtggggttgggatttcaggtcataggcagattcaaagattattctgatagaaaggaaggtctggtctggctctggggcagtggctcgcttctgtaatcccagcacattgggaagttgaggcgggcaaattacttgagcccagaagttcaagatcagcttgggcaacatggtgagatcccatctctaccaaaaaaaaaagtagaaaaattagccagctatggtggcgcacacctgtggtcccagctgctcaggaggctgaggtgggaggattgcttgagcctggaggttgaggctcaagcatgagccacgattgtgtgccactgcactccagcctgagtgacagggtaagaccctgtcaaacaaacaaacaaacaaaaacaaaaaacaaaacaaaaaaaaagcaagcaagaaaggaacgtctgtgttagaataacggttgtggagaccaagtttttatcatgcagatgaagcctccaggtaacaggcttcagagagagagagagagtctgttgtatcagtcttttttgtttgtttgtttttagacggagtctcattgtgttgcccaggtggagtgcagtggcacgatctcagctcactgcaacctccgccttctgggttccagcgattctcctgcctcagtctcccaagtagttggaactacaggcatgcatcatgatgcctggttaattttttgtatttttagtagagacagggtttcaccatgttggccaggctggtctcaaactcctgaactcaggtgattcgcccaccttggcctcctaaagggcctggattacaggcctgaaccaccgcacctggccctatcagtcttaagatctgttttaatgttgatgctggtcagttggcctgaattccaaaagggtggagggtataataaggcatatccaactccccgatcatggcttaaactagtttttcaggttaactttgcagtgcctttggctgagaggaggggtcatttcagattgttgaggggcttagcttttttttttttttgagacagagtctcactctgtcacccaggctgaagtgcagtggcgcaatcttggctcactgcaacttccacctcccgggttcaagtgattctcctgcctcagcctcccgagtagctgggattacaggcgcctgccaccatgcctggcaaatttttgtatttttagtagagacagggtttcaccatgttggtcaggctggtctcaaactcctgacctcatggtcttccctccttggtctgccaaagtgctgagattataggcgtgagccaccacgcctggccagggcttagcattttattgttggtttacattcagttccccgagctcttttaagaagtgcatgtctccctagtaagccacaccttagaaataagcatattcagatgagtaatgctgtgatggaggcagagcctcctcagccctgctcacggaatgcttccaggactttgctgctggccttattgagctctgattcccttctgcacagggtcagagctctccagggaacaatgaaaccctaaggaagagcagaccacttcacagccacgtgtgtcctaccccactctgctgcatccctagttagacttccattccaggaactgtctcagctgttggtaatgacatgccgactccatctgcagaggaaaatcaatgtcttacaatgaagcacctgccatccactctcctaggaacctctgccccttatagaatattcatgcagcccttttttgtaatctcggtctgagtttcaaaagattccctagcaggaagaccatttaacagatagaccattttacaacgcaaacactgaaaattccgcaggagaaaagaggcactggtttttgaaaaccgtgctctgtccacagtcagacaccatctcacatttccaagtaacccaaacagttccttcagttaggtaaatatgcctggccatgtgaccaggagctaaagggaataatagggaaaacagagggcagaaaaaaatgtcagtgggcataagacgaattttcttctttttaatttctcgattttgtgcttgataaagggaaagaggccaccattataaaacaacttttacacacttttacttgtgatttagtgcatggtgacctggaacataaagaagatttatgaaaggaaagacagaatcatagtaggtaattgagttattttttaatttttattctgtctttataagatttttgagaaggtaatcaattaacataaagatctgagcagttataaagatttacaaagaagattatacagtgatggaaactgaagcatattcttggcaacaatctcaatctatttcacgtttcccggcttttacatatataaatttggtatacataatatgtaaatatacttctattttgcatgaaaactaaaaatactaaaaaagtagcatgagtatatgaaaaagttaaacattaaaaatattagttggaaactggcttattttactaacaattatattcagaattctgttgctagactgctgtttctgggaacattggaggtgtactttctatacttgctaaaatacaagcttttcaagtattttccatagtattaagtgagactttaaatactcttgcttttttagatctaatttctgctttaatttatccttctcttcatttttcctgtttgtcctcatcttacctgttcttccctggttttactatctcccagtattcagaaatcagagcaaataattagtctgcttttctgcagaataaactattgggtatgccatcatgcttttgatctaccacataaacaaattattttagcaagacatcacttttatatgctgtataatgtatgtattgcttatgttttaagcagatttcagctcttttccttccatcaatttggaattgggggcccaaaagatgtgaaggcgataatgcttccaagataactgggctgcatccttatttgtaaaataagaaatactttatttcccaaattttaaaggagtgttccttctccgacctgttgtgatggatttattctatagctatggaaatataccctgcttcactcttgtacatacttctttactctcctcccgccaagttcattgaaagagaacccatgtgccggtccagagcatcgctgcatccgtaagcagctagacctcagcttcctctgtcaccatggtgccggctcggctgggcccggcggtcgccatggtaactggggcgggtcgcagggtcctggcaggctgggcgcatgcgcgcggggactacaagccgcgccgcgctgccgctggcccctcagcaaccctcgacatggcgctgaggcggccaccgcgactccggctctgcgctcggctgcctgacttcttcctgctgctgcttttcaggggtgagtttgcgcgtttccgctgttgggagactagggtctgggggcgacggaagcagagcgggccgaagctgctggagccggtccgggcgaggatagcggtcctggctccgagggctcccggggtcccgggccggaggggcggcgcgcgcccgcgtccccgcagccagggctgggactcgggcctggctagggcgggggccctgggacgcccggcagttggaccggggcggggagctaatttgggatggggggcccgtcccaggcagtgagtcggtcccggacagccgtcggaccccgggggcgggctcttctcgggcggggtcctgtgctgggcggtgggctcatcccccgggtgggctcctcccaggcggggtcctgtgctgggcggtgggctcatcccccgggtgggctcctcccaggcggggtcctgtgctgggcggtgggctcgtccccggggtggacccctcccgggcggtgggcacggccctctggagggagcgcggcagctgcggcgtgggcgctggaacttgctggaagaccctgcgcagcagtgctgtgctctccagaagggacggtgagcgggggacgtagctgaggaccggcgaggcagagctccgaggcctggcgggctgcttggtcacagccctctggggatctgcagttcatttgactcgacacaaaggaactgcttttcttttacagaaataaaatggatatcaatccagtaccttttttgtctctggcctggccgaggagaccacgcagactcttatccggaaatagcattcggggcatttgatcaagacacactaataaacttgatagttttgtgcattttctttccctctgtttggaattctcattagatccacattttcctggacagttgtacagaggactaaaatagctttcctttagtgagcttgtactgtctactaggcactttggagccatta

SEQ ID NO: 5333 - DNA, 6000 bp, Homo sapiens
aagttcaggaagatggaggatgaggattcccaggttcctccctgtccatgtcagggtgaggggtgcaggagcgcagaggccatgctctgccatggctggggacttccttgtgaatactgcagccctagggctgcaaggggacaccacgcacagagacacggcaggccccgtgttggccgggggtgggggtgagggcagaaccagccgagggacgctgagtcagaccgcttgcccactgctctggtgcagggacctggctgcaggtgctggagaccatcggtgtgctggcggtcattgccaatgggatggtcattgccttcacatctgagttcatcccccgagtggtctacaagtaccgctatagcccatgcctgaaagaaggcaactctactgtcgagtaaggcctcagggtgtctggagacccctgggagaaactggccctaccacagccaagccctgggggatccagaccctttctcctgggaatggctggacctgttggtacccctggggctttagtgaggctggggcctgggggtggcccctgccctgcgcccactgacggcaggccctgggctggaggtcagggataactggccaggaccgcagttgggggtgaagttcccagacctggctgcctcctgagtaggccctgccagaacggctccctcccgatgtgaggttccgcatgtcctcttctgatttatccagctctctgacctcgaggagccaccaaactgcagactgggtccccagggccagtctctggcagggaaagtggctggtgatgcccagagtccccacagtccccacaaggcccccggatgtgaagatgtgcttggcccgggagccccgtcccactggacgcagtctgtggcgtggcccccacctcactgtttgctccacaacgcaggctagaagcactctggggcctgaaggggccgccctggaagcccaccccaccccacactcctctcccctctccccagctgcctcaagggctacgtcaaccacagcctgtccgtcttccacaccaaggacttccaggaccctgatgggattgagggctcagaaaacgtgactctgtgcaggtttggaactccccatcccccaagaatgccctctgaactcctgacccctgacctcaggtacttccttaccccagatacagggactaccgcaatccccccgattacaacttctccgagcagttctggttcctcctggccatccgcctggccttcgtcatcctctttgaggtgagccagaaccgggagaggcctcggagtgggtctgggcagtgctctccccagtccttctccccggccctgaacccccaaatgccagctggcacctgaccgtgctgggcctctcctgtgctgccgctagcacgtggccttgtgcatcaagctcatcgccgcctggttcgtgcccgacatccctcagtcggtgaagaacaaggttctggaggtgaagtaccagaggctgcgtgagaagatgtggcatggaaggcagaggctgggtggggtgggggcaggctctcggcccccaatgcctgcccatcccaccccagcatccatcttcagtgccaggagcacagacgtgtagggccagagcccgtccagaggccaccaggagctgagacagtgccaccaccagcacctcccacaagcccaccgctgtgcgtgttgaggggtgctgtgagaaggctgtgcccatgtggggccgcaggaatcccctgtatgttcagggctgtgagctgccaccctattccgcctgctccgtctttgtgggggctctcaggcttggcacagccctgacttgaactctgggtgaccctgggcacccacagaactgggagtgagggctcctcaggcagccacaaggcaggaaaactggcgcaaatttcctgggcctccctctgacttctgggcgccagatcctgccgtgcccccatcctggctgttgggggtgtcctgagcccacctcgctggcctgttcccttcagccaacccgtttctgcagtaaaattaagcctgtctgtcttgctttcctggcctcgctgggtcccgggtggattatatctgccctcagggctagatgggaaacagacccggagtgtggaacgtctggaaccaggtgaggccgcctcaggccgcctgtcccttctccagttttccatgggcttccaagggaggggcgcctatggggtcctctccccgtccctgcacctggggtgttgagggaggcaagagaagacatcggggccacttgagggtggggtgggggtcaaggcaggcttcctggaggaaagggaagagataggggcggacgcgcaaaaccttgagggcggtggacgctccgaagagtccccaaggctctggggctccggggctctgcgcgctggttgggctggtttggccactggccccaggcccgtgcggcagcggctcccgggcagcagcgcagcctccagcgccagccttgggcgcagagcgggacgctggggtccgcccccgccctgactgcggggcggggccgcacctgctgccgctgccggggctacgccgccgccggggctgttgccgctgcgcacctggctcaggtgagctgccccgcccccgcccggcgcgagccccaggtcctggcagcaggtgagtggcggtcgccatcagacccgcgaaggtgagtggaggtcgcagtcctcccagagccgctgcaggcctggagtcggggcccggggcgctgcttgtccctgggcgcggtctctcaggaaatggctcggggccggggaggttcccgcgtcgcccggaagcccgagctcgcccgcgtcctggccctttccagggctgggggaagggaggaaagtgggcgaagggggcgggggccaccctttcctctgcccgacgtggtcagcggctttttggtgaccctcgcgcagaacagagcggggctaggagcgccgaggcgcgcagggatcccacctcggtcgcccaagcctggatcccagctcgaggcttcctgaggcgccgagggcggaccaagagtcaggctggggcccgagctcgcccggcgccgggtggagcttccgccatccgcgcgcctctgccccggccgagcgccccgagccgcacccccgtgcccgcctcccgcgcgcgtcctcgttctccgccctcctcacttggagggcgcccagggcgcaggtgggcgcggggtaggggagcgaaccagagcccctcggcctgcggggccgcagccttttacccacgttcctgcttcaggacaggcgctgggggcccagcgcgcacggggagcggaggggcggcgcgtccgagctgagcgggagtcgcccgcagggtgctgggtgctgagcgtcgaacccaccgggcaggggcggccgcggaccgaggacgctggctgggtctgagggcgggaggagctggcgctttctaagaacctcaaggtgcccagcagagtgcggtgggcagtgcgaggcgaccagggccaggcttggactgagattctgggcgcctcggaagagctgtgcgggcgagggtcggagactttgtgggtgttcatgctcaccctggacggtggacctgggggctcgggggtgcaggacgttagcagagagagggaaggagagggtgccaagccagccctgagagatggtgacgctgagaccgggtgcacagagcagccgccgagccggggcttcacagttggcggctgaccccagggcctgtgctggaggccctgctcctgcttcctgcgggggtgccctgggccctgctgtgcctgcttcctgacctgcagtgtggggagaaccttcttgaggggcttccaaggacccacttcaaggaggggctggtaccaggctctgtgggggaaggggtgctgtctttgggaccctgagcccaaggcccaccatcacccaaggctgagtaccgggacaaaggaaggtcctagcagggctgggactcagtcagacaagtacctgtagaaagcctgctgctgagagggtgctcagccagggccgggaggctggatggcagccctccacaatgaagccctgcccccatgtggctgagggcagggccagggtccaaaggagacccttgtctgattctgtgggcaataccagccaccggtcactgggtccccagtcccaggtcaacctggggagtgtcagtttggtgacaacaggagatgccatctgcccctcatctgctctgagccaggagcctcggccacctgtgtttgctccttatttggaaaagggggcgctgccctcccaccccagcctgaagggaaggtccacaagatgccatagtcccttgtaactgctcacccatcgggggagctatgtctgggagagggacggggagagggcggaagagttctgctggagccccattgttgaccgggagtttctgaaggccctgttccccggggtcagaggtcaaagacacatgggggagcaaaccggccccttggctcctgagtgtgagctctagtagcgtctggaaggcatgccgcgcggtccccggtcctccttgtatgtgtgcagggtggccctggcgggggtctcctggctggaggaccccccatgcattacccctggaacctgcccctttgagcaccccccaccccacaacacacacgcacacacacaaacgcacgcacacgcacatactgcacacacattgcacacacgcagacacactgcacacacacacacacacacacacacacacacacacacacacacgctgcacagaggaaagtgccgtgcctgggtgggttggggcgggctccagaggaaggagccgcttgactcagagctacaggaagagccggggcaggcggggtgagaaccaccaactgcccgtcctcccgcccgcctagggaaggggtgggtgcctgggtggggtttagggttaggagaggatgtgactgcaaggccaggaagctacagggaaagttctgatcaaaatacacaaagacacaagccaggtccccaccgcgcttggcgatgcatccatagcagccttggtgctgtggacactccctggggcccagcgaaggggagagtttgctcccaaaggcgcaccaatgaccaacatttgccccccggaggaaagaactggaaccaggtgactgccttccccgctgctctgagtgagcctgtgtcagggcctggctgagaggaggcccacggcgcccaagacccatatgcatgtgtgtgcatgtgtgtgtgagacagagcgaggggcagcaggaggctgtgtcgcatcagcggccaagggtgggtgtcaggtgcagtgtgtgtgctgtggggtgcctgtggtcctaggctctgtgacaagcgttgcaatgggtgttgtatatactcaacagttgtgtgaggggtctgcagcctaagctgtgtgcagtggtaatgggaggtgtgtgtggtaggaagtgtgctgtgtaggaggtgcaagtgtgcacacgggctgagactgaagctctgtgcaggtgcacatgggccagagggctgtgtgtatgtgatgtgtgcaggggaggaggggcagaggagagggtgcaggggaagttagggaggggagggggtacaaggaaaggtgtgcaggggagagggtgcagggaaaggtggggaggggagagggtgcaggggaaggtaggcagaggagagggtgcaggggagagggtgcaggggaaggtgtgcagggaaaggtggggaggggagagggtgcaggggaaggtaggcagaggagagggtgcaggggaaggtgtgcaggggagagggtgcagggaaaggtggggaggggagagggtgcaggggaaggtaggcagaggagagggtgcaggggaaggtgtgcagggaaaggtggggagggagagggtgcaggggaaggtaggcagaggagagagtgcaggggaaggtgtgcaggggagagggtgcagggaaaggtggggaggggagagggtgcaggggaa

SEQ ID NO: 5334 - DNA, 6000 bp, Homo sapiens
tgggtatgttacatacccaaaagaagtgaagacaggtgttcaaataaaagcttgtatgtaaatgttcacagcggcactattcacaatatacaaaaggggccgggcatggtggctcacgcctgtaatctcagcactttgggagaccgaggtgggcagattgcttgaggccagaagttcaagaccagcctggccaacatggtgaaaccccatctccactgaaaatacacaaagtactggccgggcacagtggctcatgcctgtaaccctagcactttgggaggccgaggcgggtggatcacctgagacctggagttggagaccagcctggccaacagggttaaaccccgtctctactaaaaatacaaaaattagccgggcgtggcaggtgcctgtaatcccagctacttgggaggctgaggcaggagaatagcttgaacccgggaggcggaggttgcagtgagctgagatcaggtcagtgcactccagcctgggtgacagagtgagagtccgtctctaaagtaaataaataaataaatattttttaaaaatacaaaaattagggggtgtggtggtgcatgcctgtagtcccactacttaggaggctgaggcaggggaatcacttaaacctggtaggcggaggttgcagtgagcggagatcatatactgcactccagcctgggcaacagaacgagattctgtctcaagcagacaaacaaacacaatatatacaaggtagaaataaaccaaacgtcctcagcaggtgaatggatgaaccaaatgcagtgtgatttttccattaaaatgaatgaaattctggggccaggcgcggtggctcctgcgtgtaatcccagcactttgggaggctgaggcgggcggatcacctgaggtcaggagttcaagaccagcctgaccaatatggcaaaaccctgcctccatgaaaagtacacaattagctgggcatggtggtgctgtaatcccagcaactccagaggctgaggcaggagaattgcttgaacccagaaggcggaagttgcagtgggccaagatcgcgccattgcactccagtctgggcaacaagagtgaaactccatctcaaaacaaataaataaaaataaataaataaataaaaatagtgaccagggtcttgctatgtttcccaggctggtctcgaactcctggcctcaaaccatcctcctgcctcaccgtctcaagtagccgagaccacaggcatgtaccaccatgcccagcttttaggattttattggtatgaaatacccagaacaggcagatccacagagacagaaagtaaattcattgttactcaggagctgaagggatgggggaaggggaggtaaatgctttatggatttgagattttccatctggggagtaaaaagttctggaactaaacagcggtgctggttgtataattccgtgaccgtactaagtatcacttcatactttaaaatggctaaaatggtaagtttcatgttatgcatgttttcccacaataaaaaaaaaaacaaaactcagcagtagagaacaatttaaaaacgggcaagagatgtgaagatacatttaacccacgacaacatgcaaatggaaacaagcacctggaaagaggttcggaatcacccgccactggggaaatgcaactaagaccacaaggaggtgttgccgcagagagaatggctgaaggttaaaaatagcgactgcagggatgttgacagtgtgcagagaaagtgaggccgggcgctgtggctcacgcctgtaatcccagtgctttggaaggccgaggcaggtggatcacttgaggtcaggagtttcagaccagcctgggcaacatggtgaaaccctgtctctactaaaaatataaaaattagccagtcatagtggcaggcacctgtaatcccagctacttggagggccgaggcacaagaactgcttgaaaccgggaggcggaggttgcagtgagctgagatggccccacggcactccagcctgggtgacagaacgagactccctctgaaaaagaaagaaaggaaggaaagaaaggaagaaaggaagaagaaaggaagaaaggaagaaaaagaaaaaaagaaagaaagaaagaaagaaagaaaaagaaagaaagaaagaaagaaagaaagaaagaaagaaagaaagaaagaaagaaagaaaagcaagcaagccagcaagccagccagccagccagccccacattgctggcggggctgtgaaatgatgcaaacgctggggaaaatattgtggctgatttaacagacggatacagtgcatgactcgcaaccacagcagaacatcaaagggcttgacggccatttctccgtccactccatgatgtataaatggctcacagacacttgagaacatgctccacatcgctggccattagggagatgccaatcaaaaccgcagcgagacaccacgtcgcacccaccggcatcgttagtacgcgacaaacaaaaagccacaaagtagcaagtgttggcgaggacaagaaccgtgtccctgctgcgctgctgggaagacagtttggcgtttcctcagaatatttaacacataattactctgtcacccagcaattccctcataactatacaccaagaacgcttgaaaacgggatcgggaagcgccgtttgcacacccacgttcacagcagcgttactcgccgtcgccccaaaggggaggcagcccaggtgtccatcaagatgcccacagatgagcggacgcggtcgatgcggtccctgcacacagcgggacacagttccccacaaaagggaaggagattcccacacaggccaggccgcggcggcgaaggcggaggatgctgcgctgagaatccagccggtctccaaaggacaaatcccgtgaggctccccctgcgcgcagtccctggaagcgctgaatccacagacagaaagtggacggggcgccggggctgaggaggggagggggcgtttgatggggacagagcttcattctgggaggacaggagagtctgagaacggattttgggaggacgggagcgtctgtgaacggattttgggaggacgggagcgtctgtgaacggattttgggaggacgggagcgtctgtgaacagattttgagaggacgggagagtctgagaacggattttgggaggacggaagagtctgagaatggatttttggaggacggaagagtctgagaacggattttgggaggacgggagcgtctgtgaacgattttgggaggacgggagcgtctgtgaacgattttgggaggacgggagcgtctgtgaacgattttgggaggacgggagcgtctgtgaacggattttgggaggacgggagcgtctgtgaacggattttgggaggacgggagcgtctgtgaacggattttgggaggacgggaaagtctgagaacggatggtggggatggatgcaccgaatgatcctgaatcgcgcacttcaaagcagataaaatggcaacaccggccccccaacagtcacgccacgctgaagctggagacgaactcgccccagcaaggtgctccaggggcctccggaactccggccgcagccccttccccggggccccccagtccccccccaaaccctcccccaagccctccggcccctccgcccccgcaggctccgaggcttcgcggtgcggttccctctgcgggtcccaggcccgcgctccgttcgccccccaggccgggacgtccccctcccccagccggccgaggggcgccagcgcggcggagggggcgggaggccgggccggggcgacagctgggggggcggccctgaccttcccgggatcgctgggcgcggccgggccgtcccctttccgggcgccgccataaaggggccttgcgggggcccggggccgtggccgcagcgctcagctcctgcgccccgaccccgccatggccccccggcccctcctgctgctgctgctgctcctcgggggctccgccgcgcgccccgcgccccccaggtgagccgcccgccaggcccgcccgccccccgggccccacccgcccccagtgcgccctgaccccgacccccgaccgcccgcagggcccggcgacactcagacgggacgttcaccagcgagctcagccgcctgcgggagggcgcgcggctccagcggctgctacagggcctggtggggaagcgcaggtgaggccgggtggggtggggggtcctggcgtggtgccccagcagcaacgcgcgaccccccagctccaggactaactctgttttggggcggggggcagcgagcaggacgcagagaacagcatggcctggaccaggctcagcgcgggtctgctctgcccgtcagggtccaacatgcccatcctgcaggcctggtgagcacccgccccaccgcagaccccactccagaccccaccccagacccctccttctgtcctggcctccccgggtcagcgctggtggccactggaggcccaattccagcagcggggccggggtctccagccccagccctcagaccctcacgtgctgtctctgcaggatgcccctggacgggacctggtctccctggctgccccctgggcctatggtttcagaaccagctggcgctgctgcagaaggaaccttgcggcccagatgaggaaggaaccccctcaccacctgcccggcccaggagcgcagctgcatttggggtggggggcaggatgggggagagggggaggggtggtacttggcaccaataaaggaggaatcagacccagacgctgggagttgtctgtgtccactcagtgtaatcgaggcaacccctgtgtagcggggctgagggatggatggaggcccatccacccaggagggactgaccacacccagctgccctttacacctgcaggcacggcggcccctcatccttatctctggcatcagggccacctcctgtacctcgactaagtactgcagggccccgccccaccccttgtcatccattaggaaacattctggggctcgggggatcccggacaccctctcagctcctgcccgggggcccatgtggtcagtgtttctgtaaggggtagtggggagggtgtgaaggggccaggggggctcaggcgggcaggaagaggggagggtggaggtgtcacctggggtgccaggaatccactctggcgtgaggactccggaccctctgtctcgtgtggcctcggaccagtggcttgacccctcagagcctgtggagcacggagcgtgcagggcttgaaggcgaccatgagggcaccgtgcagggttaggacactgagcccagccccagccatgagaggccagaagcttcggcgcacaggcctggaggaggagaactccacctacccctcacgacagccacttcctcgccccgaccctacccagtggcctctccctagagctgggggcttctggggggccaatgaaaagagcagggcaagtgtcgagtctcacctcaccccctctgtcgggcaccagggccccccaggaactcccagctgcccctcacagccccgccttagcctcagtcactaaggccctgtccagccccgccctgagaagccgacttgtctctggggcaggcaggggtgtccccaggacacagtgaggagagccttttccttcagaacctgctgtcaggcagggagggaggtgctccctggggaacacccgggttctgagcctcaaggggtggccttaggaactttgcctgagggagatcttaggggaggagccaagccagggcagcctgggctagggaggcaggttccagacaccccgacaccaagggccgagcccccgcccccagcccccagcttctctcccacaccctagccctgcccctgccctgcccctacccccacggcacccatgagccgctctccagtcccttctgccctgtgcctcggtgcctgtgacctgagccccctggttgacccctgcactcagtccaacttgggccaaacgactgcccct

SEQ ID NO: 5335 - DNA, 6000 bp, Homo sapiens
tgcctgtcttctgcaggggcctctgcacccacaggcttggtccacagctgcctcttggttgtccctccacctccctggcctttgagactccctcagtggctttgtcagagttctctgagcccagctgtggaggagagtctgaaacagctgctctgggaggcggcagcaggagtgtcccagcgccgtgggctgggctggtgccaagcctaagccagcaactgcccgcagcgggacttcggtccttgcggctccttgtcctgcacagcaacctcctggcctctgtgccagctgacttggcccgccttccactcctcacccggctcgacctgagggacaaccagctccgggacctgccccctgagctgctagacgccccctttgtgcgcctgcaggggaaccccctgggtgaggcctcgccagacgccccgagttcaccaggtaggcttggtgctagaaggggcagacctgggataggacatgagtctcctcactgtcctgagcacatgtctgtcccctgcacagtggcagccctcattccagaaatgcccagactgttcctgacctcagatttggacaggtatggggtgggttgagggggctggaggggagtctgtctgcctgtcactctggcccctccgacaccttctccagagttcctgggtccaggctccaacacgtaggcccttctgggtctaacctgttgctcgctccttcctcactcagctttcctgtgacccctcaaggctgctcagtgaccctggcctgtggcgtccgcctgcagttcccagcgggagccaccgccacccccatcaccatccgctatcggctgctgctgccggagccaggcctcgtccccctgggtcctcatgacgccctgctcagccatgtgctggagctgcagccccatggggtggccttccagcaggcatggacagggcgtggcgggggcagtgtgtgggccagggcatggcaggggcagtgtgcgggcccgggcatggctccagtgctcacaccatccttgtctggcaggatgtggggctgtggctgctcttcaccccaccgcaggcccggcgctgccgtgaagtggtggtcaggacccggaatgacaacagctggggtgacctggagacctacctggaggaagaggcaccccaggtgagggccacccaggcctgccggtggcgagtggagagctgctgccctgagccgtgcacctctgcccagagcctcaccctggcaccttccaccctgccccgtccctcctggatcctgcttccctatgtccctggcaccttccaccccaccccgtccctcctggatcctgcttccctgtgtccctggcaacttccaccccaccccgtccctcctggatcctgctccctgtgtccctggcaccttccaccccgccccgtctctcctggatcctgctccctgtgtccctgactggctgtgccctgacccaggctcctgtgacctcctctctcccccatcccagcggctctgggctcactgccaggtgccccacttctcctggttccttgtggtttcccgccctgtgtccaatgcctgcctggtgccaccggaggggacactgctgtgctcctcgggtcatcctggggtcaaagtcatcttcccccctggggccactgaggagcctcgtcgagtctccatgcaggtatggccaggacagcactgagggtggcaggccgcgcctcagcccacaggcaggtgctcagggggcctgtctgccccaggtggtgcgcatggctggccgagagctgcaggccctcctgggagaaccagaggctgcagtgagccccctgctgtgcctgtcacagagcggtccccccagcttcctccaaccggtcaccgtgcagctgcctctgccctctggcatcacaggtgagaggcagccatggggcatacctggacctgtggccatagggtggagggggtctccggccaggaggcctcagctcgctgcccctcccatccccaggcctcagtctggaccgctcccgcctgcacctgttgtactgggcccctcctgcagccacctgggatgacatcacagctcaggtggtcctggagctcacccacctgtacgcacgcttccaggtcacacacttctcctggtcagtgccccccagctttctcagcccccctcccccagtctgtacagccctcctcacccccagctctcccaggtactggctctggtacaccaccaagaactgtgtgggaggcctggctcggaaggcctgggagcggctgcggctgcaccgtgtgaacctcatcgctctgcagcggcgccgggaccctgagcaggtcctgctgcagtgcctgccccgaaacaaggtgggggcacgggccggagggcagcagggtggtgaccagagggctggggtggggtgcagagctttgggtcctgagctgcacgggcttccccgcaggtggacgccacccttcggcggctgctggagcggtaccggggccccgagccctctgacacggtggagatgttcgagggcgaagagttctttgcggccttcgagcgcggcatcgacgtggatgctggtagggatgctggtggatgctccctgccctggagggggagccttaccgtcctccccgagccctccttgctcagcccacccctgtcccctagaccgccctgactgtgtggagggcagaatctgctttgtcttctactcgcacctgaagaatgtgaaggaggtatacgtgaccaccactctggaccgggaggctcaggctgtgcggggccaggtgggcgaggggagtgggtgaggggagaggccccccaggccgcttgggcagaggaccgaactccgaaccccattcgatgccccttcaggtgtccttctaccgtggcgcggtgcctgtgcgggtgcccgaggaggctgaggctgcccggcagaggaagggcgcagacgccctgtggatggccactctgcccatcaagctgccggtgggactgagggacagcagaggggcggggcaggaccgaggcccaggggtgaccagggtgacatggtggagttgggggtggagcccagggcttaatgcactttttccttccaacagagacttcgagggtccgaggggccacggcggggggctggcctctccttggcacccttgaatctgggagatgccgagaccggctttctgacgcagagcaacctgctgagtgtggctgggcgtctgggtctggactggccagccgtggccctgcacctgggggtgtcctaccgggaggtgcagcgcatccggcacgagttccggtgaggctcccactgcccgctggctgccagccccagggctgagccctggctgcctggagggcccacctgattctgacagaagtttcttccaggggaggtgggggaagggcaaacaccaggctggaaaggaaaggtctggccgcacctggccccaggagccgggaactcccccacactccgaggcagagtgtggtggggggtcctgggcaggtggacaggacccctctgtcgcccatcctctgcctgcagggatgatctggatgagcagatccgtcacatgctcttctcctgggctgagcgccaggctgggcagccaggggctgtggggctcctggtgcaggccctggagcagagtgaccggcaggacgtggctgaagaggtgcgcgcagtcttggagctcggccgccgcaagtaccaggacagcatccgacgcatgggcttggcccccaaggaccccgctctgcctggctcctcggctccacagcccccagagcctgcccaggcctaggccccacagacttttaggctggcccagatattccccagtggatgggcagagcccccaccttcaagtctctccagtgtgtggggacgggtccctgtgagcaacaaaactgcactgtttctttcacctcagagcttgatttatttgttggatggagaagccgttggagggcggagggtggtggggtagaggcctggcccctgcggggagggaggcctgtgtgcacaggtgccccacatcctggtcctgtcctctcccactgtgcctggggcctcctgtgggtcctcatcttcctgggagggaggagctgtgctacaaagtaacccacatgggctactttttttttttttttaaatggagtttctgtcacccaggctggagtgcagtggcatgatctcagctcactgcaacctctgcctcccaggttcaagcgattctgcgtcaccctctcaagtagctgggactagggcacttgccaccacgctggctaatttttgtatttttagtagacggggtttcaccatgttggccaggctggtctcgaactcctgaccttaagtgatccgcctgcctcggcctccaaaagtgctgggattgcaggtgtgagccactgcgcccagccccaagtggggtgctttggatacaaagtcgctgttcggcgggtggggttgtgcctccacttctccattgcgctggcccagcagttccacggatcacctgtgtctgccctggaggccacgcctcccccagggcaccctcatccaccggcgctctgccacctgcccgcgccccgcgggtccttgtgcctgcaggggcctgaggcccggaaaccaagaaaggaccttggggacgcgcggcccggcctctgcgcgcagaactgccaccctgcccgggggaacccacggccagggggcgggtgggcgcgtggctgtggcctggctgggcgcagtagcctcgacggccaggagggggagccgaagcccggaggaggccgagggcggagcgcgcgcggcgccgagcggacgcgcctccccgcctaggtgctggccgagcgcggggcgggcaggcgagcgcggcggcggcggcgagcgtggtgagtgtctgcccggcggctcccttctgctgcgcccatccgaacgcggccgggctgcgggggcgagaggtgctgcggcggccgagggaggtgacagctgcccgaacaacgtggcctggcgggcgggagggggggtcctggaccagcggatgctccgatccgcggctgctctggcgtgagacgccgtgctcggccccgacggttccgggcgcgctccccgcacatacgtgtccccgagggtgggtgtccggggcccgagcccaaggaagaaaggccgacccgtgtgggacgcacacgtgggagttcaccggacatctgtggacacgtgcgtggccggagtcgcggtggccaggcggaggacggagcggtcggctgagccccagcagtagggcaggggcctgagccggcctccgagcgcagagagcggcccccaacccgcttctcctttgtcctctggccgaggcatcgcgcagttggagtccccttccgggaccctccagccagcaggatagaaagcaccgccccaagaggacggggacagcgggagattgaatggggagccgccggccagactcggagcctcacccccattgcctttcttgggggtaggaggagcctggcggcttcttgggtggaggattttacccctgcagattcggaagcagcggtatcttcctgtggggtggtctctgctctcctgctgtctccctggcttgcctgtggcctcagttcacctgactatgaaggggggacagtgacggctcacagcccggggcccggctggggctgcagggtttctatagcaacatcagtgcagggggagggccctggccagctgtctcataaaccaggggtgggaactgccgagtgagggcagagaaaggcggggttggcgttcagagggaacccctgccggttcttccccaggcagagcccctcactgtcatcattctccacccagaagctcctctccgctgcactgggtgacgtgcgggcccaggcctgcctctccgccctgggatctctgggcctgcttctcttcttgggacgaatggccgctccccacctcggtcggcctgacttccaggattgcccct

SEQ ID NO: 5336 - DNA, 6000 bp, Homo sapiens
ttccagctgaggatagaggcccgggatggaggccagccagctctcagtgccacgctgcttttgacagtgacagtgctggatgccaatgaccatgctccagcctttcctgtgcctgcctactcggtggaggtgccggaggatgtgcctgcagggaccctgctgctgcagctacaggctcatgaccctgatgctggagctaatggccatgtgacctactacctgggcgccggtacagcaggagccttcctgctggagcccagctctggagaactgcgcacagctgcagccttggacagagaacagtgtcccagctacaccttttctgtgagtgcagtggatggtgcagctgctgggcccctaagcaccacagtgtctgtcaccatcacggtgcgcgatgtcaatgaccatgcacccaccttccccaccagtcctctgcgcctacgtctgccccgcccaggccccagcttcagtaccccaaccctggctctggccacactgagagctgaagatcgtgatgctggtgccaatgcttccattctgtaccggctggcaggcacaccacctcctggcactactgtggactcttacactggtgaaatccgcgtggcccgctctcctgtagctctaggcccccgagatcgtgtcctcttcattgtggccactgatcttggccgtccagctcgctctgccactggtgtgatcattgttggactgcagggggaagctgagcgtggaccccgctttccccgggctagcagtgaggctacgattcgtgagaatgcgcccccaggtgggtccccagccatttcttccagattcagactcccaaatgggctggggttgtgctttgaaaatgtcccccaaactctcccagtctcgcgctcacagtccaacaataccgttctttctgcagggactcctattgtctcccccagggccgtccatgcaggaggcacaaatggacccatcacctacagcattctcagtgggaatgagaaagggacattctccatccagcctagtacaggtaagaaataggagcaggggctctgtgcaggacaggctactggggaagcaggttctttgcatcagaggagcctttgatgggtgaagggctgtccttgagtaaggggtcttagagaaggaggctccagggcaagcaaagggggctatcactgatgcattctatctcgcccaggtgccatcacagttcgctcagcagaggggctagacttcgaggtgagtccacggctgcgactggtgctgcaggcagagagtggaggagcctttgccttcactgtgctgaccctgaccctgcaagatgccaacgacaatgctccccgtttcctgcggccccattatgtggccttccttcctgagtcccggcccttggaggggcccctgctgcaggtgcggggtgtgatggaaagattgggcgggggagcagggctagtcagacttgtctgtggccagaccagtcccagcagcctcctaccctcaccaggtggaggcggatgacctggatcaaggctctggaggacagatttcctacagtctggctgcatcccagccggcacgtggattgttccacgtagacccaaccacaggcactatcactaccacagccatcctggaccgtgagatctgggctgaaacacggtgaggcctggccctgtggacccaagaccccatcttgggcctgtccagtttcaagccctgccttgaactcatctggtcccttggccacatcctgaattccccagccctaagctctgtcctgagtcctcctggccctgcccagagttcccccttattgccatgtcccacccgatgattgtgctttgtgtccaggttggtgctgatggccacagacagagggagcccagccctggtgggctcagctaccttgacggtgatggtcatcgacaccaatgacaatcgccccaccatcccccaaccctgggagctccgagtgtcagaaggtgaggctgggtaaagtgggtggcataaagggtggcagagagacatttttctccaccctgcagctcaaggtggggctgtgtccattgccaaacacactagtctcatgtattccagatgcgttattgggctcagagattgcacaggtaacagggaatgatgtggactcaggacccgtgctgtggtatgtgctaagcccatctgggccccaggatcccttcagtgttggccgctatggaggccgtgtctccctcacggggcccctggactttgagcagtgtgaccgctaccagctgcagctgctggcacatgatgggcctcatgagggccgtgccaacctcacagtgcttgtggaggatgtcaatgacaatgcacctgccttctcacagagcctctaccaggtattgacacccatggatccacctacacctgggcctgggttgttcctgttggagggaagtatcagagctagcagctgctgaggtgggctggacgttggagctgatctgggaatgggaaggtcccaagtcctgtgaactacatcctggttttgcatcctgtacccagaaaggggagaaggtgggcatttcccattcgaatacttaggagtaggggctccaagttggaatagacgccaagcagggcacaaggaaccaagctccagaacaggctgcatggacagcagggcaaatgggaagcctggcaataagcacttttcctcacacttcaggtaatgctgcttgagcacacacccccaggcagtgccattctctccgtctctgccactgatcgggactcaggtgccaacggtcacatttcctaccacctggcttcccctgccgatggcttcagtgttgaccccaacaatggtgcgtctttcccaggatctgccccttgcctttgactgtgttgggctgtaatctgacctcattccttgaatttgttactcaaactctttaactcctggatctctggcctagggaggacatttcctcccctctgtcttcattataagccccttgttgactgcatgtctagaagctgttccctaagctgtgaatccttgaggccatccccttgtctcccagcagataggccattccctgagtctgacttccaaaaccatttcctagatcctgaagggtcactcttctgttcactcacagcctttgctgaatatatttctttcccttccgttctcatctcagggaccctgttcacaatagtgggaacagtggccttgggccatgacgggtcaggagcagtggatgtggtgctggaagcacgagaccacggggctccaggccgggcagcacgagccacagtgcacgtgcagctgcaggaccagaacgaccacgccccgagcttcacattgtcacactaccgtgtggctgtgactgaagacctgccccctggctccactctgctcaccctggaggctacagatgctgatggaagccgcagccatgccgctgtggactacagcatcatcagtggcaactggggccgagtcttccagctggaacccaggctggctgaggctggggagagtgctggaccaggcccccgggcactgggctgcctggtgttgcttgaacctctagactttgaaagcctgacacagtacaatctaacagtggctgcagctgaccgtgggcagccaccccaaagctcagtcgtgccagtcactgtcactgtactagatgtcaatgacaacccacctgtctttacccgagcatcctaccgtgtgacagtacctgaggacacacctgttggagctgagctgctgcatgtagaggcctctgacgctgaccctggccctcatggcctcgtgcgtttcactgtcagctcaggcgacccatcagggctctttgagctggatgagagctcaggcaccttgcgactggcccatgccctggactgtgagacccaggctcgacatcagcttgtagtacaggctgctgaccctgctggtgcacactttgctttggcaccagtgacaattgaggtccaggatgtgaatgatcatggcccagccttcccactgaacttactcagcaccagcgtggccgagaatcagcctccaggcactctcgtgaccactctgcatgcaatcgacggggatgctggggcttttgggaggctccgttacagcctgttggaggctgggccaggacctgagggccgtgaggcatttgcactgaacagctcaacaggggagttgcgtgcgcgagtgccctttgactatgagcacacagaaagcttccggctgctggtgggtgctgctgatgctgggaatctctcagcctctgtcactgtgtcggtgctagtgactggagaggatgagtatgaccctgtatttctggcaccagctttccacttccaagtgcccgaaggtgcccggcgtggccacagcttgggtcacgtgcaggccacagatgaggatgggggtgccgatggcctggttctgtattcccttgccacctcttccccctattttggtattaaccagactacaggagccctgtacctgcgggtggacagtcgggcaccaggcagcggaacagccacctctgggggtgggggccggacccggcgggaagcaccacgggagctgaggctggaggtgatagcacgggggcctctgcctggttcccggagtgccacagtgcctgtgaccgtggatatcacccacaccgcactgggcctggcacctgacctcaacctgctattagtaggggccgtggcagcctccttgggagttgtggtggtgcttgcactggcagccctggtcctaggacttgttcgggcccgtagccgcaaggctgaggcagcccctggcccaatgtcacaggcagcacccctagccagtgactcactgcagaaactgggccgggagccacctagtccaccaccctctgagcacctctatcaccagactcttcccagctatggtgggccaggagctggaggaccctacccccgtggtggctccttggacccttcacattcaagtggccgaggatcagcagaggctgcagaggatgatgagatccgcatgatcaatgagttcccccgtgtggccagtgtggcctcctctctggctgcccgtggccctgactcaggcatccagcaggatgcagatggtctgagtgacacatcctgcgaaccacctgcccctgacacctggtataagggccgaaaggcagggctgctgctgccaggtgcaggagccactctctacagagaggaggggcccccagccactgccacagccttcctggggggctgtggcctgagccctgcacccactggggactatggcttcccagcagatggcaagccatgtgtggcaggtgcgctgacagccattgtggccggcgaggaggagctccgtggcagctataactgggactacctgctgagctggtgccctcagttccaaccactggccagtgtcttcacagagatcgctcggctcaaggatgaagctcggccatgtcccccagctccccgtatcgacccaccacccctcatcactgccgtggcccacccaggagccaagtctgtgccccccaagccagcaaacacagctgcagcccgggccatcttcccaccagcttctcaccgctcccccatcagccatgaaggctccctgtcctcagctgccatgtcccccagcttctcaccctctctgtctcctctggctgctcgctcacccgttgtctcaccatttggggtggcccagggtccctcagcctcagcactcagcgcagagtctggcctggagccacctgatgacacggagctgcacatctagctgtggcccaggctgggccccgacctgggatgcgcacagtgtccccaacgcaggccccactctgagcctgccctgggcagcctcggactatgactggctacggggaggccaccaccaggccccagctctccaccctgaactccccagccccctcagagtactaggaccacagaagccctgttgctcactgacctgtgacc

SEQ ID NO: 5337 - DNA, 6000 bp, Homo sapiens
gtatatttcaaaattgctgaaggtaaatgtcaagtattctcaccacaaagaagtatttgtagtgatggatatgttaattagcttgatttaatctttccacattgtatacatataacatcactttgtaccccataaatatatccaatttgtacttgtcaatttacaataaacctttaaattacaaaaataaaaaatatttttaattaaaagagaggttgacaagaaagtattctggcaaatttaaaacataacagaaattttaaaattcaaaagaaaagctggaaggtggaaatctttcagaaaaacaaaaagaagtggaaaacagggtagaaaggataaaattatttcaggacaaaagctgtgcagtaggcttagagaaaaactagtccacagtgaaggaggatgatgggctcctagagagttgtctccaatttaaaaaataaactgattgatagactacttgatgtgtttcaatgttttgaaaggacagtttggaataaattgattatagacacttgaatgctaggtacttaagaaagttgcatggagaaagaggcaatagttaacttcaatcaaaataaaggaaatataatcatattatgctaactggatcaattacatacctttataatagtataatgaatagtactctacctatatagggtgatatagataaactgaaggatggaagatggagaaatacatgtgtgtattaccagtcttcagagtataaacacatatcttatttcctatagaaaaagtaaaataatggcccaaactgaaaaattaagaattagtagtataagcatgctatttagaaatacggagataaataccagaagaggtagctgggtgaatagagattatatctagggagtagaaactgagagtgtggagggctgggacagggtctgctgtttttcattataaacctagtgatactatttgatttttaatgtaatgataaaaataaaacaatatgattaatgtggtatttcatttatttgaaaatcttaggagggactgtattcattaagtttttttgttttgtttgtttgtttgttttgagacggagtttcgctattgttgcccaggctggagtgcaatggtgcaatctcagctcactgcaacctccgcctcctgggttcaaggattcttatgcctcagcctcctgagtagctgggattacaggcgcctgccaccacgcctggctaactttttctatttttagtagagatggggtttcaccatgttggtcaggctgttcttgaactcctgacctcaagtgatctgactgcctcagcctcccaaagtgctgggattataggcatgagccaccatgcgcccaggctggagtgcagtggcatgatctcgactcactacaacctccgcctcctgagttcaagcgattctggtgcctcagcttccggagtagctgggattacaggtgcctgccaccacgccctgctaatttttgtatttttagtagagatggggtttcaccatgttggccaggctgttcttgaactcctgacctcaagtgatctacctgccttggcctcccaaagtgctgggattacaggcgtgagccactgcacctgacctgttttcattaaatattctaaggtactgggaaatcaacaatattgatttagcacctctaaaaggaactaaaaattctccccactttggtactcacctgcactgtggtgttttatttcagggaacccagtaacatcagcagtggcaccagcagctctagaaacatattctgtccccataaattgttgttatcatggtgaacaccagcaagtgatgcacttaggtggctttacaggcagcagtaggctttacagtgggctgaaaaatcccactaaacagggctgagtaggagggagcatcctagtgggtgcacacaataaagaagagggctcataagacgtttccagagtatgctcagaaataactggaaggatgtgtgtgtccccagccataaccactggagccacaatacaaggaaatcaccaatgttgtgcataactccatttgttctcctggactggtgttgcctaggcaagtgctgggtagatcagaatggatggggtggaagaattaaggggcatccagagagctatttgatcactggaggggaaagggcatggggggatgcagacaggtggcaaaacctgggtccaagatatatttgtcccagatatataaattgtcacttttctccctccccttctgacttgcacacttacaaagaaggttcctcttccttttctaaccatcccccaccagggaatttttcaggccttacaaagaagggagaggacccaggccagttgggagggtacacgtggacctacatcactctttttgaggaagtgagtagggaaacctagttataaggaagcaaggaaaatagagggagagtgagtactaaggccagcgccgtctataaacagaacaattcccgtgtgacctgaaggtctaggaagacccgaggtgagaaatcttcactcccctgcctactatggtgcgccggatcccgccatttgcacatctttgggcatctcagcatcccctctcatggtcagaaagaaatcaaatgaggattcaagtaggtgcctgatacttttcttttagactaaccagaggagcctctcccattccccttttccctggtccccacaaacatcatattgttttaatctgtctccaggtataacaataataagacaaagtccttaccctcagagagctcacaatattttggtggaggtttgggtataaaggcaaatgtgaaaacataattttactataatggggtaaagttaagaaagagatctatgcaaacatagaaaggagtgcacttaagtcagtgaaggttttctggcttagaagaaccctgacctaaaggaaaagtaagagttacctagataagagcagggcagaacaagagaaactgatccctccacttctattgagtcacctgaaattatattcattttttggcagacatatacctcccccaaacattcggctctagttgtgccagttcttccttgtcagccctcttaccttggcctgaggcttcattgtctccagtcaggcgactatctcatagtcacactccactcacggcagccacattctgtattccagaacagcacttcctgacagcactataacattttctagcagccacatttaagaggtcaaaaaacaagtgaaatattttactaatatattttatttaacccaacatatctaaaatatttaaaccatatttttaaattactgaaatattttacattttaaaaatattgtctttgaaattaagtgtatattttatacagcacatttcaattcagtctagccacatttcaaatgctcaattgccacatgtagctagatagtggttatactatggagctctaaaattccgcccagactgagtgtgcttggtgtttctccattaaacagatgaggcccatcagtctgaggcacaactatgtattttctctaagtctctgtacccccaaggccttgaaaacaattcggaaggaagagaaggcctatgaggtttcagctacagcaggcactccctttagatgccaagcctagaaaaccctaaactgatgcctaacttgcagctgaatcacctttcagcaatcagattcagtgcctcaccaacacatttgatccagggagtctccagtttgtcctttgtccagtagaagacccactacaaagccttgataattcatcaaagtgacagcaccttcactgggcagtctggtgagaggacatctagccctgccaccctggttcctgttgggaacagtatcagatacgttgtgttagattcacatgaatctaagaatcacatgggcgaaaaatattgagagcattctgttaaaacatttccacaaattgggaaaagaccatctttaaaaatctgttggggccgggcgcggtggctcacgcctataatcccagcaatttgggaggccgaggcgggcggatcacaaggtcaggagatcgagaccatcctggctaacacagtgagaccctgtctgtactaaaaatacaaaaaaaaaaaaagaaaaagaaaaagaaaaaaaaaattagccgggcggcgtggtggcgggcgcctgtagtcccacctactagggaggctgaggcaggagaatggcgtcaacccgggaggcggaggttgcagtgagccgagatcgcgccactgcactccagcccgggggacagaacgagactccgtctcaaaaaaaacaaaaaaatctgtttacagaggtaaaaacacgggtattacatggagcataatttgaaatccattccctcatattcagccaagaactacaggcccagagaagggaagtgatttgccaaaggtcattcaacaaatccctaggggctgtgatgatccgtgtccttgccattacctcccttgtctccactaacaaaaatatttcaatgggagaatgtgccgatctaaggcactcctaaagtacttgctgagaatgacagccctggggagacaggtcggcagccctgaacaggcactgccttacccgggcgtagtgccccaattcgccacctcttggagtcctaggcggaggatactactggggcagttgtttcgccaattccacatctcccggagcctggcctggcccagcccagccccgtcgctgtgacccacttcctagctgcaggctggaccaaggggaggcacatggggagctccacagggaggccacgcccacgagggcagctcacagaattagaaagccgacggggtgctgtggtcaggaggcgcgtgggcggcaggttagtacttaaggtgcagagaccacccccaaccctttgactggcggtgggcatcccggaaaggcatggctcggccaattccagccccgtttccacgctcagcacccgccctgcctgtgcgcgaacggctccggcccgcacgggtcgccagaggcgactgtgtgacactcggagtttgctggggtctccgtgggcgggaggactttccagcgcaatggcgactccctaagccccgcagcttctgcgcccgggaaagatatccaagagatgcaaagctctactgggcccaggctgccaccccagaggcccccttccgtcccggggccggggctaggccaaggcgggcaccaggactgcccagcctcccggcccttcgcactggtaaccggttccggggcggatgctttttgcatctgacccggcgcgcccggtgacgccttcgcgtccagacggaagtgcgggcggaggatccccagccgggtcccaagcctgtgcctgagcctgagcctgagcctgagcccgagccgggagccggtcgcgggggctccgggctgtgggaccgctgggcccccagcgatggcgaccctgtggggaggccttcttcggcttggctccttgctcagcctgtcgtgcctggcgctttccgtgctgctgctggcgcagctgtcagacgccgccaaggtgagtcccgcccagcctcgctcctgacggaagctcctcccctaccaccggccttgcggaaactgggtctgccaacctgctccttggcccattcctgacagccatacgcctggcctcacagctccggcagacccccgccgccaccagccccgcccctcccgactgcccggcggcactctcgccctcagccccgacagcctggcaggcagcgccccacggtcgtccccagccccgacagtgcccacagtccggacagcagccccccaccgccttaacatttcccttcccagccccggctgcacgcatcttacacttgacaaccttttcacctccgagagcctttaactttccaccctaagctcttgacagcccacctgcgccctccgccagcctcacaggccccgcatgccccaagccagaatgataggaagcccccatctgacagagccttccctgtcaagggccgac

SEQ ID NO: 5338 - DNA, 6000 bp, Homo sapiens
tctttcaaaaatacatatacacttcctctgcactcttaaattagaatgttcttaaataattttaatctttgataaggatgttcatttaatgagaacatgaattaatgtgttctgttgtcatacacatgatgctctcagactttgagatgtgtggcactgatattctctaccctaaatgatctcagactcctgtgctttttagtttgttacatctatatttgataattattgtttcctttttcattatcagattgtcagatgtctccagaattgttgctgtggctatctctaacaacaattcaatctactgttagtttgcttcttcaaatctactattttcagaagcacaatataagaatgtttatgaaaatcatttgcaaagcagaagaaggctttaaattaagacttaaatgtctctctgagtgatattcacgaattttaaatagaggattttgttactttcctttcccttcactcagtgtccatatgagaccagttgatagggaagaattgtagtaacatcttccatgaacacgatcatgggggagtccctggatataagctggttgtttggtgcagactacaattactgacctccaagactgatcacatttcctatgttatgcacacttgtagaactgtttctttacttcagaaaacaaaaatgtttggcatcttgaaaacatagtaatgtttgaaaatataaataataaatttacttgtgattatttgactggtgttggcatcccccaatagaatgtaaaccccaggaacacagggaccatggctgattttgctcaccattatattcccagcatctaatctagtaggtgcccaatacatttgtggtgaatgactgaaagaacacatggcaagtccagagcccagaattctggttctactggtgctatcttgtgtgacttggatagaacactaaacttcctctgactctctgttactgcatttggaagagggtcttcaacaagatcatgaagtgttcatgcatttctatttttttgaaacacaaggaaaggaatacaagatatcatgacagaagatggcccagtgggtagctggatgggaggaagtggcaaggattggttggctgagtatccctaggaaatggcaggaataactcctgcttctgagaaatgtgatttctctaagttgatctagcctttggaaaaattgtgaagggaaagaagtttctctgtaaaacttcctttccccttctgcatcctcttctgaaacccccacacccaccaccatcatcatcatcaccatgccaccacctccaataaatccatgtcatcatgtccctcattcggccttgcctgtaaatgtgggattaaattcattcatgtataagcgtttttagaacttcctattgctgtactctcctgccaccaggttttgcattttccaacttagcctgttatagggaatgttcaattagtatcatttaatttgtaaagactgaacttcaggcagtggggtgaggaggactttttaaagtggtcacagggagactttcataaggttcctaatctcacccagaagtgctactggtctgccagccccacctcagtgcctggctcctaagagcacaatgaaaatccaagtgcacgaattcagtttctacacatcattttgtaatcaaagtcttcatttgggtaccctacctcccagcatgaggactaggataaggcaagtgagaaattcaccttgggaacagaatttaagagggctccaagaagatcaaaagcaagataacactttaatgcaacagtttaaaatcaaaattgaggcaaaaacccattacgaacaagacatcaaatttttaataaggcaggatcactattattgacttttttcttttagctcagcctccagtatggctcagcttggcacttcctttggctctcacttccttcaattctgatgaaacacactgagaatgcacataatggaacatgcaaaggaggcacatttgcgctgattgcatcactctgtgtggggagctctctgggacaactcccacggcccaggccagggctgcagccattcaagaacagaaagggaccccaggagaatctcacttgatactgcccctcaggatgagccctggagcttgggttcagttcccaaaggcccagaaagaggctctgattctggcacagcattgctgttctctgttagaaccattactgttctgcacatagaaatggcaaagccctatacagtgtgttcacccattccaccccgagtactgaagatgagatctcagccatgaaacagtgaaatacttaacttcctgctgccctaaaccttcctgtcatgataaaagccatagacaaacattattgattgttttctatcactcaaagagcaaatgcaagaagggggaataagggagggatttctccttattgagctgagggaacatgataaactgttacagggaaggctctatgtcctgaaagacttatagttattcctgagaataccccacctattatctctcaaggggagctgtggtggggtggggtggggaacatttcatcagtgctgtcagtcagaaatggctgcctcggggtaactcagctctcctctgctatgtagccagggaaagaatgccaaagaaggaatgctccttaatttaagtgaattggaggatatttttgtaatgaaaattaatcctttctgaaaataaatgatggcagggggcccactcctgaaccaagtacctgtactgtataacagctgtggccagaccaaaaactgtaagcctcctggtgttgcaaaggcagggttgatctcaggcatcccataggtgatattcctcagctcctggtgcctcagcagcattgcctcccacccacagtcccaatatccatcctgtgtcatctccactggcctttggtaagaaactagagaccaaatttagtaatgatctctcacaattattttttcattttattagattattgattaataagaattttaaggtatctcttaataggcatttgtaataggcagtaggtagatattctgtggctgcagatactgtgacacatacctgtgggggtaacttcagcccctggggatagtcacaagccagttaaacagaaaaactcaaagacctgactaacttgctgacttccgcagtgtccttgcgtgggagatggagagaaattggaaacactctcagaggacaaggtttgcttagtatatgaagcctttgcccttgatatttcctctgtttggaatattttcccccatatctgcctcaaatttctcttctatagtaggcagaataatgctcccctcccccaataggtccacatactaatccctagaactgtgaatatgttaggtttcatggcaagaagaattaaggttgcagatggaattaaagggctaatcagctgatctttgagttgggattatccaggtgggcccaatataatcacaacgatccttataagtggaagaaggaagtagaagagagataatcagagagacagcgatgttggaaggattcaaactgacattaatggccttgaagaggaaggaatggggacgaaagccaaggaatgtgggcagcctctagaagctgaaaaagacaaggaaatagaatctctcctacagtctctagaaagaatgaagccccactaacacctctctgtcagccctggaagactcattttggacttctcacctcaagaattgtaagaaaataaatttgtgtggttttaagccatcagattggtggtaatttattacaacagtagtaggaaacaaatacacttctttagcagttgatctcagctccaatgtcatcttcctaataagactttccttgacagcccttgcctgctaaagtatctccccaaccaccaggcgttttctataacgcactttttgtttgcttctgattattgaaaattattgtatttccatgtcattgctcttccctctcataagaatgtaagttatagaaaggactttgttgctcttattcacctatgtatctccattgcttaggacatgggaacatagtagacattcaataaatatttgttgtgtgaatgagtcgtaagctaatgaggaccataaaactcatgccactgctaaatcacaattagagggcagctgttagaagagtcccaaacccagtaagtcctgtattgcaaggaactgcccaatagaaaacaggaataaaaacaattagcaagaataatatgaaatcagttgcttaattccaggcagtggaggcagaaatcttgaatagtaaatactctccgtgaacaagtgcagacaagagtcccgtgattgccaataagtaatcagtttggaaagaccagagaggggtcaaatataggtaaactgagttaatcacataaactgctcaatcatcacaattattaaaagatcacacacaaaaatacattaacaggagaaaaatagtaaaacaggacaaaacagtaaaattactttcttttactactgatgggtcaattttctactggaaattctgaaaagtatcaggttcagctaaagactgcagtgttgatcatctctccagttttcctagtgtgaaatgaaataagcagacctggtacttaaaaagacactttaagaaaggtctggccccagagaggcaggatccgcctagcccagtgagtgaggccgtcctgacacctcgtcaatgcccttgtgtcaacattctagaaaacggactcctggctcattgctccgcctagagccgcgccacctccaaagggtagcaccggccacccgctccgcaaagtccactctcagccgcgcaaaactagaaggtagttgtcccgaaggggcctgagcgctcactcagtcagccaatggccacggagctagggcgggacctgagggtatcctgccaatgggagtatggcagggctggagggagtgcctgggtctcagggctgctgtggagttcgcacctccagctcgggccgatgtggaagctttggagagctgaagagggcgcggcggcgctcggcggcgcgctcttcctgctgctcttcgcgctaggggtccgccagctgctgaagcagaggcggccgatgggcttccccccggggccgccggggctgccatttatcggcaacatctattccctggcagcctcatccgagcttccccatgtctacatgagaaagcagagccaggtgtacggagaggtacagccccgacgggccccgggcagggagggccgccaggctggcccgggctggccagggccttcctggttggacttatggccgcccctgggccgactagtcgggacctctccgtgtgccggctgccctttgagggacacccgcttcccgggtctggaagggagaagtcctcgacgccgtgcccccttgcagggggagccccgcccctgccggtgacccactccgggccgaggctccgaggcgatccagtcctgattttcccgctaccgctcgagctcttgctcctgcgcctgcgccgtttggctcgccagccgcgccgccacttcaggtccagggtggacgcatgccctcaggtgcgggcgtcttgcgagtcggcctcgcagctctgtggaagctgcacgcggcttgtcggaaaatcaaggcgttctgagttctagatggttaatagcaggttcttcggtgtctgcagtcgacgaacgactggtgtaggcgtttgctgtgagaatggagaatgcaggggaacgcccctgactgagaagcgggccctgggaaacgattgtgaacgcgtgaatgaattgatgactaaaatccgctgcgggggtcctacagcgcagatggtaatgccgttctgactggctgggaacggcaccttagcagatacttaaaaggcgccttctgtgtgccactgtcactgccaacttggtgactcatttaaaactcataaccagccggtgaggtcggtacttcgctcctcctcattctgcggaggggaaag

SEQ ID NO: 5339 - DNA, 6000 bp, Homo sapiens
atagtgagtaaaggagagggcagggaaaggataagagctgacgtcatttctaggagcaggacagagcccaaaagaacaaacgggcctaggaccacagtggtccgtgcaagtggaggctgtttccttcactgctgtgtccccagagcctagcccgtgcttgacaaagtaggcccccagtaaatacttttctgaattgcatgacattgaatctttgtgttcccagtgcttgacgtataatcggcgcttaataaatgtgtgttggactcaggcacaaatcagcagagactaaaaccagagtggcaggctcctagcccagttctccatctttgaaactaacaccaatttccatcacagacatccactgcccacccccgagatcaggggttcttaacctgaggtccatgcatctccccaaaaattatgtgcagaatatagagtgtgtttgaaacatatcttgctggattaaaaaaaagtcagatttctacccagaaaaatatctaaataaatcctgctctgaaagatgtacatctaccagttgcccagtaaatacccatcagttggatgcatctggtccccagggctgccaggtgaccagtagtcttaaaaaaattgtaagcctccccctctctgagctacacatctagggccctatgagcctacagtttttcctaccacctccataatgtgcaagacagttaacctatctttcatatgcaaaagtaatgatcacacattatccgagggacctgcctctggagtggctgttctgctgctgggtgggtctcacagagcctcgcatactctgtcaatctcttacatcctagtgtatgcatttagatgtgacaggtgggagtcgaggcctgaaacctgagaatcctgactaggcttcttgatatcaactctgaactttgatctttttgaaaaaaatatttttctcactagaaatacatgtgtgcatgtgtctgtgtatgtatacacacacatatatatttatctattagaggaaattgaggatatgtaaatgaaatcacctctaatctcaccccaccccaaagaactggtgttactacctggctttagtcttcccatttactgtgtacaacatttattaagcacttactgtgtgccaagagttcactgctccatgctctatgatctctatctcatgttaacctctaatctcacatcaggtatttgctatctttttatagacatatttgtactttcttaatttttaaggtcagtgagattatactgttttgtaaccttgcctttcttagtccataccatcaaaattttttcccatgttatcaaatattcatcagcagagtcatttataatggctgcataatgttttattgcaggcaaatttcatgcttctcagactggggtgcatgtatccctgagggcaaagccataggataaatgtcacacatcttcctgaagcaaaatttgtgattcagagctttaggagagggaaataaaacacattattttcatatcaaaacgagtacaaatatatcgtagtgtagaatgcagaacacccatatatcttaatacaggccaggcgcggtggctcacgcctgtaattccagcactttgggaggccaaggcaggcagatcacctgaggtcaggagttcaagaccagcctggccaacatggtgaaaccccatctctactaaaaatacaaaaattagccaggcgcagtggcttgtgcctgtagtcccagcaacacagggggttgatgcaggagaattgcttgaacccaggaggtggaagttgcagttagccgagatcacgccactgcactccagcctgggtgacagagcaagactctgtctcaaaaaaaaaaaaaaaatgcagccaagtccaagatcatgttattccccatagtcccatgttccctctcctctgaggtttgcagaaacatctaagaagcgctgaattctagttcaagcccttctttttacagataaggaaactgagacccagggagaagaagggattgcccaaggtccaagtatgtgctctgcagaaccaaggcacagaagccaggtaacccctgggtctgtcccttcccaccgttccatatttggcatcacctgtcaactgtgtgtgggcagagaccttgccccttgagaaatcaaccccctgcttatcaatagtagcaactcttgccttcccacgtgatccttcttttagcagtagcttttcctttttcaccttgctcccaggatctgaactgactgctcaggtggtcaggaactataacctccatggacaaaggtagataccctctcgtgaccctcttagactccattggcacttagatttattgcttaatgcactgtattgtaaacatgtctttactggtctgttttagccacgagactggagccttttgaagacaagaattaattatgtgttagcattataatctgccatttattgggtacttactaaatgctgaacactatgctaggtgtttcgtctgtagtatctaaaatatttataacagctgccgggcgcagtggctcacacctgtaatcccagcactttgggaggccaaggtgggtggatcacttgaggtcaggtgttcaagaccagcctggccaacatggtgaaaccctgtctctactaaaaatacaaaaattagccaggcatggtggcacacacctgcgataccagctactccggaggctgaggcaggaaaattgtttgaacccaggaggcggaggttgcagtgagccaagattgcaccactgcactccagcctgggtgacagaacaagactccatctcaaaaaaaaaaaaaatgtatatatatatatatatatatatatatatatttatatttataacagcttttcaaagtatgtattattatctccatttatcaggcaaaaaaaactgagtaaaagagtgtcctttgcccatcatcattcactcatttagtaaacatttattgtagccttacacaccaggacttacgctacatgctgtagacatgaggatgaacaaagctgataccactctgccttcatggaacttcttggtgggtagaggagacgatattcaaaaattattttacaacccatggcaagtgtaatgtagcctgaagcctatctgactgccctggattgaagccacctctacccttaccagctaagcaaccttgggcagctctgttaacctctctgcacctcatcttccttttctgtaaaatggggataatagtagtagcaactccataggggtgctgtgaagaattaaaaaattaacccaggcacacagagaagggcccctgcacattccaggcatattgctgctgctgctgatgatgatgatgatatgaaagagaggcatggggtgctcgtatgtgatagagcaggacctacttcaggggacatctgattgaggtctacaagatgaataggtgttaccttggcaaagtgtgtgggaggcaggggaggggaacagagtgttggagggatgttccaggcagagagaacagcatgtcaaagcatagggggcgggcttacctgaggaactgcaaggagtgaagctgaaatgggcccggctgggaagcaggagcctgtgctacaaacacagctccaggaccgggttctctgcaccacagtcttgatccaggccatgggaggtgctcagtaaatgtttgtcaagtgagcgagcagctcatggacaaacggctatgctgggcccacatggttctgttgtcacccaagtccattgtcccatatacagcatgatatgtagacagccccttcccagctgtcacactgtatacatccatgttttggtccctcttttcttgacagtaaactaaatcctgtgagtttgggtgcagacctccaatatctgggactcactgaggtggccgcagctagaatccccatgctatagccaggggctcagatctaagccaatggtattcagactctttagtagcagaactctgccttgaaataatcttagcagaaatccagtatatggtacagggacaggcagagcttctgcccttgaggggcagacatagggcctcagcccctgtgcacctgagaaaacactagggctctgtaaagcacagttagaaaaactagggttgaacccaaaccccatcttccaggtggggaaacttaagatccagagagggagtgactctccggagtcactagggacagacccagaactggccccagacatctggtatcaattctgctacaccaagattttccggcacttcgccctaactgcccccagcccctctcatcgtgcagggagtcttgagatggggtgggggcacatggatgtggtcttgtcaagagtctagcctccagccccagttagggcatggcccacatgagacaaaaatccacagggcaggcatgggtgggttgctcagggtcatggcctggttatgccatgtctttttttttttcctgctgctgcttcttttttaattgagtttgaggtggttgttttttgtttccttaagaaatggaaaagaatgaagctgcgtaaatacaactatattaactccctggaaaacctcctgccattttaactctgttactggagaaataaaagagaaataatttgtccacccacacttagctctttctgacgaaggtaggtgaatattgctttgctaatcgagggtgactgctggaagtggagccacgctgactgatcccagattgagaggcagccacagccaccccaaaaggggtggcagagccctgcctgtggacagggccggagtcatcggcccgcatggcccatcttccacaggtctcccccagccgatagtgatggaggcactggacgaggctgaagggctccaggactcacagagagagatgccgccaccccctcctccctcgccgccctcagatccagctcagaagccaccacctcgaggcgctgggagccactccctcactgtcaggagcagcctgtgcctgttcgctgcctcacagttcctggtaaggatggcacaggcctcacaagggtctggagagagggtgggtggagggccagcctcccacttcctccccaggatggccacctggaaggcaggaggataaggggcctccctggtgttcctcaggagctccaagccctcaaggctgggataaggggaaggctggaattctgagctaccgcaccagcatctgagacctcacaccctgcctccctaacctaagaatccagaacacagggcctccccgacccctgagctcccagccgtacagggttctcctgagaactcctgtctgtggaggcctttctaggagactactcttttgatgtacatatttgtgaggtcctctctggaaagggctttctcttggttcccttcagtcagcttttctccaaggagagtcctgaggcctccccgggcacgcagcaccggggccctgctctcagctgcccggtctggaccttagaggttcaggagcctccatgcagggccaggttgaggctgcaggtgagctctgctgggggaacacgggggaagggggccggctccatactcagcctgctcccctgtgccccagcttgcctgtggggtgctctggttcagcggttatggccacatctggtcacagaacgccacaaacctcgtctcctctttgctgacgctcctgaaacagctggaacccacggtaagtaagctttggggagtcctagggtagcagggatctgttgggggcctctagtcccaccctccccaacctccagattgggcttctctgagttcagaagatacttccaagcccctgaagttcttctgcctgctccccatcccagacctgggacgtgattttcagaatcttggttttgtcatcattgcaagagctgagaactctgcccccaccaccaccctgacctgtttatctgatgttccccaggcctggcttgactctgggacgtggggagtccccagtctgctgctggtctttctgtccgtgggcc

SEQ ID NO: 5340 - DNA, 6000 bp, Homo sapiens
gtgtctattgagataatcatgtggtttttgtcgttggttctgtttatgtgatggattatgtttattgatttgcatatgttgaaccagccttgcatcccagggatgaagccgacttgattgtggtgaatgagctttttgatgtgctgctggattcagtttgccagtattttattgaggattttcacatagatgttcatcagggatattggcctaaaattttgttgttgttgtgtctctgccaggtttcggtgtcaagatgatgctggcctcataaaatgagttagggaggattccctctttttctattgattggaatagtttcagaaggaatggtaccagctcctctttgtacctctggtagaattcagctattaatccatctggtcctggactttttttggttggtaggctattaattattgccttaatttcagaacctgttattggtctgttcagagattcgacttcttcctggtttagtcttgggagggtgtatgtgcccaggaatttatccatttcttctagattttctagtttatttgcgtagaagtgtttacagtattctctgatggtagtttgtatttctgtgggattggtagtgatatcccctttatcattttttattgcgtctatttgattcttctctctttccttctttattagtctggctaacagtctattctgttgatcttttcaaaaaaccagctcctggattcattgattttttgaagggtcttttgtatctctatctccttcacatctgctctgatcttagttatttcttgtcgtctgttagcttttgaatttgtttgctcttgcttctctagttcttttaattgtgatgttagggtgtcaattttagatctttcctgctttctcttgtgggcatttagtgctataaatttccctctacacactgctttaaatgtgtctcagagattctggtacgtcgtgtctttgttctcattggtttcaaagaacatctttatgtctgccttcatttcgttatttacccagtaattcaggagcaggttgttcagtttccatgtagttgtgcggttttgagtgggtttcttaatcctgagttctaatttgattgcactgtgttctgagagacagtttgttgtgatttctgttcttttacatttgctgaggagtgttttacttccaattatgtggtcaattttagaataattaccatgcggtgctaagaagaatgtatattctgttgatttgggatggagagttctgtagatgtctgttaggtccacttggtccagagctgagttcaagtcctggatatccttgttaatttcctgtcttttgatctgtctaatattgacagtggggtgttaaagtctcccactattattgtgtggaaatctaagtctctttgtaggtctctaagaacttgctttatgcgtctaggtgctcctgtgttgggtgcatatatatttaggatagttagctcttcttgttgcattgatctccttaccattatgtaatgcccttctttatctcttttgatctttgttggtttaaagtcttttatcagagactaggattgcaacccctgctttttttgctttccatttgcttggcagatcttaattcattgtgagtagccttccacgcccattacttttcctggctatgcggttccccaccatggaagtgtaccatagtatactcatttccttattgttggatgtgtgtatcactaaatttttgctattttaaagaatgtttgtatgcccttgactatttcttattcctgtgatgaaaggcctacttggagctcccattacggaaatgactttagagtcaacttacgcaccacccaggaaagcctgccgttccttcatcatgggggaagacttgttcctacatatcttctttgagggatttttcagttgtgcattctttagaatgattaaaaatcattcagaacaatagcagtattattagaacagtcgttagggacaaacccaccgttattaatgaatcctgaaatgtttggaaaggagttgagtgttgatgctttctgagtgtatcttgcatttaagtacttggtttgggtggaatggcaacacttttggttcatttaccatcttatctacacttaacttatgggcatcttcttttttttttttttttttccttaaaatggagggtgttttagtctagggagtagttttaccaaaagatagatgatctatgactactagaaaaggaacattgtcatgtgtgaattttcctgatgtttctgattgtaaaagtaatacttggttaattatagaatatttggggaaaggatggcaaaaagtaaaggatcaggaagaaaaataaaaagccataaatgatcttgcttagtgttagttaccatctacattgtagggcatttataaaatagctttaaaacaatcagctgtttctttttctgcctcccgccctcctccgccccccatacacatacacatactccatatgaacgttttgctcttggaaattcatattttggcagtggttcataaaggcctggtcttattttgatggaacagcccgaccttggcatctacacatagctacttcctttctctgctgtcttggcttcccctgcagcatgtcatgggatcagctatagcaacaaccagccagtcatgtggaactgaggctaagacttgacactccccaaccatcccagaaaactgagggcttccttaggtttgatgcctgaggtctcccctgctcattcaacccagggtgtttctctggcttcctcacctcacatcaccctctgtctgccttcccaccgttcaccccccaacactccctccccacacaatttcttcctcaagtaacctcattactcctgagtagcactaacagtggccacagctttttgagtgccatctttggccaggcattgtgctatgcagtacatgtaactatctccatgcttactagccaaagcgtgatcagaggttaacacatagcaaagaggtgacagagccagaactatctggccttgttcagaggcctccagattggactggaatgcctgtgctctgaaccctttcattgtgttcttcctgctttcttagcaggccacttctttctaaggtacttcaaagaacagctccccatcaggggccctgtgtgttgtggcagtgtgatttatgtcaaggaccattccaagggaagtgtcctgaaccggcagctcctgccagcctgacacctttccagtgcctaacccgagtcaggagattccttccttcctccttccgtggggatgcctgacattgtagctacattgggtttttgtttgtttgtttggagagaggaccttgctgtgtcacccaggctggagtgcagtggcacagtcacagctcactgtagcctttacctcctgggctcaagcgatcctcccacctcagcctcccaagtagctgggactacagttatgtgccaccacaccagtctaatttttttttaatgtttttatttttgtagagacagggtctcactataatacccaggctccgatcatgctatgcttaacttttaggaagtgtctggagctctctgttcggggacctcagaccaataccttcctctccctgctcacttgtagcagttccttgtatactggagccctgtctaacctgagtctataaatcacccttcctactcagaaacccctgaaaatggggaaccaagcaagccgctggcatgtgctggagcccaggtctcctgggaaggtccacatgggggatggtgtcccgtagcaggctgtaggtttcagagcccagcgggtggtggggagccctcaatttgtaaggaaaggccagatgacaattgtctttcttcctggttcctcacatatcataaaaccacctctttctcatctccaccacccccatctccaggcttgactcactgattgttttcttttttggacaatgtcagaccctgcccttttcctggaacttctcagtcctccactggcctgcgtcagcaaattcctaagtagcagatgaccttcaagatgtgtgagaaggaagggacaggaatgattgtcaggattgtcagttccccagggaactctgcatttctgacttagggagggtagatgactcacccttccaagaacccatctgtctgtccgggcctgtggggctctggagaatagaatatggagtaccctggtttacaggcactgccacctccttatttcaggatgggttcagggatgtaggattggagttgggagatttcttagttctgctatggatgctttgtacttaggcaagttcaaaacctccctaagctttggcttctttactgggtaaagtagggttggaggcatttcaggctttccttcttctcacctgatgctatcactacacatctaggcattcacgtaatggaaacttacaaagttgctcaatacctctcttcatgtccccaaagagagcaagcaagtgtccccattatacttcttacagtgaggagccagagcttccaggtatgctaagccattgctccctgttccactgctgaatgcatgctggtgccttccagagtcacccctttggtctgattcacttagtgctgtggctccgagaagtggccctctctttcagccagcagcttggggtggggccagtagagtgggaaccacagtggctatatgagtcaatttgctcatattgtcatttgactcactgaccctgatggggaagatagtgttattcccacagtgtggtagtacacactggggcttatagggactgagcctactcaagggtatatggtgctgtgggtcagagctggggcatggcccagggattcagtgtgccttgactccccctgtaaatgttcctctcagaagccttcttggccttccagcccttggtttttgagacaaccagcagtcatttgttcgttcctgacattccttcctgtcccttccttccaggttctgtggacaatcacaatgggaatccaaggagggtctgtcctgttcgggctgctgctcgtcctggctgtcttctgccattcaggtgagtgctccagtctcaggacatggatctaggctgccttggccatgaactcccttcttaagcctcagtttcagccccagctgctcctccaggcctggctttggttcttttgccttccagtgttacaggtctggggttgtatgacagctccttcctatgttatgaccttgtcctcagtggggcatcgtcctgagttacagcccgtcctgagttacagcgtggcttttggcaggggtgggtcaacaatcggcggctgaagtttcactcctgtcaccataagctgcttggggacaccaatggataccattcttagagtgctgtgcaagtccctttggggtccactctgcttagagccatctgagctcagtccttctgctctgaggctcctcctgtgttttaatgatgatgatggtcatagtgacagcagcagcagctaactaaccctgaagcatttatgtgccagtcactactctaagcattttacgtgtatttgcttatttaatcctcatgccaacctgatggagttggtggtatttttatccttgttttacaagcaacaagattgaggcctccccaaaattaataacttgtcaaataacacacagaagtggtacacgggaatgtgaacacacagtctggcaacagagtccctgctcttccctcctgctccaggccatctgtcactgggccaccccctctcctcagccacccctcccctggttgctggaggaaattgtgtgcttctgagtcaacttctataacagtggaaacacacatgcttcattgtaaagatcaagtgtggttgtctgcctgtgtcatgttggtataatatcttggccactgctggttttttgttttttataaatatggttggtggggggagcagaaaagaaagtggcaatacagtgagcaatttaaaaaaagatttccacac

SEQ ID NO: 5341 - DNA, 6000 bp, Homo sapiens
ccatattgtgacttctcccatagtataaatataccttcttctgatttctagtaaatagtctgaccaagtctatttatctgctggaaaaccccacagtagagaggtcccacatgttatgggggctacctgttccaacaagtataacatcctcactccaagttgcatagcagagaggttaaaaagcgagattctgcaggaagactgcttaaactcaaaccctggcttcatccattagccctgtacagccattcttcacccttctccatcctctgtttctcagggaggttggactgcaaggactgcatgtgaattgtttcagtggactctcctgccctccagcttccatctggctttggccagtatagagccctggaaggaaaagaaggactggaggaaagtgtgcattggggtatttattcccagacccccttccagcagactgctatggccacagtctcagcttctgtcaagtggccttctgcatgcagaactctcctctgggtcctggtactctccttttggcttaggatgggcaattgttccctactgttagtagcccagggagtctgccctatcccttagagttttcctaccccctcccacacccttctaaatgactcctttattaaacttatcacaatttacttaatttaaatatgccatctttttttttttttaagctgggactccgacaaatacaaccactgactgtataaccttgggcaaattccttaattcctcttggtctcagttttctcctctgtaaaatggtggtttaataatattttctgcagaaggtcatcttaagaatcaaagtacaatatataaggtgcagtacattatgcatataggaattactaaggaaatgctaagctcatataactaccacaaagttctagctcacacactaccttaactcaactatagtaactcacttctgggaacttgggttaagttttcagtcaagaatcaataaggcaaaaaagaaaaaaacccttataatcaaaattcattttaaaaaatcccttacatcacctatcagaatatggtacagttgattttcttgtatccagtcctgcagagtagttcttattgacattgaagtttgagaacccatcagctagacttaagaaaggtaaatctatatgtaaatgtcagtcttctgcttttgccatgactatggggtccctagaggagactgagagatgccagcaaattccaaagtgttcatgcagcttgtggggtcggccttgttctgttcttcttccaaggttctgtcaacttattgccggctaagagacttgtagtttgccgtgcagattaaaaggagaccctggggtcacacggtaggtagggaggctaggttctcaagacagctcagctgtaaattacactgggtgaatgctgctgttcccatgtgtctaggatggttctctattgagcatgaaaaagatgtaagcatttcccacatattctatttaatcatcacaacaaccctgatgatgatcattattatcttctccagtttggggatgaggaagctaagatcctgtgcccagaataaggtaacacagagtctaatacttggcggggatagtatttaaggcaggattgtctgacccagagctgagtttttattcggcatggtcacgtggttgtacagtagctaacccctaatgctctgtgagtgcacaacataagaagaaaactctatgtttttgtagctgctcacattggttacctagaataacatacaagtgtttgtttgcctggaaagttttttattccctgtatttaaaggcaagaggatcagccctgtattctagcaatttctttctgaaggctaaatgtaccatgctccaactacttcttggggccctgtttccagacccttctctatgttgttgaaccacttctagtccagcacttcccaactctggctgcgcagtggactcaatcacctggggaagtcctttaaaaatgcccaagtcagcccccgcctaaccccaaagatgcatggaccagaaatctctgaaaggtggcctgagtattactattttctaaaaggctctctcagaccattttaatgggcacccagtgttgaaaataactgctccagtttgttaaaaaataattggtgtgaatattggcaaaagccctctggcacaaagaaagagaaccagtttcttctagctaatgtttgttagccagaattatctgtggcatagtccatgtgacttaatagacctggtcttccagggcagctgaatgcaaatgtttctcacgtgtagaacgggatgtcagggcttacagagaaagtgggaaactggaatgatgactccatctaattcggccatgctggatgattcacctggattctctcatgtcctgagcattgaaaacataatgaagagtttttaaattgaatgtttaaaagagtgaaaacaactccatccctttttctgtttccttttaccttgtatttatgtaccaccaggtaccttgctcttggcagtgagcgtgaatgaatggcacagctcagcccctgaagcctgtgtgcagagattgagggattgtgatggagtagttcattcatgctcatgttaaggggggtgctaatagcagactagtgctcctgcgattattaatatctaggtctgggacagattgtgatggcttcttttccagttgccacctcagcagaaagggaaatagaaaaccctaacttgtaaagttagacaattagactgtaaagtttgtatatgtgacaacttcagatacaaagacacacacttacccttgacggggcttaagaggagagtgtcaaacataataccaaagtgaaagaagatagctcttcatctacaaattatttttaaacacatttaccaggttaaacaataactaatttttcggaagagaagagtacccaaagtcaaatgccctaagacgaagagatgcttatggcatttttttttaaataaagaaaatgcaaagttagagtggttctgaaggaacctaggatgaataaggtacagacatgattattctaatggtgcagacaggattgagagagaaggggggaggggagagatggagaaaggcatggatggaagatgacgtttggattcagattttggaaaggagagtaaaggaaggaggtaagcagagatttattttttaaattttattaatgtgttttcccctctttttcttgttatttttctcatctgtctgttcatacttggatattttgtccaataaactatcttctaaggactctgaaaatgcactgaatatttttggagggtttactgggtgccagacgccactttaggagttttacatatcctctccatttcatttagttctcttagcacagagaagtgggagaagatagtcccattttacaggtgggatgaagagagagatggaggaatttgccccaggttactcagctagaaggtggtgaagaactcaagccttcggatatcagcgcctggcatttaactaccaatcggtcctgctgggactccggctcctctggcaccatccccgggacctactcagagagtttgcacgtggccggtcgcgttccatcgtctaacaaggtccagcacagcgcaaatccgaagatcgtctaccccggggaaaaagagagtctgtttaattctcctgtggccctccaagtgagttcttttgggttccattgcctagacgaggaaagtgaggctttgcctgctctgcgctcacagggtcggcaagtagtgggaccctaggttcctgcagtattccagagataatcaaagctgcacaggtctcgtcatttttatgcaaaggcgtccggaaggctcgaactctcccttgcacaagcccatctgtctctgtgcgccgcccccgggacacggaagcaggcggcgagcagcgccgagtgggtggagaaccgtcccccgccactcacccctcggccaactctccgcgccttctcagccggcacccacgaggccgacctctctcggcctaaaaaaaaaaaaaaaaaatcccggcctcccctgcaccccgcccgccgcccccagggagctgcattaatattaatctcgctgaataattgaaggccagagatttattcgagcttcggcgggggagggagcgcagctgggccgcgtttaggctgcaccacccgcgtgtttcagccgctcgactccgctggacctgggacccccagacgtgggaggatggggtgggtgtgcctgcctgtgagtttgggggtgagtgtgagctgaagcgggtgctccggggagtgaggagggagcgccaggggctgctccagggaggcggagacggaggggcatcccgggtctccgcgcggtcgcctgcgcttcaccccgcacggggtgacctggggccacgcgggcttcaggggaaacaatagctactccttagatcctgggctcctgccaccggctgcccaagccttcccggacgagcggcggggcctcttttcttatttggctaatttatggcgagaggctggggggagggatggcagaggagggaccgcgactggagatgggggcggggggcggcggttaaaggagttgcccgaggcggcggcgcgggtgatgtcagctctcgacgaaaatagagagggatcgcctgcaaatccccagctccggcggggctaaaccttgcaatccctccctggccggcgccgagccagagcgcagcggcctccaccgcctccccaggcgcgcacacacccgcacacgcgcacgcacgctcaccgtcctctgccaccactctctgctcccgccactcgccgcgcccgcgagccccgcagcaaagcacaggtggcagcggctgcaggggcgcatcgccggcgtgcgccctcctgcagccctgggcgcatcgctctctcggggaagccaccctcggagcccccggagctccccgccaagcgccatccccgcgggcggaggggagcgcgggtcgcgcgccgtggagagccgggacgcggattagcgcccgcaggagcctcctgcgcccgttgaggcgctaaagggcttaccccggaggcgggtggaagggcgggcagaggctcctcttaaataccgctcccggccgcacttcgcgctcaccccggcgtccgctttctccctcgcccacagctgccggatagtgctgaagaggagggggcgttccccagaccatggcatctacggaagggtgaggggatttttatctgtacccgcgggaaagcggggtcacgcgcggggtggtggcgcccctatccgggatgcggatagagaggcggcggcggcgggcctcggaggtggtggcggagccgtagcttggctggggatgggatggtggggaggggattgattttctttcctggagattgctgcttaatcctttgaaaatgcgagaggtggagggttgttttattttgataaaaagggtaaggtgcgctgggggcctgagagtgtgaggaagaaatcctcttgaggttacttttgggatttcaaaacaataggggattgggcatagtgtgagcagacaccggggtagcagcgcctggagcgcggcgccccaggcccgaggcgggcttgcaggtggtgccggctcggaaggaatgagccaagacagggccctggggcggggcaaggaccagcgcgcgcggccttgaacgccaggtttgcagagtcgccatggagatgctgggcccgctccgatcggtccttgtccctggaaggcggaatctccctggctagctctaaggaagggtggaagagatttgggtgcttcccgggaggcgggaaaacgtgtggtttgggacaagggcaggagtcgccagactccagcgggcagggatagcattggcttccctattcagcccgaggatctggagtcgtgtcctgcctcccaagattccagctggcatggggaaagctccctcgcagtgataactaaagacaattgtctttagcaagagacaga

SEQ ID NO: 5342 - DNA, 6000 bp, Homo sapiens
gggagtatgtcaaaaaaaaaaaaaaaaaaaaaaaaaaaaagaaggaaggaaggaaggaaaccaccaaataaaccaatgaatgagatgaaatgacattttaaaaatattcaatcctaacaaaagtagaaaaagaagtaaacaaagggtaggtcaaacacataagcagaagtggctggacagcagatttcaatccagctttatcagtaattacaacaaactcaaatgatctaatcattcctaattatcaggtattgtaatattgtgtaaaaaagtaagacataactatacattgatcaaaagaaactttaaataaaggtgcacataggttgaaagtaaaaagatgcaaaaagagataggctgctactagtaatccaaaaaaaattgatgtggctgaatcaatgccagataaagtaaattttgttaaaaaaattactggtgaaaaagaaggtcatttcataatgatttcataatgagtatttaatcctcaacatatatgtgtctagtaacagagcttcaaaaccaggtaaaactgataaatctacaattacagtgaaggattttgataatatagtgatagaaaatcatttaagagtatagagacactaaaccacattacccaccaacttgttgtaattgacatttatagactgcttcacttaaccacagcggaacatacattatatttaagaccacaaggaacatttaccaagttatgccatattttgggtcacaaggcaaatcttaataaatttaacagaaatcaattcatacaaagagtgatctctgatcacaatggaattaatatgagaaatccataacagaaagataaatggaaaattcccaaatatttggaaattaaataacacacttataaataaaccatggtataaacaagaggccaaatgaaaaaccaggttctcttcctggtttatgaattgacaccttcttgttgcattctaacatggcaaagagagagattttctctctcacatctcttattaagagggcactaatcctacttaagagggctccaccctcatgacctaattaactcccaaaggcccttgtaggaaagaaaaagtagtatcttttcccccctcatcacaaagtttatggctgaggtccttatatcaaataaaagattaacaagatgaaaacatacaaatgtatttaatacgtttcaggtgacatgggatccttcagaaatgaagacccaaatagacggaaatttatgtatatttatgcttatatttgatgaatggtatacagtcatatagaagaacaattagagaaaatggtaagatttaaaggtaataaattggagagaacttagtgaggcccatttgttcagattcttcttggcatctctgtgtttgcaaggacaagaatttctcttttttcagcgtatggggagggccctgctgaaacaaaggttttatgaccttactttagtaagactagctagattttatggccagtttcaggggagaagggaagaggaaagcgagagtgacctttctgcttctgtcattttcttaaatgtcgaagtgacatattttggaatagtttttcttgaatctcatcaccccacttccaaatatcatagcattagggattagggcttcaacatataaatttggggggacataaaataagcacagaggtcttttttaaataccaataccttagtgtttggtgacactattggcttcaaagtaagtcttggtgaggaaggagtgtttgctattaaacttccttccaaatatcctgtttgagtcaagatatcatacaatcaagaaagtgatttccctttcctgttgagtcttaggacacatatataaagcaagaatgcatatacagtcattcctaggtattcatggggaattggttccaggacccctctgtgtatcaaaatccatgattgctcaaataccttatatcaaatggtgtagtatttgcatataacttatgcacatccttcataaatcatctctacataacttataatgcctaatacaatgtaaatactatgtaaatacttgttatattgctttttaaaatttgtattctttttattattgcatcgttatttttaaaaaatattttatgaatgtgggaccatggatacagagggctgactgggatgcatataataaacttttaaaaagtggcaaatgttacataactataggtttacaaaaacaagatcaaaccaactctttgtaaaaataaatttaaaaacacatcttcaacaccgaaaggattgattaaatcatttatcttctttaacttggtggtccacaaagccagacacatagtacaaatcaagtatctactttatttataagacatttgtagcactgatagatcacttactatgtgtcaggagatatggtaagcacataataaatattaattcattccagtcttaacaataatcctactgggtacatattagtgtcctgctttcaagtgacatagcaacctgatttcaaagacatttttttaaaattaaaaatataaaaaaaaagagagagagacaaagtgcacccccaccccaataaaagacaaagatgtatgacttgtagagactaatcaccctatataaggaaaaattaaaatttgaacctagatctatctaaattccaaaggccagtttttaacactacattttactgacaattttgccaattagtgctgcgaggtggtatgtacccattagttatatttaagtaactgaaggctaagatgacatgctagagtcttttaaacatttcacacattaacataaatagaattgataaagaccagtcaagagtctttgtacattctacatatgtgttgccttttttaatgtttgactcctaaacatgaataattctttcaaactaatttttatagactaattgtattcatccaatttacaaactgttttgtagtttaatctagtagctgctatattacatacaatatgttgatgctatactttatagaacaaaataaaatcactaatagaaatagtattatatgcaagtctaatcttagttagtggcacagtgttttttccaatattaatcatagaaaatctaccagagttatgaaaaatggtgatttgagagggatatttggaaaaatataaaatgtaagttattctctaagttcttctttgcaccttaaaattttgtaaaaattcaattttttcatattagtcccatcaattttattaagatctgtgtttactaaataagattaaattcttgccgttcttggaagaattattttacctgtgttttcttttgtgacatctgctggcaatacctggtattacactgcactataactcacctttatctaccttctccaactgtccaatacttttccagataatagcaatttaattcaacttaaagaatatagtgagtgttctgaactaatgaaaaggtattttaatatgaaactgaatcatagaagcagaaaatttagccctctagaggctgataacttatttagcatattacacatgtattttaatttcattgcttggtactaaaagagatgtatactttttttctgaaaactttaagctcgtttcaggcaaaaatgttatatattataatgcttacgatggacaattgtcaaccaatccctctagtgacactgtcccacacagatgttctctacaatttcatagctatgtgatttaaaagtgtacattaaagtaaaactgtgcaggtgtcaagtctaaattcatgtttaaaaatgaatgaactgtacctaaattgctatatacatcggatccatggctgtgaagcagaatgcatgagcaaactttttatattaccaggaatccatttatctatagtcccatcagtcaaattcagatacttgttgccagctccaagctttatagtctggagctggtttttgaaattgctttgtatttccatttaacagccagggaagcagcatgttaaaattttcctcggtctccttggatcctatttataaagctaatttgtctccccagacattttttttttttctcttttaaatgccagttctaggcttctaaaccattaaccccccttctttatcccaagcaaaatactgtcacagacaacgccgttgcaggacagtgatgattccgatgatgatatagttctcccaggcaggatacaaaacatttcgtcttctggccggagatggattcactgccctccctgcagacacgcaggctcacacacggagcactgggaagtacacatttactgtactgcatgccgactgccttgaagaaactgtagctaaccaccttattagtattcttgcctccaccgtgtctcacttgcagcatcagagggctgagcaaatgcagtagaacagggacagacacagctctggcaatcatctcaatgcaggctgccgaatgttgggggtggggggatgcagcacttcgagattaataaccttgccataatccggggcaccctgcaagcagacacctctgctgattgacctgctactggcttgatgcatctgcctgggggagagggatccggaatctacctagtcctggggcccccctgattttggatgttcatttgatccttcacagatctgggaaggtaacagcgagccgtaccatctgcagcacacagcagctcttggaggttactactgacagttttcattacactggtttgtgtgagtgcgtgtgtttgtgtgtgtttgtgagtgtgggtgcctgctttgcatgaaagagaatgtgtgagtgtccgtgtgtgtgtatgtgttagtgtgacaaccaaagcaggtatttcgtacagtaggagatttcaacaacgtgacaatattctctaggcacttgggctcactgtctgtagcccccaccccccgcctttcgccacctccttgcttccctactcccccttctgcttttgcctttgatgagtttttggcttactttttggcggagtctcttggacacgtttttgctggtgctggaagatcagatacatggaacctttgaaaactgattatttttctccgatatgacttaaaaaaaaataaaaagaagaaaagaaaatagagtagtgcacggcaagctagaggattgtaaattttccttggtgaactttgaggatccataaagaaggtaagtcacgggactcctcagatctcagttcttgttgtcttgcaatgtttgtgttttcctgcttgttttcggaaatgtatatgcagtttatatgctcatttttagagattggaatgctcagaagaactcagtgtgtggcattttggggctattttttatgccaaggaggttatttccatttgtataaccatccccccattcctcttaccatttttgtacctctcttgtttatctaacattttcacagggaattctgaatatatgaaatatggaaaaaaataattccgcctttctcctgccttgcaatactctctaaatttgaggaaaaacattaatcagaaaagcgactggcagaggctctgagttagaggcaaagtgtatctgctcagagactgggggctggggaggtggggatgtaatccggactttcacgataacttaatagtagacttccccctccccatagctctatttttttcttcttgaatagttatatctgctctagagagtagcgaatgcgtggaatacagaaaagctgcttcaccagctcttaattggagcaaatgagaacaaagtggaaattgtttagtattttgaacctctctctttttgcactgattctctcgctattgcatctcattaaccttttggaatgcagtgtcccctgattaagactagtgtcgctcattttggaacatcctcttaccctacatggtcccccgagaagggaatgtgcttgaaaattgctcttaattgtctattcttggctgtaaaagcaagtggcatgaggaattcaggtgactttagtcaaacatcttgcctaactcagtctctttagtttcctg

SEQ ID NO: 5343 - DNA, 6000 bp, Homo sapiens
tgctgcacccatcaactcatcacctatattagatatttctcctaatgctatccctccccaaccaccccacccctgacagaccctggtgtgtgatgttcccctccctgtgtccatgtgttctcattgttcaacttccacttatgggtgagaacatgcagtgcttggttttctgttcttgtgttagtttgctgagaatgatggttcccagcttcatccacgtccctgcaaaggacatgatctcattccttttttatggctgcatagtattccatgctgtatatgtgccacatattctttattcagtctaccattcatgggcacttgggttgattccaagtctttgctattgtgaacagtgctgcaataaacatacatgtgcaggtgtcttttttggaaagggaagcctgagaagttatagttgaagtgtatttttcttgaggcagctctcactcttggattcctccctttccccagcacatggttcccccaacctgggttaccctcactgtgtctctgtgtctccaggttggttttctcacctagtttcctccacatccgtccatccctcctgtatgaacctgctggtttcatttactgaaaacactgttttgctcatgtcattctcctactcacaaactgtcaacgtttctccattgtttataagatagaattcaagatttttttgcttggcattcaaggccctttatgacctagcctcaccattcctttccaactccatttctccaaccccagccttcctctccagctgactcaccatgtcctaagcatgctcccctctggatgcacactgctgctgtcctcccaatttgagatgcctctctctctctctcattgttaatcatccttgaatgctgcattgaagcccctcgtccaggaagccttctctgatcacatcaacaatgaagagttcctccttaggtcttatgtagcctacagtccaggtatttggctttttaagactgtcttctatttttatctatcttttcataagtttgaatcagaaatagcaaatgtctttcatcttccatatcaattcctattaatggatagtagcttcctggagccctaagctgaacaaacaccctgtgtctgagctcagcaggaaagaatgcttcgatcaattagctgaatctgccttgagcacagggtaggagaattgtagcataagcacctagtatctcccctttatggaatatctcatctctaccatgggatggtaaactctctgagggtggggacttactcctgtgtctcccatggtatgtagggtgggtgaacaggtgattggcaggcaacaagtatgttctgatttctgtttgacagcaatataatgtggagcggtttgacttaaaaccaatatataaggagaatctagttaaaacagcctctgtcttggttttgaaattgcactttatatctcggctgttttttcaacttccaggttagagattgatgtgcttttcaagtgctgcatataagtggatggatgtcttagattagtggttccctgcactttttttctacactgcatcacctctaatgggtgatagtcacatgggtttgatggttttgtagatttacctcctttctcttccatgaagaaaagcttatcaaaatgcaaaagtgtgaaagaggtcttattataaggataaccttgaatatatgttaatcaatttttaaatgggtacaaactcaaatttttgtactttattatttataatatattggcacaataatggttatagcagttggcctagttaatggtttcatcaattgcctgaacaccatagaatcatgtaatcctatagcttctctgaaagaacaccctaatttcaatgccaaggaaactgacataaaaacaaacttttcagcctttaatacaaaagtgactgtcttgggaaaagaacattaaattagaaacacaaattagaaactaagaaaaaaaagtctaaaggattcaaatgaaccaatattaaacaattgtgttcctatctgacagaagttttcaattatgcagagctgagatgcttctatacacagactcagtttaacaggaaaaatgtgagcccctagtaaaccagtacagtgggacaggagagggggcagaagtggaaattttggaaagcaaactcaaattttgggagtcacagagaccatgctctgaggtgaaacacattgctgacagccttgttgtggccactggagatgggaaaataagggtagggtggctggagtgaaaaggctgtgttcaagtccagattactgaccttttaaaatacatcagtttatgagtgttgatgagattacaacatggtcttgacattgcctttgttcagggcacaaatgaaacacatttcccacacaaagaatgttttgacatctaatgatgtgacacctgccagaaaagcaaaaacaatgattcaaacttttccattttcaactgtgtagttgttatccagagacacaaccccaagaaaccacagacagtatagtatacaggttagtagcactagctttggggtggacaaaggttcaaagcccaatgttttcatatattagctatgtgagcttggatatgtttcaatctctctgagcctcagtttcctcctctgtagtaaaaataattaggttattttttatttgttaatattagggtatatagaatagagaaaatattaggcacttatctatagttgcgtgaagattaaatacaataaagtttgtgttgtgcattgcagagcatctgttacatatgaagtttacagaggtggtggccaaagggctttgtgatgtgactgctgaaataatgcaggggccacctacaagaaggaaatctctaggtaggatcttgccatcttggggtttccagtcccacggagttttttgtttgtttgtttgtttgttttgtttttttgtttgtttttttaataattgttttaaaatttagtttccgccagaaatgttgggattgcagcaacattcaccctcctcctctcattgggttttagctgtattgcacctgcggactgactgtactctggacacagtgcaaactttccttctgccatcttggcggaatgcccctctccaatttctctacctgtcagacttcagggtgcccaacccaaagtcagcgtctctatgaaacctcctgcagctctcccttcttcccttccttctcctaccaccctccccttctccaggtaaagcttggtttgcttctacagactctgcctggtgttttactgttctccatcatagttattactctaataatccccctcctccccactccctgcaaccagcacacatacagactgtgcgtcggggtagcaatcagtgttggccatgccttttatcccataaaaggctcttaatgttgaatgatgattgatggagtgaatgagtgaatggctaggctaggagggtagagatgggacatccttcctccagccccactggcttctccttatatctactcaagacctgggaatgacaacagaccattgtgtcttcccaggaagggaaggatggggccaagctggaaagcctgtgggctccacagtcatgtgcctgggttcaattcccagttctgcatcttattaaccatgtgacttcagacttaacccttctgtgcctcagtttcttcctctaagtggggatgacagtaatgcctcctcatgaggctgtgaagtttaaatgaaaccgaatgggtaaaatgctcagacttgtatctgatacatggtaaagctgcatatgatgggttttctttttcttcaaattttagctcagggacttttccctgaccctcaaattcttagtagaaacaactcctgcgccccacccccaccccccaccactcaaccgacctcattaccatctgtcccggtctcgacagcacttattcctaagggaaatagctttttgggtcccctggcttcttgctgtctaccccactggaaatgtccactccataaggacagtgatcagacagtgttgttcgggcagttggccattgttgagaggtttaatcattgttgaatgacaaacagcagataaaacgtttgcgttagggctggctggtattcctgttgtgtctcatcctggccgggttgggaggggcagctgccagcagggcttacccaccaacaaatctccaagtcggtcacatcaagtaccggctggaggcagtgagtgccctgggccaaccacaaatgggcttttttagatttcaaaataatcacaagggaaaaggagaataggaggaggtgagctacgagggaggcggatttgagaaaggattgggggcacagactcggaacaaacaggagaggaggtgttggaagggataacaaaagatggtacaagggtaatgtcgccatggaaacactgcgccgcctggactggaagccaagcctcctcttcaaggtggatttcccctttgcagagtgaactgtgtcacctctctcccactcccagaaataactgtggatttgcctaagggcacatggcttcacaattcttcaagcaggcaagacgtagaggaccctggtgctggcagcttcctaggagatggaggcctagcaggcaaatcagtgttgccggggggagctgagcggactctgagacaggaggccgtgcctgtgagcagcttaacatgagagagggggtgtctacctctaccctacctggatgtttggggctcccccaaatcagggtgttcccaagcaaggcgtccttaggctccacctagaacccaccaagtcaaacctctggggggcctgggaatctgaactgtgcactccccaaatgaagctgatgcacgtcaaagtgtgggaattggcgctgacagtcccgtttccctgactgatgggcatgaaggggcagcatagtgggtggtgggaccaggcagcgtcctgggcatccgccttaggggcacagaaacgtggaggaatggtcaaggctcactagaaatgggaggcggtggctgaagtggcgggaaggcagcagggcctggtggttccgcaggggattctggggcgagtcagcctgggtctgaatgcaccctctaccgccccctagcgggccaagacttttggcacagaactgaactctacggactcagtgtcctcgtctgtaaaatgaagttgacaatatttgtacttcctataaggttattatgaggatttaagaagtttatgtttgaacagtgcagggcacaggtaaacaaggccacaaggtggaagaggctgggaccctaagtttgaaaataaacggcccttttcagactgtgagaaatcaacttttattgtgttcagccttgaggtttagcagttggccttccttgatgaatacaagtctgttaataagtgactggctagccatgaaggttcagttagttgtcagtatctgctaggacacaattggttgggtgtgccttcctctacagaaggaatgggcacagatcaaacctttggactggttaagagctgtgccccacattttctccaggaaaattttctctgcagttggaagtgaaattttgataaacttctaagctatcttcaaaggatagcgaggctgttcccactcagcctctaggagttggtccttctctggaggcaaaatgagcaaaatgaggatctctctcagtttcttacagcttgatgtaatggacttaatgcctgttgtccagacattaggatgtgtgtatgtgtgtgtgtgtgtgtgtgtgtgtgtgtgtatttgagagggagtggaaggattatggtaccagacctagaagtcataaaataaacaaaagaaacttttccttgctggtagtaatttaaaacattttaatactaaaacaatcatatggaatcaaatacaaagactcatatgaatttgtaagatagaattggagatttggagaaagatccccaattgctcctgactgcttcctcttccctagagtacgtgtcagcttctgcctctgag

SEQ ID NO: 5344 - DNA, 6000 bp, Homo sapiens
tttcaccatgttggtcaggctggtctcaaactcctgacctcaggtgatctgcccaccttggcctcccaaagtgctgggattacaggcgtgagccactgtgcccagcctaaatatttataatagctatttgttaggctaaataattcattaaataatgaattgaattggatacttttattttcagcacttaacagactagaagagtgaggctcatgagatggagtgatttggacaaaatcacacaaataatcagctgcagagccaggatttagacccaccctgtctcagtgctcttgtccattaagctgtgaagcagcctctagccaggagcccacatgacagccaatgtgataatgctgttatacttaacctatgagtagtgtcaggagaacagagtttaggaaggaattagttttgggggtagaggagaacgttgataaatcctattgattcagatatggaaatatatctcaggtgtctttcctcttctctgttttttattattttatttatttatttagagacaaaatcttgctctgttgctccaggtggagtgcagtggcacgatctcagctcactgctacctccgcctcccaggcttaagtgattctcccacctcagccacctgagtagctgggatgacaggcatgcaccaccactcctggctattttgtttgtttgttttatattttttgtagagacagggttttgccatgttgcccaggctggccttgaactcctgggctcaagagatctgcccgcgttggcctcccaaagtgttgggattatagacctgagtcaccatgcctggcctattttttattgttttaaatgggaattatttttgtttgtttgtttcttcttggttttttctttatttcttcttaaaacaaaacaggatccatgtgcagaatgtgcaggtttgtcacatatgtatacgtgtgtcatggtggtttgctgcacctattgtcccgtcctctaagttccctccccttaccccccaacccccactccccaacgggccctagtgtgtgatgttcccctctgtgtccatgtgttttcaatgttcagctcctacttatgagtgagaacatgcggtgtttggttttctgttcctgtgttagtttgctgaggatgatggcttccagcttcatccatgtacctgcaatgcaatggcacgatctcggctcaccgcaacctctgcctcccagattcaagctattctcctgcctcagcctcctgagtagctgggattacaggcatgtaccaccacgcctggataattttgtatttttagtagagatggggtttctccatgttggtgaggctggtctcaaactcctgacctcaggtgatccgcctgcctcaacctcccgaagtgataagattacaggagtgagccaccatgcctggcctcattcctttttatggctgcaaaatgtgaactattatggtggtctcctaactgctttaaggtctctgtcctttccaatatatgctccattaattaaacacaaaaacctgacgataacgctacccttcattaaaaacaaacaaaaccaaaagaaaacaaaatccaggagtttcctgttacctaccctgcaagactgaaagtccttggcctcccagaggtaattccaaactgattttagcctaccttttcagcttcctttcccaccattcccttttcatttattcaacaaatgttggccgcaagcttattaggcgccaggccctgtgataggcagcaggcacacaaatcacctaccacgtggtggttcctgcccccacaagatgtacatctcatggggcgggatgggggcagaaaactaagctgattattctagatcagtgtggggacttccatagaggtaagcagagtatttggtgggtatgtggacaaggccctgaatccagcctagagtagagcttccagagagaagtgaaacttgagctgagttgtgaaggatgagtacattagaaatgaagaaggaggctgagcgcagtggttcatgcctgtaatcccaacactttgggtggccaaggtgggtggatcacgtgaggccaagagttcaagaccagcctggccaacatggtgaaaccccatctctactaaaaaaatacaaaaaatggccgagtgcagtggctcacacctgtaatcccagcaccttgggaggccaacgtgggcggatcacgaggtcaggagttcgagaccagcctgtccaatatggtgaaaccccgcctctactaaaaaatacaaaaattagccaggcatggtggtgcgcgcctgtagtctcagctacttgggaggctgaggcaggagaatcacttgaacccgggaggtggagcttgcagtgagccgagatcacgccactgcactccagcctgggcaacagagtgagactctgtctcaggaaaaaagaaaagaaaagaaaaaaatatcagctcacaggtggtggtgtgcacctgtaatcccagctacttgggaggctgaggcatgagaattgcttgaacctgggaggcagaggttgcagtgagctgagatcgtgccactgtactccaactcgggcaacagagctggaatctgtcaaaaaaaaaaaaaaaagaaatgaaggaaatctgtcattcccacaagaaggaatagcaggtgcaaagactgggaggtgtgaaaccagctgactgactcttcactgcacatgtgctgagtgccccttaggtgaggtgctgttctgggtgctgggatacacagcagtgaatgaacacaccaaatgaggcctgtgtcctcatgcagcagacagtccaactccatggaaatgtgggttgagatgaggaagagcaagtgttccagccatgggggtccatggaccactagagcctcatggaaagggtccatgaaaaccttgaaatgtgaatgttgatgagtgtgtgtgtccatgttcacacaagcatttttgtcaagagtagatcaataacatatttcttctttttttttttttttttgagacagggtctctgtcacccaggctggagtgcagtggcgagatgtcggctcactccagcttcctggacctcccaggctcagggatcatcctacttcagcctccccagtaactgagactacaggcacatgccaccatgctcagctgaattttttgtagaaataggggtctcactatgttgaccaagcaggtcttgaactcctgggctcaagtgatcctcctgcctcagcctcccaaaatgttgggattacaggcatgagccactgccaccgcgcccactgtcttttgtattctcaaagggatccatgactctcctagcttagaaagttgactctaggtccccctgtgtagagctgaggagtttgaccttgatctggaagttctgggaggcagtattgcattttaagaagttaaaccatcagagcctgacatgtgctttggccaccgagaactccttgtgccattcccacagctaagcctttgctcttgccattctccttctgggaggaatggaaggagccgtacttaaatgccaggccgacctgactctgcatcctacctctaaccttgctccagcttcaagcctgcagtttctccctctgtgaaaagctatgaggtttaaatgggaccatgatgtcttgaggaattaataacagtatttttattttggaaagtgccctgtctatggtagccattagttcctctcttggcttggtggctcatctgttcaggggttcccttttatctgaggccttcttggagctttctgtagtcattcttgttttgtttttgagacagagtcttactctgtcacccaggctggagtgtagtggcatgatcttggctcactgcagcctccatctctccagctcagtgatcctcccacttcagcctgctgggtagctgagactgcaggtgcacaccaccatgcctggctatttttttttcttttttgtagagacggggtttcaccatgttgtccaggttggtctcgaactcctgagctcaagcgatcctcctgccttggcctcccaaagttctgggattacaggcatgaaccaccacacctggccaccagtatcactctttttttaaaaaaattttatttttattttaagttctggggtacatgtgcagaatgtgcaggtttgttacgtaggtaaatgtatgccgtggtggtttattgcacctatcaacccatcacctaggtattaagctcagcatgcattagcagcactcttaacacacaattaaactcacatgtaatgagattacttctcattactccacaccatagtagtctattttacagatgaggatactgaggctcagggaggctgagagatttacctggagtcaatcaattgttgatctggaagcatccgatcaccaggtcttctgaaataatgacagcagcaacaattaacattatgcttactatgccaaatgctatgcttagcattttacctgcatcacaatcgcgattcctttgggcagttaggtaggttccattttaaccgaatttaaagaggaggaagctgaggctcagagaggtaacttgccctaggtaacccagggtagtcagttaaaaagtcaagactcagacctcgatctgactaactccaaagaaacccgtgccactctgcctctcggaaaacactgcttccagctgcacagttcaaaaccccacccaaggcggccctgaatcgcggtcagtcggcttcagccgaatcgcactttgttttgaacaaggatacagagggcgctgcctgatgttagtctgggggcttgggggagaagatgggggtccagggtggaaatgtaggtgctggggctgtgccagagggagagtgtccgggaccagcgggcgagtcacgtgcgcgtgaaactcgacctaaggggaggggaaaagaagggagcccccgcccccacctcggggcgcagctccggacgcgtgtaaatacaactatcaactccgcagatccacttcatccaagcccagcttcgcagacctctggcgcccggcgggttcccagttcccccgcttcttccgaggagacagcggaggcgaggccaccgggctgtcaggctgaagctccgtggccgccgggtcctgcacgcagagaagaccccagcgccggcgcggctcagggctgggcccacgggactccggacgcgccgcgaaagcgttgcgctcccggaggcgtccgcagctgctggctgctcatttgccggtgaccggaggtgagcagcgtgggcggggagggggcgcgcgtagggtctccggctatgcgtcggctgagagacaccgaggccggctcccgccgacactgccaggcttcccaaggaaagaccgttacttgcgcccgcggtcccgcggcacagtgtcccatctcgccaagcgcgtccttcccttttcttttctctgacccctccgactcttctcttcctcccgggtccccgctcgctgcacttcctctgcttagagctgcgcgtttgccagagttccagcggacctcctggagcgcttgaacccaaagccccgtttcacagatgagaataccgagtccccctggaagaagtgactggtacttcctcccctctctctgggtctttcttgcccttctcctctccgctttcctcggtctcatcccagttgtcgctccccgcccccgcgccgcccgcgttccctctcctcccgccgaggctgcagcggccgcggcggggggagctggggctctttccctccctttggtaaacacacccgcccgccagcccatccgccaccgctgcccttataaagtcagcagccgccagacttcctgccgaagtccgagccccctcccggggctggaggggggcaagcgggttccgaggtgcaaagcctggtgccccgagccctgcggagtgagtgaggggcgcgcgggggaggagggaaccgaggagagcccgtcctgggtctccctccacgtggcagctgttggcttggcccgagagactg

SEQ ID NO: 5345 - DNA, 6000 bp, Homo sapiens
atgcagcccacggtccactggaggaccaccttagtggaaaggggactgtctgggcctctggcctgccacgtgcacaagcataacaattgcttttgtttaacgtgcaaatggaatatttgatccattttaaccaggcatttgcatcttggtatcttgtcttaactgccaaagtttgttttaagtctttaacttctatgatcctctagtaaaatgaatgtatgattttaggaaattacaaaaaccagttgggtcagtccatccttgctctttagtggtcaacagaacgttggaccaactatggcataaaagttctacattggggggcaagactcctggttgacactggagtctttaccaaagtttcccccaatcaaatagtcctaatttactaatgcccagtctgaggagagtcaggagggacagaggtacttttctgaagtagagagctgtctttgacttggcaagtccccacagggtataataaggcaagcattaaatgcaatagtttgaggcaaaattgacttggttatgttaataactagatggtcagcaatagagtgaggaaagaagaaagagtaatagaatagataaaagagttaaatttttctcagctttagtttggtagggttttcccctgggactatggcccacgactctggagcgggtggagctttcttgactggtgtgatgagtccatcctttttccactgtatgaacagcagtcttggtggttagcagcacagggtagggtccttcctaggctggctcgaatttcctctttttttttcactttttgatgagaatgtgatcttcagactggtgctggcttaccagaaattgtaggggtggcacatgtgttaaaagacttttagttttgagggaaaggaaagtgggagataaaccaagtatataatttttaagaaattgaccttttgttttaaatgtggggatgtcagcagtggactttatagtccttggtgcctttctactgagaaatttcctttagcacctattttttattagtttttagaccaaagaagccaaacagctttttatatttgacgcttcctgtatgatttttataccagataagctaaatgtcacccttatattagtgtgttattaatgttaaacttagttttaataaaacttagtaggcatatttatttaatttttaatgttagatcataaggtaagatttttatagactctttttaaccttttataatctttgttaaagagcaggttaatgctttaagagaaacccattgtgtttttattttaatgttcagttcacagaaaaactggatgatacccctttaactttagccaatatgtttacacacagaatttcctttacaattgacgttttaaaacttgcttaaaccttcaaaacaatttttaaaaatcttttaatgtaggtaaaaatccacattcttatgcctccttataatgcttttaccagaggtgtattttacttttcttatacaccttgcacataaactgttttctcagtagttttacattcaggaggcctagttacttttaaattatacaacatttcttgcatcaattctttttttataactctttttctttcatgacttttgtagacaattcttcaacatgcctcaactttctgacttattacaaacatttctttctttaaacaaccagttaatttatttcaggacaagaatttactatataagattctttttacataaattctgcccccgcttttttccccctttttttggggggataaccattcttttccaaagcaaacttcctttatgtctgtggattagactgtctaaggctacaagattagaagttactattatacatgttatactgttaacttttagcaaattttacttttgttgaaaaccttgtacgtttgggatttcaattatcctttgctattagtaagactttgtttagtccaaattaacttagaattggtatagacggctttttcttttccttccattacctgggaggaaccgtctatcatccagtcctgaagggagttcctcctaggtctggtcagacctttgtatggcaattaagatttagatcccctgttaggaaacctgctgggttaagggaatttttagtggttaatgttaaatcatctttttttttttcccttaggatacttctgaactggtgaggtgtgctcacaatgaggtttcctctaaaagttatttttctactttcttctgttagcaaagtagttgccgctacagagtgaatgcatttgtgccatccgcagattactaggttaaagatttttgataggaagtctacaggttgtcagtggcctcagtgctttcgggctacgcacttgtttacacttacagcaaggtggtattggagtgttgtagggtcacagagaagaccttcaattatcaattataggttttaaatttaccctgtcttttaaaggaatagggtacactgtttttttcttaactacttgtatatctctttctttctgtctttgactttctgtgtctttctctttgactttccttttgcctctgtatctttctctctctctctctctgcctctttctttctctctctctctccttgactccctctttgtctctctgtctcttcctctctctctctctgctggtctttccttgcctctgccagctgcttatgctgctgttctctcaaccactgtgagtgggtggggtctaaaaccagctgtacccaagtgtctatatacgggaactggtctgggtgccctggcttacaagttaccttgtgccacacctttgaaacaagggacctgtccaggcttccttctgatggccaacccacctccaatactggccagtctatttcacacaaagttctagtttttcctggtgtcatagtaacactgtaatctcccttaaatcctttcttgaaatttttcaacatagctcctagtggtcttactttgtgcctggcccatgcttcctgaagacaaaacaccatgctcacactgcaaaacaaaaatgggtaaaaagggcacacacacacttttgcagtttacaccaaaccagaatcaaaaccaaaatcagagtgtcaggaaatccaagccgggtcaaaaccaaaaccaaagtatcaagcaatccaagtcaagtcaaaatcaaaaaccaaagtgctggtacaggcacaccatgggtgatcaggccatgcttccacttaaatggagtgggcaagttccaaagaccagtcttaccaagttttagatgtccggactccaagtgccagttccttcatggtgttcagccactgcattgatcctccacaggggcctgctgtgcactgctctgatgaggcattccactggggcaattgcctacctgggagtgctctcaggatctgcttcactcaagctggctggagtccccctcaggtatgctccacagggcaggcctaagccacctaaggagctgtctcgaccatccattaatcaccttgtttcctggtcagggaaccaagaaatgtagcaggacaagccacagacaaaacccctcagacaccgagttaaagaaggaagggctttattcggccaggagctttggcaagactcacatctctaaaaaccaagctccccaagtgagcaattcctgtcccttttaagggcctacaactctaagggggtccccatgagagggtcttgatcaattgagcaagcagggggtatgtgactgggggctgcatgcaccagtaatcagaacagaacagaacaggaaagggattttcacagtgcttttccatacaatgtctggaatctatagataacataaccggttaggtcaggggtcaatctttaacgaggcccaaggtgcagcacagggctgtctgcctgtagatttcatttctgccttttagtttttacttcttctttctttgggggcagaaactgtgcataagacaatatgaggggtggtctcctcccttagagacagagcaaacatggaacagaaagtaggatggtggttactaggggctaggaataggaaggaaaggggtggttgttcaatgggtatagagtttcagttctgcaagatgaaaaagttctagaggtctgttacacaacaatgtgaacaaaattaatactagtggtctgtacactaaaaagtggttaaaataatgaattatatgtgttttgtaccacaatttaaaattttaaaaataaaagttgagaaattgatttaaagaaaatattgttctgtttctagcacacctgcctttacacagaacacacaaaaacccttttgctcctaggtcagtagctctcaacatgaatgtgaggggattttgttctccctccatcaggagacatttgacaatatcagatactgtttctggttgttacacatagggtgggattgtgctggcataggccagggagtctgctaagcatcctacagtgcacaggatagccacctactgtaaagaattacccagtccaaagtggcattagtagcttttttgagaaacctgtcccagatcattaatcagaacgtgttattgatataccagtcttctcccttgtagttaggttggtagaattcagactctggaaaaaactgggaatgtaaaaggctgaatgagtgtaagctgaaagacaagagaaaggagaattgttttaagcttactaaagccaaaatggaaaaaaaaagaggggggaggattggggggtgaggaagacagtcaacagaccgcttttaggccatcattccgaagggttctgtgctaggaaccttacacgtgttgtctcacataatccttaaaactcagaaatgattttaaattaaatagcacagagaggaaaactgactggagagggagcctttgcttaggtaggcaactttaactggtttattagcacattcccctgaagggaaagggggtgtgattgctcctgaagagaccaaagagactgggctcctttttaatcaaagctcaggaggagagctgcattccactgtttcacagatgctgtgagggtgacaaagatgcagggcacccactggaaacacagacggcactctgcgaaagaggaaggggcgccaggagcttgggtgagcaaggttggaggtgattctgcccctctccccaggctttctgtgtgagtccattcctcctctcagatttattgttagaacttaagacaagccaattacatttcataatgtctgtgtcattcagacgctgagaactaatccagccttctaaatggtgcttcttaactcctttcttcaacaggagagttaatgtgtggaattaagtgcagaatccatggccctctgtggtgacggtgatggttcaggttgtgtttctgggttcattctggaagctcccccaaggaaaggaggaaggaagcttgcagggtggggctttgccattgccctgactggctctggtttccttgcctgatacattgaagtcagcttccaaagaatgccacccaaggttttgaaggggcacagtgcctctgtcctcacaaaaccagcctgcatatgagtttactgaattcatttaggtcctgctgaatctttcccatttgttccttctctgtttcaatatttcaatgcttccctggaggggcccaacctttctggagggcaaagatctgttgttagagaaaaagagcagccagaggaggaagatgacttgagggtaggcagcagttgggcaatcagtattgaaaggttgctttcagcctgccaagacttggggaattagaaaagcaagataaaacaaaacaaacaaacaaactatatatataaaaaacaattttttaaaagtttttttatgttctatattactattagctatatattaatgaatgttcctttaaagcagtgtagtcattattgctattattattattatggttagttatagacagtggaatattgttctttctctatattatgattactagcactattactgttattagttacatgttattgaaag

SEQ ID NO: 5346 - DNA, 6000 bp, Homo sapiens
actatcacgaatagagaaaggcgatggggcagaagggtagagcagagacctctggaagaaatagttttagaatccatggcacatcaagatggaggagccatgggtgagcattgtcatgctaggagttatgggtagcatcaggtgccacagagaagggctacagaaaaggaaatgaggaagcatgtagaatgcaacacttcttcaactcccagttttctttcaagagaggcccctctgttccgtcccacagctgacctccagggcttcagattggggtggcacaagcccatctccctagtttaaggaagtgagcttcacagcctgtgaaggatccacagggtccctcccaacacacacacactttcctgctcctgccccttcacctgcatggtggagctgccaggaacaaagggcagatgactgtagggacagggctgtggccaaggtaagtaagagagtattagcacccttttaaaagtgtgggatccttggagtgtgtatgtagaaaagagaagaaaaatgaaaaataataaaggtgtgggagcagagcaagtcccatgcgtggggcctgagttcccaagcacctgtcactgaagagtgccactcgcacccctcaccttccctggcatcctcttgggagtttttgccttccccagacttggatttatgcccaccttcagtgcctgctggttccagtggattgcagagcactcaagcacctggaggggagacagaagggatggttggaagaggcagccccctgctagaggccatctctcccaacatcaactggccctttcatgaccttcctgtgctcatgcctcctctttgtctcggtttcctccccagttgggcccccagccttgctgcctctctacttccagtggtatattttctattttgttatccagcgaaagaagtgggtggtgagtatccatggcccaagaagcccacatccttgtctccagcacccagagtgggggataggggttccccaggggaaacttgagactgactctaggcctaatttagaacaaaataatagaaccagacacagatcctccttatctctaagtgggacgaaatgatttgagcttagcaggcagcctgattcccaatgtgtaatttcatgcggtcagtgtctccagaggttcttgtactgggcataatgccagggggctgagttgggaatggggaagatgaatgagagacaatacctactttcaaggaaacttctgatgaagcagaatgtggttattaatcagaaaagaggtacaggcaataggttctggggactccaaaaggggcctgactgcacctggctttgtgaagtcacttttctagctggccttgaggctgggcagggtttctgacaggcagaggtggagcaggggggatgaactctgagcagagaagctggaaatgaggggtaagtttgaccaccagacatattgtggaggactagtgtcaggggaagagtatggtgcttggttcagtgatgagagatttgatcagggcactggcatggactgagccatggtcctggcagattcatttggcggcatgctgaaggatttagattggctaggaagagctagaggcaaagagaccttgtaggccttggtacttttgaaggggacatgcaagaagggctggggggtgccaatgggaatggaagaaaggagcagtggcactagatactgcaggattggacccctgagaagctgaagatgagtgagtctggataaccaggagaatggctgcaccatgcaaacaaagagctgctgagaggaagaggaagagttgttcgtgactgttatgctcgctgcttttctcactataggacttggcctggatgattaccttctacgtccgcttcttcctcacttatgtgccactattggggctgaaagccttcctgggccttttcttcatagtcaggtagtattcggtgggggcggatagggactggtgaaggaaatgttggggagtgaccagtctggtctaggggccgtgctggggctttgggtaacagtgggtgtttcaggagttggcttgggaaagtagacaggctggagcagttatctgaggggggaatcagaattctgggctctgtgtgtactgtttttgtctgtgtaatacatctaacaggttcctggaaagcaactggtttgtgtgggtgacacagatgaaccatattcccatgcacattgatcatgaccggaacatggactgggtttccacccaggtaagggacagtcactcagaagactggagcataacacaactattgaaaaggatgcgtaggtgaaaacagcaaaaacaaaaagtcccccaaacagcattttctcattagcctgaggctcttgttctgcaaccatgtgaagggagtgaccaagacagtctcatgtcccttcctcagccagctttacctggagaatgctgggctggcctttccatctgatattcaacatgctctcccctgaccttttccgccagctccaggccacatgcaatgtccacaagtctgccttcaatgactggttcagtggacacctcaacttccagattgagcaccagtgagtagggagcctggggaagcagggtcctggggagggtgtaagtgttgggtacaggtgggagcagagaagcaggaaccactgactcccccgttctccctaaagtctttttcccacgatgcctcgacacaattaccacaaagtggctcccctggtgcagtccttgtgtgccaagcatggcatagagtaccagtccaagcccctgctgtcagccttcgccgacatcatccagtgagtatctgagaccaggaagatggctagtagggagggaagagggcagggcaatggaaatgatgacatgtagggtggggagtgaacagaaggtgttcccagtcgtgtgggatggagttcaccatggcaaaggcaggattctttattggacctgtggccaggtcaggcctttgccctcattggggttcccctcagtaccatggcccaagctagctttctctaaagtagaggggaggaaaacctccagatggaagaaggccttaacctcactgctccatctccggtgggttcaactctgcttgtctccctcactgtctgcccccattttgtccctgcagctcactaaaggagtcagggcagctctggctagatgcctatcttcaccaataacaacagccaccctgcccagtctggaagaagaggaggaagactctggagccaaggcagaggggagcttgagggacaatgccactatagtttaatactcagagggggttgggtttggggacataaagcctctgactcaaactcctcccttttatcttctagccacagttctaagacccaaagtggggggtggacacagaagtccctaggagggaaggagctgttggggcaggggtgtaaattatttcctttttctagtttggcacatgcaggtagttggtgaacagagagaaccaggagggtaacagaagaggagggacctactgaacccagagtcaggaagagatttaacactaaaattccactcatgccgggcgtggtggcacgcgcctgtaatcccagctacccaggaggctgaggcaggagaatcgcttgaaccggggaggtggaggttgcagtgagctgagatcacgccattgtactccagcctgggcgacagagcaagactccatttcaaaaaaaaaaaaaaaatccactcatataaaaggtgagctcagctcactggtccatttctcagtggcttctccatcctcatttgcaaacctcagagggataaggcagttgaacctgatgagcaagaattataacagcaaggaaacattaatgcttagaattctgagatccagcacaactcagtctgtgggagctcagctcgctgcccagggataggtatgacctatgtctgccttaggctgctgggagatgccattctccagtttcagaagcaggcagggcaaaggtcaagactgtggtattggggtcttttggctctgaaggatcctggaaccactgattttggtttattccctccagggtctaaagagaacaagaggtgctagctcttaccaaaacagatggtagagagagttgctggctatttaaaaagctctttcatcttttaattcacctcttcttttcacctctttaaccactcctcaggaacagaacacttctaggactgggggtcttttagctccataagcaagtgagcagatgggacaagttagtcttttctccctagaaacaaaggggatgcccagtggtttccctttgcttcccaacctaaaatttcaagtttaataaaatagcaattagcagaagtgaccaaattgggagataattatcagtcatgaggaaagacacagatttcggtcataaagaatgtaagggctataagtagaaactttctataacctaaatgatgttatagaattatttttgagcaggagcagaaagattaaatatgatcacttcatacttctaaatcagaaataggaagattaaaaccacagaacagtttgtgatttctattgctgtagctaggtatcttactctgtccactcttgttcaagtatctaactcttctggaaaccaaataggctttagaagagattatcctatattcctatcagtataatactaaaatgtaactttttaatcatctggtttttaaaagataaacagtttagcccatctctccagagagcaaacataggaatatgactcaggagcctcctagggcttatcatcagccctcacacccgcttccccctccaacccacagcctttgcttccaggtggcaggattactactttgcctcttcagcagcatctactctaggcatattgatcattttagacactgggagaagagaacctcaaactaggaggaaaagacagagcctccacttagttttgggaggggatggcagacagtcaaggagatgagcgtcctaaggcatgttgggatagggtcagatgcaccacccatggagaggtttgtcaacacaaagacatggaaggttagaggtttgtcaacaaaaagacatggaaggttaggtttgtcaacacaaagacatggaagattagaggtttgtcaacacaaagacacaggaagaatgggctgcagaagatttagatgttttccatttgggcacattttacttagctggagaactaggtttaaaacagcctgggtaggaaaattagaagcaagctggatgcagtggctcatgcctgtaatcccaacacttttgggaggtccaggcaggaggatcacttgggcccaggaggtcaagcctgcagcgagctgagatcacaccactgcactccagcctggggtgatagaacaagaccctgtctcaaaaaaaaaaaaaacaacaaaaacttagaattgaggagttgtacctccattggcttcctcactccaaaataggtgctgatccttcctattcctattctttgccaccttttgggtgtggtgtcaccagcctgtttagccaagtagctttgggcataggctgcccaatctgagcaaacaccagtgaggctctattgagccaagaccaagtcctcaaagcacctgaaccactgtggccttctcagcctacagcagtgtggtctcttacatggccacaaagggacacacagtgacaaaaggctcggaatgttacaatggtaaaatgagtgatctcaaatccactgacagatataaaataggcttagagaggaaaagctgcctctggtcaagtagatcatggcagcatgaattccaactcacttttttacaactccaacttctatgtttatctttgttactttcacttttttacaacctggccagaggcattttttaaatcaggcccaatatcagtattctttttgtgtgtgccaattttgttatcacatccctatgaagttgaaaaataaagttaattttgaccaaaagacttcatttgtaacc

SEQ ID NO: 5347 - DNA, 6000 bp, Homo sapiens
ccgggttggccaggctggtctcgaactcctgacctcagatgatccgcccgcctcggcctcccaaagtgctgggattacaggcatgagccaccacgcccggccggccaaaaagaggctttcttaaaaatcaaggttacatttattaaacactctaattttttttttttttatttaaccatgtctgagctgttgtggaaaatttcacttactcccctggaacttgcccaacaccgtgatacagtgggggtgagggaggcaaggtgcttggtccctgccatgccacatttgccatttaagcatgtacagtacaatctattcattgggtatttgggtgcctgatatgtgccattatcaggatacagggattaaaacggacctgacctgattgatccttcctggaattttcaccgtgccaagaaggaactgaggctcctccgcaacagaatgggggtagggtcccactccaggagggcaaacttctcccgtttcttcatctctaggatgagggaattaattagaagatctccaggacttcttagagctcagaagttccatcaacagtaaaaagttgcttgggacaccttaaggtgacccaagttcactgggtgtccctggaattcatgaagatatccttaggaggctaagttcagttgctggtgataacaacctttcttcctttggtttcctttatccactttgctgtcttctgtgcaaagatacctggaagctggaggtaatgagctgtccctactatttcaaagcagcctcccttcccgaagtatatccaggcacaaaacaggagccagcctaggcttttcctggggaggatgcgtccctgagtttaggggacctctagcaggagcacacgtactgggattgttacgttctttgtcttgtccctggtcccatctcgcctctgtgcacccttggaaggaaaagattctaggaggcattctggtgttcgtaaacctccgccatgtttgagtcctggagatgaccatgacatgttaagccttaagtttggtccctgcccagacagcatgctggacttttgcaaggcacattaggggtgcggccactgctttctggctgctgtggctgaatcggcctgaggggaaaatgaaagcaaaaacaagccccagttctactaggaaacccaaactgagcaacttcaggcttatccagctcctgggaagaccaggaagcaactgaggagcggtgcaccgagacggacagggtcgggggttaaccccctgccgctaatatttccgctccaaagggagcctctcctttcttggcaaaatgtagaaacctagattccctcgcaagatccacgcgaccagcgtcggccacgctgtacttcctggggtccccttgtttagtgattcttcgttatggccgcccgtgtgccttcgactcaatcgggaggacaccgaaatccagatttcggggttgcagggcgcgggccccggcttggttagggcaggggcagccattttgagaccagaagagggcggaagggaccatattgagaacgccggttgcctgggggccgccattttaagagaagccctgtacggtaaactccgtgacgtgggggctgccatgttggtacggccatcttggaatgggagtggctgtgggcgcagccatcttaggtataaaatcggctccagtcgcggtaactgaagccaagctccgcccctaccctcctaagagttcctctgctgtacgactgcactcccgcaccctcccctaaatcccccctcttcggcctgtttaccttttaacttggcttcgttgcacgtttgtgtgtgtgtgtttgctcttcgcagcctcttgagcgtcttttgtacttaattcttacactgtggacgctctctcgcgcccgccatcccccgacccctctgatctccgatccttgacgatgtctagcctgcattgattggcccttttccctgggtatggcagatctattgcttgatgatcctctccccccaagaattctaacacaggagctgtcctgaggctctggatgactttattcttcaaatggctttaccctcccagtagctccaggtgagactgagagcaagaacctggcccatccctctccattgtctgagcaggtcaccgagggaagcgggcaggacgcgctggcagagtctgacggggccctgctgtgggtggagcaaagggtgcctcatatctctggggtgcttggggtcggccacaaaggtggtaggaaatggggtcgacagataggtgagggtgggccttgtgcttcagataacctcacatggtcaggcaagggttagggatgggatgcaaggagcctaaggggctcacaacaattactgacctaaggaagggcccaggagagggaaaagggaggagttgtgagaagggacaggggagctcagaggagagcacagaagaacttcttctcccggaaggggttctccgaagtgggcacaggggtgatgaggggatcctcacaggcgtgggcatcacagtaagtcatcaggtctgctgctgccttggacacctgggacacagccaggaagggtattgttagccaggacctctgaaggggactgcagcctccctccccaaatgggttctcttttgccatctccagggctccttacgacttgtcttctccctcatcccccccagaggcctggggacagctctctctacagagccccagactcctcccctgacctcagggagtgaaggaaagaacgcatctcttatcttgagctttgggaacctgcagcacagcacagcctggccaactaatgggagccagccagggtcccacctacctttatccgacacaagctggcttcaatcttaagctgttccaccatcttgcgtgcttgcccaatactcatagtgctgttcaccggggtctcacctttcatcctggaaaaaagagggacctctcagagcacagtctcagctggaggcccccctccatgctcactccacaccaacctttacaaggctgtggtcataccccaatattttgttcccctcctatcctcctcctcctcctccagtggactgtctcatccctgtattcctcatggaaaaaaatagggtgggatgaggtgctccccaaactccctcatggcctgggccacagatcattaaaccttacacaaatgatttaaggcttttcagcccttcaaaccatgtgtgttcccagctctgaagacctcaaccaaccctgatgaggagggcacatcacccctgtctgctccagtgagccccaacaggagaaaaacaggccattacttacctgaagccacaagcggcagtagcagccctgggtgtagggtcagtggagggtaccaaaaccttctgcctgaaatgggtgccccacccagtagggagttgcagctgaaagtatctgatgcagaagcagtgactatacgaaaggaggcccctggggagggccaggccagaggtctggtctcagtttctgcagctcaagcactgtctggatggctggtacctgaaggatgaaggatgctagaaggagctgctcagatcctggagcataccaactgcctggccagtgggggagcctagctgcctgcatccctgcgcacacccccactgtcgctagttcactgcctgcccctcccccattgcaggcatcctgactctgggctagagacctccccaacagagctgaggccaaggccgactccccctctcaaatggcgtggtctgggcctatgacggcccctgcagtggagtctgtactggctgcgggggaccctgctcatttgaaaatctgacatcagctgggcagtcgcccccctcctcctttcctccctctactctgacacagcacttagcacctgaatcttcgtttctctcccagggaccctccattttccatatccaggaaaatgtgatgcgccacaggtatcagcgtctggatcgccacttcacgttttagccacaagtgactcagtggaagatccagagtcaacagaggctcgtcaggaagatgtctacagaaaaggtagaccaaaaggaggaagctggggaaaaagaggtgtgcggagaccagatcaaaggaccggacaaagaggaggtaggggcccttgtggggacagtcagcagaaatatactggaaataggtgggctggcgtgaagggggcggggggatggattggttttaagaatttcattcattttgaatagattacttcccacgcccgcagcagtgtgcaaagatgtacacaacactggccttgcctctgaaggactttatctggggtgattagacgtctacaaaatagaagactgccaaaagctagtctagataatgtgctgtggggactctgagggagagtgtatccagttagggtcagaggaggtccacaatgctaccacgctgggaacagggcactaatctgcctgcgcaacaacgcaagaggcccaggttgccgcaaactgcaacatgctctaggcgaatgcccccgccttagatgcctacaggtcctaggagctgtgggcgataaaaatcagcgccagctggatgaccgcctcactcggccgcttcgcgggtgaaatggcctgtggtgaaggtgtgcacggagggctgtgattgcagtctcaagggagagccgagcggaggctgcagtcagcgcatcccctggggcacatcttggggcctgcagggaggcaggcgtctttcccctttggtcacggtaaccggagggaaacctgccgcagagagagccagtggcgagcgcaaggagacagcgacctcgcagctcgggaaggctccgccccgtcccgccccgccccgccgtgctggaccccgccctgggctgaagccccgcctcccacggctacaaaagcggccggcggagaggggcgggacttccccgggagccggaagtcccgtctcacggttgccctggcagcgcgcgaggctggtgagtcggcagccctgtggcagccggcgggctggtttccatggttgcacgattaggtaggggctccgggcgctttgcccacccccgagctggaggggactggcgggaagcggcggttggctgcagggcgctccgccgggcgtggggtgtagccgtgtcggtgagcgagctctgctcgaggcggagaggagaaactcgggaagcaattgtggctactctaaggctactggtttcgagtcaggccgtgcgaccttaggcaagtcgcacattctctccgtgcagctgcctagcagtgtggattcagtatcaccgtgtgtgtaaagctctttctaagaatcgtaaggtgcttattctttgttatatagctgtgaatgagaatcaaggtggtttgtcccagcatcaaatgactggagaaggaattccactgaggagatttagcactgggcgggagggaacacagtggaggaaagggaaggggtaattggcagagtggcacaatcatttggagaaaggccatatatatgaaacaatgactttgctatcctgctatctctcgttcctcaaagccagtccagtaagctgttttgtccccacctccctggggaaaggagtcactcttttccctcaccctctctttccaggaaccaccagctgctgcatcccatggccaggggtggcgtccaggtggcagagcagctaggaacgcaaggcctgaacctggggccagacaccctgctctcccggccatggtcaacgaccctccagtacctgccttactgtgggcccaggaggtgggccaagtcttggcaggccgtgcccgcaggctgctgctgcagtttggggtgctcttctgcaccatcctccttttgctctgggtgtctgtcttcctctatggctccttctactattcctatatgccgacagtcagccacctcagccctgtgcatttctactacaggtgagaggggccttctatcaaaatagaggactcctatgggaattgtaaggcccttggagttcattcagttcaatc

SEQ ID NO: 5348 - DNA, 6000 bp, Homo sapiens
aagccctgcctagagcccagtgacctagaggcttccttctaaactggactgttagtagggaatctggttgatatgagtttggggcctagagaatacttttatacttttttttttctttaaacattagtcaactgtagtagtaaggaggagagaaagattagaacaaggagtttaagcacttaaaaaatcccaactctatcctttctctgcagcaccctcatcacatgtgtggattctgggattctcagagtctggcatgacaaggacaaggacacatcctctgacccagtgaggctcccctgccctgatggttgggggaggtgggctggggtaggtgcctaatgatcacgctggggaagggaggattaaggactctggaacggactcttatctcctattctttacagctcctggaactgagagtgggccctggggtgtgtaggatgcgccaagacccagcacacccccatgtggttgccacaggtgggaaagagaatgctttgaagatatgggacctgcagggctctgaggaacctgtgttcagggccaagaacgtgagtgacaagagtgtgaaggagctgttcctgaagtcgagggaggctgaggccactgacgatgcattagagactagatggacttagggggcgaaggagggctgaaaacaggggcacatcgagccccccatagccctgtcctccatctgcccaccccaccaggtgcggaatgactggctggacttgcgggttcccatctgggaccaggacatacagtttctcccaggatcacagaagcttgtcacctgcacagggtaccaccaggtaaggtgtcacctcacacctgccttctcctgggataaagcagcctcctggagaaatggcccccacggtttgacacaactgctcttctcaccattctgagttcagaggagcaagcgcttccccgtctgttccaaccctgtccctgagcccatgaccttcctctactgtattctagggtggagtttcctgaactatgcctgttttcctcccacctggaagagaggaaaggagagtggatccccttcactgtgggaattatagggtgcaggtgtcagaggacattgggctgggtgttaagagaactgggttctggtcctgatgcagcctctctgatttgctttgggacccaggcctgagcctcccatctctggcctcagctcctcagctttacaggaagggcccgaatggggaatctttatggtttgtctcatttgaggtcttgagacacgggcggggctgggtcactgtatttgtcctattttctttgcttctgcacattgaagtctgatcttggtcatatgcctctgctcaaaacacatatgagggcatcctctttcctccttcattcaggctaacccctgcttgaaatttagcacctactgactactagaccaacttgcttttctgtccctccatttcccctagatgggagtatggggggatggaatgctcacacacttccaacctaggggacctctcccctcagctctgtccatttatgctgctaagcagctctcctgacaccctgatgctcagagaagaggcatacatctaagatgagaaagtttctgggagtggatcataaataagaaagcagtgtgcagggagggggtgaggatgcagagacgccagagggtaggtgcagggtgaggatacttttgtgatgcttcagccttcctctaggtccgtgtttatgatccagcatccccccagcgccggccagtcctagagaccacctatggagagtacccactaacagccatgaccctcactccgggaggcaagtgagtgtttagaggggaaggggtgggagggtggggcttgagaagggctccaggaggttactgctgatcccacttgcctctggtctcatcctcagctcagtgattgtgggaaacactcatgggcagctggcagaaattgaccttcggcaaggtgagtggactagggtacattgggggaaaggaaggagcagggagaagggtcaggattccctctaaggtggtgcagtggggccagtgaggcctcattcaggtgccagattgcctgggtttaaatcctggtttccctaaaagctgtatgaccttaaactaattatttcaactccctgtgccttagtttcctcacctgcgaaatggaaatattagtagaagctccagtctcagggttttgttgcagattaaatgttgaaatggaaagtgattggaacaggaaacaatgaatggttggttattggccagccagttatcacggatgcttccccccttctctagggcgtctactgggctgtctgaaggggctggcaggcagtgtgcgtgggttgcagtgccacccttcaaagcctctactagcctcctgtggcttggacagagtcttgaggatacacaggatccagaatccacggggtctggagcataaggtaagttgtctctcccacctccaactcatggtcttgtggaggccccgcctcctgtgccctccgttcatgtttctgtctcagcatgcctggctccttaaggtccctcatcttttgcaggtttatctcaagtctcaattgaactgcctcctcttgtcaggcagggacaactgggaggtgagcagttgggcccgggaatgtgggagccaagggcatagatgtgaggacctccctatggagaggaaaaggaggcagctggaatgcagacttgggactatctgtttacctgcctggtcacttaatttctctgagaggcattaacagttaaaatcctgagagggttattgccaacagcatggatggggttgctttctaggagcagggaataaaggtggtggtacccagagggattctttctcagccagggtctccttccctgtgggtttgtccctgtgcccctgactacttttctttttttttttttttttttttttttttaaacttctttttgtggagatggggtctccttatgttgcccagtctggtcgctaagtcctgggctcaagcaatcctcctgccttggtctcccaaagtgctgagattacaggtgggagccaccgtgcccggcccccctgactcctaagctttcttcccactcaccaggatgagccccaagagcctcaagaacccaacaaggtgcccctagaagacacagagacagatgaactttgggcatccttggaggcagctgccaagcggaagctctcgggtttggagcagccccaaggagctctccaaacgagacggagaaagaagaagcggcctgggtccaccagcccctgacgcccctgtgcccactttgtaaataaactgctgaacacccaccatgaccctgagccttttgtgatgggagaaaggaatgaggggtagcttggggtgggggctgcctgagctggggcgacgggatatctgatgtcacaaaagccgggcctggaggcaggcaggctggcgtgggtggcacggagtccagggccacgcggggccatgggctgctgccaagacaaggactttgagatgtctgatgagcagtccaaggaggaagagtctgaggacggcagggaagatgagaccacagacacacaaagagggcccagggagtgtgagagggggcttcccgagggtaggggtgagctcagaggcctcgtcgtcccctcaggcgccgaagatatcgacttgaactccccggaccatccgaatcacaagtcgaacgaaagccttctgattaccgtgctgtggcggcgactatccacgttcggtcgtcggggctcctcgcggccaagcaagaggcaaccagaccagattcggaagcaggagagtccgatccgagaaggcaaccaggaggagccggagaagggatgaccccagacctgctctcagtccgccccaacctccagagaataaaatttctaacgtatacctgcacgaccactctgggggactgggcgcggacaccaccgggcagctggttctttaaggctccttcccggaggcgggcccagccccctgagcgcctgctgtagtactctggggcggggtcacggtggcgccttagccaatgggagggcgggatcgctcttgcgtttgggtgtggggcgtgtctttcgggtcgctgggcttgaaacgcgtgggaccgccccctcgtcactgggggtggggttacgtgtaggtgacgtggccgcttccagtctttggtcgggtttcggcggcttcagtgctcggggaggaggcagtgacggccggtgagattggaagtggcggcggcggcaggcggcagaggggaggtaagattcgctttaagaggggatctggccgccgtgtcagctctggggcagtggttttacgggggcgacgactggcggggggaagggaatcaggggcgagcgggcaagtcctgccggcccggctccgggtgagcgaattccttgccgtccaatcaggaaagcctctgttgagagagacgtcggccttagctaatgagtggttgaagtcttccagaaggcggaccttgggcggggggtgggacttcctgtttcaaataaacacccagaggttttccccctccgcccaccgaagtgtgtcagtctttggaggtccgtcactggccctcccggaggggccgaaggaaaccgcggaaacgaaagggctgggttagggcccggggcagttacacgggccgggccggagtctcaggaccacggggttggctctggccctgtctctgcttcagggtccccggcccgcgctctggccgccagagccaagttggaagaagagtctgaagcgggttcgacttgggacaggggaaaagcggggccctttccgctgctggtccgccccaggatttgcgagcgtcctgggcgcgaaagtccacgagaagtgcagaaggggctcggggatttgttgattggggtggggcgggggagtttgggtaaagaagttgcctggggaatgacactctcccctccacaacagtccgaggttatgcgtctcaatgatcccgcggaaacgctacgggtctaagaacacggatcagggtgtctacctgggtctctcaaagacacaggtcctgtcccctgcaactgctggcagtagcagcagcgacatcgcccctctgccccccccagtgaccctcgtccctccccctcccgacaccatgtcctgccgggatcggacccaggagtttctgtctgcctgcaagtcgctgcagacccgtcaggtaaggacctggagtggaaaaggcgaggagtgagccttactcaaatctaggaaggactgtgctccaccactgttaaccgaagtaattttggggggtacctgatggaactgataggcttggatggggcctgtagggtctgctataagcaacagagaagaggtcggctggctaactaggggcaaggacttagacttttttttgtgaggaatcctttggagggcaggattgctattctggagggagtacttcagagagtacttggctgcaatataattggtgtgaataaggaacaagttctaggaagagcctttagctgagaaacatgcaccttgaattttccaatatacttctaccataagtttgctctgtaaccatgagaaaattagttaatctagttacatattagtttttatctctgtaagattaaggacattttctagataagtaatttgttgtttttgttttgttttgagatctgtttttcaactctgtcaacaggctggagtgtagtggtgtgatgatagctcacttgcagtcttgaactcctagactcaagggatcctctttcctcagcctcctgagcagctgggactacatggatgcaccactcagctaattttaaaattttttcgtacaggcagtgtctcactatgttgcccaggttggtctggacaccacacctggccctagatcagtaatttgtatcaaaatcacttagggttggatgtggtggctcatacctgtaattccagcactttgggaggcctagg

SEQ ID NO: 5349 - DNA, 6000 bp, Homo sapiens
tgtttgggttggcataagtcctcaaaaaacagaggcaggcacagggcatacatcctcaaaaatagaaaagataaatccatttgcattgagccttccagaagtgctggggtctaaaatgtgaaatacacacaaaattgacatttaagcaaactgcgctgacaaatctgtggctgaaaaagctgtggcaaaacaaaaacatagaaaaagagcctcaaaaattgggctgaggccgggcatggtggctcacgcctgtaatcctagcactttgggaagccaaggtgggtggatcacccgaggtcaggagttggagaccagactggccaacgtggcaaaacatcatctctacaatacaaaaatacaaaaattagctgggcgtggtggcaggcgcctgtaatcccagctacttgggaggctgaggcacgagaatcgcttgaacctgggaggtggaggttgcagagagccgagattgcgccattgcactccagcctgggcgacagagagagactctgtctcaaaaaaaaaaaaaaaaaaaaaaaattgggctgtgaggtcatgcagggaattgatttttggtgggtgggtctgcttctgggatgatgtggatgcctcccgtggagaggggaagggttgatgaagtcccagggacctggaagtgtgttctgcagcaatccccctcccagcagagatccgtgaggaggaggtacagacggtggaggatggggtgtttgacatccacttgtaatagatggtgagtcctcccacagctggcaccagagctccccactgagggctgggggggagctggggagtatcagggaaatgggtgctttatccaaatggctccaagccaggtgggctactaccttgttgttaggggggtgtcttcctcacaacctgtttttctcttcccagctgtggttggatcaaggactcattcctgccttggagaaaatacttcaaccagagcagggagcctgggggtgtcggggcaggaggctggggatgggggtgggatatgagggtggcatgcagctgagggcagggccagggctggtgtccctaaggttgtacagactcttgtgaatatttgtattttccagatggaataaaaaggcccgtgtaattaaccttcaccatcagcgcctagaatcccggggggtagggggatggtatactttacaggatgacaatcttgggagctagaactttgtagccagagaaacttgggaggtctggaatctcatgtgtctggagtcttggggaagagaatcttagaagcagaaaaccttggaacataagaatcttggggagggtctaggatcttgaggagaccagatccttggacatctaaaacttgaaactagtaggtctgcacccgagaattgcagggccagtcatgcatacccaaagccttcagcccatggccgaaattcccttgctggacagggggcctttcagcccctgcttggacgcttccagtaacagggccctcactgcaggaatcgtgggagggagaggggcagcacagagttgctggctgtcggggaagggagggagggccctgggcagtccgagggccctgctgggcttgtgcctcagggtgggggctgcactcctccgccttgcagcctcctggcctggtgctgctgccagccggaaggacagtgacttccagaggaaatgcatattgatcctgctttcagcctccggtggtggcttctcccaacccagctcttccctcctgagcctgcagcacggaggttttgggggtcactgctacctaaagaaggctaaggccacttctgaggctggtctgggagtttactaaaggttctgaagctgggccgggctgcccctgggatcaggagactccagacagcagtcctgacaatgggaactacctcctcagtcccccaaactgggaggtgtcccacagcagctgtaggattgtcctaggggtggagacctgagcaccttccactccaaagcacagtatctgtgggcctggcagtggcctcagttcccccatgagtgccccggtcccccaccccagggtttccccacatcacatccatccctgctttgagaccccactccccctggcctgttctttattttgggtcactcccttctctttcctggtcatatctctcctgcaggcctaccctgtgttgggccccccagccctgtctctgcatcgggtgcccccctgcccctccttctgtcctcagccccctccgcccttccccctcttgaggctgtaatatccgtttcacgatttgggggctgagttgctataacaacagacggcgattgtgttgtgaagagcagctcgctcctgtgccgcctgcctcctgtgctgcctccatccctgcagcccagtcggttcctcttggctcctctcgtcactaccctccagttccagtctggcctcttcctggtgtgtgtgtgtgtgtgtgtgtgtgtgtgtgtgtgtgtgtgtatgcatgcatgcatatgtgtgtccaggtctgcctgcccgggatgtgacaagtagcggtcttcatggttgcatgtgtctgaatttggtgtctgagcttcacattgtatgcgcctgtgtgcatgtgtgtgcatggacatgcatgctgtatctgctgtgtttcccctcccccatgtgtccccactggcctttgcacatgggagaagggcatgtgctcagcatatcactcaactgtccacattgggtgggtacctgtgtgtggtgtgtgtgtgtgtggggtgtgtcttgaagtggcaggtcccaaatgcttaggcaatctgaaccttggaccttgcagagaggagagatgtccctgtaggtgggagggacagggagatgcagcagctgcccggtgaccttttctgcccttgatgggcaaagctgggggtagggaaaggagacaagtgctcatacttacctccctccctgcccaggctcctctgtaagggtctgagtctgtctctgtgagccattgcatctgtctgtctatgccctgatgcctggatggacaaggggtgtgtgtgtgtgtgtgtgtgtgtgtgagtgtgaggaggctgcaggaagaggaacagtgggggatgggcaggaaagtgggctgtggggtcagggaggcgatttcgcattcataggccctgacgcagcagttccattctctggctccttcattggctttggtggggatgccctgggggtctctccaaggtcagagtgggccctaagtctgggacctggcttagggatcacccttctcgactcctaggaaaaactccttgcagcctgggtccccctcttaccccttcacaggctggggaaggagtttcccacccggggggttggtgtccgcattaagccactcagtaattgaccactctctttgaagtgcctgggcaggggtccaggatgactgtgggcaggtcccctgggtgcagctgttctgggcatgcattaattgcctggtgtaggtacctgtgtgcacaagtgtgtgtgttcttgggcagtatatgcttcctgtgggtgtgttaccatggtggggcatttctgcaggtgttcttatgtgtctctgggaatgcccagtgttcacagatatgtgtgcatggctgtgagtgccccaatgtccatgcattggtggttgaatgtaagtgttcttgcatgttgcctctggctaaggaagtgccaactaccaccagctgtgcagatcacagaccctgcaacagaaaccagggtcctggagtgagctggcagaatggtctggcacacatacacacacacactctgtctctcactgtctcattcagcagcccagtgaccaacctcggggtatacacactaagtgccagtgtgtgtacacttttattggcggagtgagtgaagggtgtcccccagtcccccacactcatacacatgcacagtgatgcatgtacccttacaggagagacctgcgccccccagcaccactctaactgaaactcatggatgggaggaggagaacagagaagggggctgctgccaggtgccctcagtcaccaggcatgtgcaggcgcaaccctgcccccacacctactcgtacctcggtccagggttccaggcagaactgagagtttggcctcaaactctgggattcccatgaggcaggactgggaaacccccaagttcctaggtctaccccgcccccatctctgcctttccttcccccaccgcctccgtctttatcccagcaaagccccttcctcttcagttctgggggctccaagccaggggccctccggacggtgggaggtgggggccaggctaccgactggaaaaagcccccagcagccatggacccaccgagtcccccttctctaggctcctcgaagcccgggcccgcccctgggggtagccagcagagggcgctgcggcccaggccccgcatcagccctgctctcgcggcgtcccaagtcggggtccacagcctctccttcggcttgtcccagccccgcgctgcgcgaagacctgctggccgtggggggagggtgcgggacccaaggccccgaactaaggggcgaggggcgaggggcgagagtgcttgggttcccggaaaagacactgaggccgggtttggggcccgcctggttgggggcccgggcgcccgagaacctcgagaggctgggaggagcgcgggtgctggggccgggacgcctgggtcccgcgcgagggagggagtgggcctgtggagccgctggactggcggcttctgagcccttgcattggctgcgctgctcgcccgtcagcgcagcgtggtccaatgcgcgcgtctcgggggcgggcactggtgctgatgctgccgtcagtcggtgttgcagggatgcggcggcgggagcagccgccctgactcgcggagcatcctcctcggagaggcaccgcggcggggcgggcgggcgggcggggacgcggcggggagggagagaggcgcgaggcggcagacaccgctagccctggctctgccacccgtcggagacggggcggccctgtagctctgctacccaccctccagcttctggcgccccgagaaccaggtaaaatgggggggggggggcgctgcggcggagacgggcggggggcgggagccgatcgggggaggggagcggatcggagggggcgagggaggcaggacggatgaattggggggcgggggcgccgcgctgagagggctggcccggtgacagcgaggaggcaaagccgctgggggcttgggggtcggaggctcctgtggaaggggcactggccctgagagctgaggagaatggggaggggtgggaggaagggtctttgggggaagggatggagagaggaggggcatccagaggacttagagggggttcttaaaggggggtccccagtctgtgctagccccagaggcttgaagcagcgccgggccagaggagctgttgtgttctggagggtctaaccagcgagaaactgggcttcgtgggaggagaggagagggggctggagaagagagagaagtggagagggaaggaaaggggccaggccaagggcttcgtcctgaggggacccactgaggaccaggctttcctgggggatgggagccaaggggagaagaggttattgggagagagcagaggggaatgtgccaaggtgctccaggcagagatgggtctgtgctggtggagagctgggaaagatggggtctgagggagaggagcggaagcttgcgggggaaggctgggggtgatgagacagggagactgggaaatcagtaggagggggctttgctggggtgggaatgcgctgggggcggtgacagggttctggtcagagagtgctgcagggggagaggaagctgcagggcccttggcttgctcccccacccctaaagaggaagggaccatttctcatgtcccagcctcctcccccagctgaagcagcaatcttccctggggtctttgggttggggtatgagcccttgaacccttgatggg

SEQ ID NO: 5350 - DNA, 6000 bp, Homo sapiens
cttcagggaaggagaggagggcaaggaggtggcagccagaaaggaggtggacagggctgggcgaggtggcagagcaggcagggccaggccaggctgaggagtttggagttcagtccaagggttgtgggaagccggtgaaggatttcacgcaggagagggacatgatagagtcctcatgttaaacggctcctggccaggcacagtggctcacgcctgtaatcccagcactctgggaggccgaggcaggcagatcacgaggtcaggagttcgagaccagcctggccaacatggtgaaaccccgtctctactaaaaatacaaaaattagcagggcatggtggtgtgcacctgtagtccctgctacttgggaggctgaggcaggagaatcatttgaacctgggaggcagaggttgcagtgagctgagatcgcgccactgcactccagccgggagaatggagcaagaccccgtctaaaaaaaaaaagcggggagcaggggaagggcactccacataggggggccaggcagacgcttgtcattccagggctggagatgctgtggggcttggaccaggatggagggcagtggggcagggacaggctgctgggcccgggtctgctggctccaggggcaagagggaggacaagtcgagggctgtggtctaagcgactcgacattagtgccatttaagaaaaataactgggtggatctaggacagatctagaaggaagatgtgaatctgggtcttcccatattaatttcttgttttagttttagttatttatttttatagagatggggtctcgctgtgttgcctaagctggtcttgaactccaggactcaagtgatccacaggcattgagtttccacgccaggccctctttcgttagttttaaaaattcatggtaaaatatacataacaaaattgaccagttttacgtttgtaagtatttgattcagtggcattaagtacatttctaaagttgtgcaaccatcactgccattggctccagaacttcttcatcttcccttacatataatatcccagagtgctaagcatggcatttgaaccgatacccactcaactgtaattgcacacaaacacgccactgctgtcaaactccatccccccccttgtatgatatgatgtcgcagttcagaaatgagacctgaagtctggccacagtggttcatgcctgttatccctgcactttcgaaggctgaggtgggcggattgcttgagcccaggagttcgagaccaaccttgtgagaccttgtctttacaaaaaataaacataaaaaaatagccaggcgtggtgacatgtgcctgtggttccagctacttcggaggctgtgtgggaggaacacttgagcctgggaggttgaggctgcagtaagccgtgatcacactactgcactccagcctgggcaacagaaaaggaccctgtctcaaaaaaaaaaaaaaaaaaaaaaaaaaaaaaaaaaaaaaagaaagaaagaaaggagagagagacttgagagatgacttggggagttggtagcaaaacagtctgtgaaaccacaggtgttgctgagatcagctcagaagccaggggtggagggagtggacaagcttgtggagagaggctgggctttcgactttacccttatgggtagcgcagaaattcccatatttttttgtttgtcaaagtgttgtatgttgaaataatttcagacttacagagatgtaaaaatagtacaaagaagcctcttatacagacactcctaatattaatgtttcatcacgtttgctttctatctctgtataatatatgggccaggcacggtgactcatgccaataatcccagcacgttgggaggcagaggcaggaggatcgcttgagcccaagagtttaagaccagcctggggaacataccgagacccctgtctctacaaaaaataggggaaaaaagccttggctatttataatataactatatatgtttttgtctgaagtattattattattattattttgagacacagtcttgctctgtgacccaggctggagtgcagtggcgcaatctggctcactgcaacctctgccctccaggttcaagccattctcctgcctcagcctcctgagtagctgggattacaggcatgcgccaccacgcctggctaatttttgtattttcagtagagatggggttttaccgtgttggccaggctggtgtcgaactcctgacctcaggtgatccacccgctctggccttccaaagtgctgggattacaggtgtgagccaatgtgcccagccaattttccacaacttttttttttaattatttagacagagtctcgctctgtcgcccaggttggagtgcagtggcgccatctcggctcactgcaagctctgcctcctaggtctgcaccattcttctgcctcaccctcccgagtagctgggactacaggcacccgccaccacgcctggctaattttttgtatttttagtagagatggggtttcaccttgttagccaggatggtctcaatctcctgacctcgtgatccgcccacctcagcctcccaaagtgctgggattacaggcgtgagtcaccgcgccagcccccacaacttttaaatgcttccagctgggtgtcgtggctcatgcctgtaatcccagcactttggaaggccggggtgggtggatcacctgaggtcaggagttcaacaccagcctggccaacgtggtaaaaccccatctctactgaaaatacaaaaattagctgggcgtggtggtgggtgcctgtaatcccagctactcgggaggctgaggcaggagaatcgcttgaacctggggggcagaggttgcagtgagctgattgcgccactgcactccagcctggttgatgagagtgagactccatctcaaaaaaaagaaaaaaatattttttgagacagggtctcactctgttgcccagcctggagtgcagtggtgcagtcagctcactgcttgctcgacctcctgggctcaagcgatcctcctgcctcagcttcctgattagctgggactacaggtgtgtgcgccaccaagccctgatacttttttactttttgtagagacaaggtcttgctgtgttactgaggctggtctcgaactcttgggcttaagtgatcctccttgcctcagcctcccaaagtgttgggattacaggcgtgagccactgtgcccagtgatgaccttgatagcaaaataattttttggcccaagctccaatccaggatcacactagtgatctggttactagtttcctttagtctataataattgtttagctgttctttgtctttcatgatcctgctattattatcctattattttgtcaaataaccctcaatttgggtttggctcatttgatttagattatacatttttggcagaaaaaattgtaaaaatgtataattgcaagcgtgtaatcacatcacactgaaaaattcttcatttgctggttgcggtggctcacacctgtaatcccagcactttgggaggctgaagtgggtggatcacttgagctcaggagttcaagactggcctgggcaacatggacaaaccccatctctaccaaaaatacagtaatcagccaggcgcggtggtgtgtgcctgtggtcccagctacttgggaggttgaggtgagaggatcgccggaccccaggaagttgagggtgtggggagccgagatcgcaccactgcactccaacctgggccacagagtgagactcagtccctcaggctggatgcagtggcacgatctcagctcactgcaacctctacctcccaggctcaagcgattctcctgcctgaacccgggaggcagagcatcctgcaacctggcttccacctccagtccctatacccacagtgtggagccaaatatctggatttgaaactggctctgctgcctaccagccgtgtgaccctgggaaagtcatttagcttctctcagcttcttcaactgtgaaatggaaataataatagtatctccctcaaggcattgttgtagggattggttccacgtggataatgccctaacaggaaatgttcctgtgttatcaccaagtgaagatggctatggagtttggcctggaggcgggggttgagggtggagggtcggaagtcttcccagagcatgcccacagagagagaggggcagtaggcattctggtagaagggaccacccgacccttcagggggcttggagttggggtcagtgtttggtgcgggagcctcctggaaggcctggctgcagggtgccaggacatcctgtcaccagctgccccgccttttcccgctctcccctcctcacgtcagcagcctttctcctaaggcaccctaggatcaggaggaccctgtcctccaaccctctatcccccattcccaggcacctggcgtcctcgcagatcaatcgtgtttgcgagctggggggctgaggagtttgggctcattggctccacggaattcacagaagtgagtggccctacagggtaggggatcgaaaggggttcccaggacagaacggcgcggggctgacgtcgcccctcgcacccgcaggagttcttcaacaagctgcaggagcgcacggtggcctacatcaacgtggacatctcggtgtttggtatgtgggtggtggggcaggaaaggggaggagacggcgggacgactgggtgggtaaaagaaggggctggggcccaaatagtctttctcccctcctcccacagccaacgctacccttagggtgcaggggacgccccctgtccagagcgtcgtcttctctgcaaccaaagaggtggaagggggcaggccgggcggggctgaactagctggggcgggccgcgtgcggcggacggggccgctacgggtgggcggggctggggagtggtactctctagatctgctggggctggactgaggctggggcaagcctcgtaaggactggaccacgggtgggcaggagaccggtggagaacccgccctgttgttggggctggggagggccgcgcaccgagactaaattctccttccggccagatccgctcaccaggccctggcgacctgagcatctacgacaactggatccggtacttcaaccgcagcagcccggtgtacggcctggtccccaggtaagcccagggacagaagggggcccggagcgaggcggtccggcccagcgctctttatcccggcccccttccttcccgcagcttgggttctctgggtgctggcagcgactatgcacccttcgttcacttcctgggcatctcctccatggacattgcctatacctatgaccgggtgagcaggcgcccctccgtccctgcctcggtaccttgctgcatgcgccccctcctctctttgtggctgttctcatacagactgaaccctgcacctttactcattgctacctctgccaagtttcttaaaaaaaaacacacacacacacagaaatacacacacacgttttatatagacgaagtcctgctttgttgccaggctggtcttgaactcctgggctcaaaccatcctcccgcctcagcctcctaaagtgctgagattacaggtgtgagccttggtgcccggcctctgccaagtttaaccttttcaagcacctctttatgctcatctatgttattttatcaaatgtaagatactactgattataagatgtgccgttatgttatgcaatattcaggaaaggaaaaaaaaccaccgcttccaaccagttgtaagatggcattgcctgtgagaagcattctgtttccaaagatcttaaaatgtaggggcgggggtgggaggggggaagttaatctcagcatcgattaactcagaccattggcgtgagcgttggcatgaaggtaaaaacaagacaaggggtgcagagtgcccagctggcacctccctgtttgatgctccaaaaagtatgttctccacctcacagccacagcgattcttggtagtagagctggg

SEQ ID NO: 5351 - DNA, 6000 bp, Homo sapiens
catataatctcatttgaatttcacagctatgttaaacaagctcattttacaaatgagagcgaggacccaacctggccagtaaactagtgacagagcctctgacttctgtgagttttccacatctgaatgtaccttattatttcttagtcgatacataaattatctttaatgaaaaagaagacaagccagagctacttctccagggctggggtcccaggagggtgtggaagaggagatgcgggtgggacccacctcgggctcccacggaggacacgctgcttcggtgggatcgctcagcggggccgggctgcccggcactgccttctgtcccgtccatctgcaaaggcaaagagaaacagcagttaccgggagccagggatggggggctggaggtctcctcaagctctcggtgagtacggtaagggatcccaggctgggtccgcaaggttgagcggcgctgcctggaggggccaagagtgcagaccgggcgctggtgggaggggtgcgggttgctacggtcaagaaccgggggtcgacctggatgcccaggcagggcaaggcgcacgcccagccggggacggaggcccgggccagacgtcgctgtgctctcacctcgcagggtcgcagagcccgccacctgagaggcaaggctcctgcctggaatcctgccccgccgccaagcccgccaccgcccgcactcgggctcccgctaaggacgcagctgaccgggaagcgacgcggaagccacggcgggaggaagcgcggcgcccgaggccccgcccccttcgacccgggggagccaatgggagcccagggccgccccgcgcggcccgcgcatgcccggacgccagcctcgcgtgtctcatcacgcccgtggggtggccgcgtcacgtaccagccccgccaccaccagagtgacccagagcgagtttcccttcacaaaggccccgactgttggcctgtaagagggtttggcgaagattcgagaatcaggctaggggcgttggcctgcccacgctgggtcttcgggctagttccctgcctgtgaaatggacacttcctggcacgtgccagggatccatgcggcgctggcagcggcctgtaccgtggcgctctcggcagtggtcaggagaatgagtcctggcccagactcatcctggacaagtcccttctcctctgggcctcagttttcctcatctgtaaaatgaggtggttgaactgaatgacccccaaggactatccctactctctaaatgattattaatatatgtctatgtcggccgggcgcggtggctcacgcctgtaatcccagcactttgggaggccgaggcgggcggatcacgaggtcaggagatccagaccatcctggctaacacgatgaaaccccgtctctactaaaaatacaaaaaattagccgggcgaggtggcgggcgcctgtagtcccagctacgcgggaaggctgaggcaggagaatggtgtgaaccccagggggcggagcctgcagtgagccgagatcacaccactgcactctagcctgggcgacggcgagactccgtctgaaaaaaaaaaaaaatttatatatatatgtctaaatcagaaaaccaggacagacactctgtttttccagggagcagtgacatgagcccttactatcttacacaacagcctgggagaccttgaggttttcccaggctgggaggagacttggggccccaaagaggcaggtgtgaaaccacctaccctcagggccatgtcactgacatgtcctggtaatgcaacatgtgtgcatctgagatgtggaactcagggagaaaaataagtccatggggcaccttctggggccagaggaaccagaagttgtcccaagtgacagcagtgggcttggtgatcaggaacagagggcagtgggttcactttgccctggttccctgggattggaaagcagctctagctcctgacccagtccagccttctttggtatgtgaaccagctctgcctgccctcctatgatccacactgccccacagctgagcccatgacatcacatttgccttgccaatgtgacttaaggacttgaggaagctcagatgtgggctgcagggaagggtgtccagtgggggcaggcatctccttcctggttctcagctctgggaccctcagaccaggacacactgtatctccatggcctcttgacccagctggagtgaagcaggagcagaagagttcagtgttgttttgaatgcttactggatgcggggcttgtgctaggtcaggggatggagactgaggggagacgtggccctgccctcagaaagtgtctgttgtggtttaattggtgagttaaggaagaggggaaagagaaagaagcccaggagaacagcacatttaaaaccacagcactttgggaggccgaggcaggaggatcgcctgaggccaggagttcaagaccagcctggggaacatagtgagacgccatctgtaaaaaacccaaaaattagccaggtgtggtggcacacatctgtggtcctagccattcaggagcctgaggtgggaggatcgctggagcccaggagtgtgagctcacagtgagctctgatagcgccatcctgccactgtattccagcctggacaacagtgagactctgtctccaaaaaaataaataaaaccacagaagatgacagcattgccttaagaactatgaaatgctacaggcaggaaaagtctctgctcacttgctgtgtgtggggcactgggccaggccctttcccctgtttcctgtgtcattctcatgcgtcctgagagtggaaataagtattagcagttgccatttacgtgccagccactttttaaagtgctttaatccttagaactcactaagaggtgagtatcacatctctgttttatgtcaaagactgacacctgggagtgtctgcggtggtggtggggaggctagaacccgggtctagtcaaggaggggcactgggagagagtccgggaggctgatggtggggaaggaaaggcattccaggtagtgggaactgcacgagcatggttaggaccccaggaaagacccccgctgtgtgagagcatagcaggtgggtggcaccatgggggaggccttgaaccccaggatgacagatatggggcaggcgtgttagacagtaagaacattttggaggttgtgagctagagattcacaagatgacgccatgcttaggtgggcttcccttcagcaaggctgtagggaagtgggaatgagggtctttctcaaactggggtgaggcggtgagattggaaaagagaatgagacccattctgaagtgagggaggaggcggcctccagcctttagagctgagaggcttagacatcaattagcccgactgctgtcctactttggcaaacaataatagaccccaaggcccacagaagaggttgctcaacatcactgagagagataatgtaaccgcccattgggttcaccttaccctctgcctagacagagccaatttgtcaagacaggggaattgcaataaggagagtttaattcatgcagagctggctgtacgagagacaggagggttttttttttgtttgtttgtttgttttttttttttgagacggagtctcgctctgttgcccaggctggagtatagtggcatgatcttggctcactgcaacagctgcctctcgggttcaagcgattctcctgcctcagcatcccaagtagctgggactacaggcgcccgtcatcacacccggctaatttttgtatttttggtagagatggggtttcactatgttggtcaggctggtctcgaactcctgacctcaggtggtccttccgcctcggcctcccaaagtgctgggattacaggcgtgagccactgcgcctggcctgtatcagttatagtttttgcaaaggcagtttcaggaataagaagcagaaccaggactgcagcccaagccaccacgagaggccagtctttggggatggtcttttaggatgatctttgggggtggcccaaggagccccaggcagctccagaggcaggaggtaggaggtcctgtttcccgaatctgtccacccgggagaaagcagcaggggtgggtgggttctgccttggccacagtgagaggagaagggagagaaggactgggccttgggcgtcccccatgggagactaggagctgcggggagatctggaggggagggtgcaggtgtcactgggccttgatgtttcccagggccgtttggtgatgggaagagggaactggagccccaggctgccgctgatgctgctggctgacatttccgttcattcagtcactcaggatttattgagagcccaccctgtgccacccgctgtgcacagaacacccagagatccctgtccagacagacaagttcttcccatcgtatgttggcgtgataactgtgatggagaaagagaggaagagccagcagtgcctccggctggggaggcggggcagacctcacccaggtggtgacatttgagccccagctggaggggtgccagggcaagagtgcccaggaagagggaagagccagtccacaggcctggagacagaaggctgactgaagaagagtctggaggctcgggtggctgcagcagagaaagcaagggggtgggtggcaggacgtgaggtcagaggagaatgggcggcaccctgtggctcacagatccttgaaagggttttggttttgactgagcagaatggtgccattgcagatcaacacgcactttaaataatcaaaacccctatctttcccctgggaaggaggaagccgaggaaggctgtgtttctgactcacacgggggagtcgggggagtcgtaaacaaccctgaagagaacagccaggcctggtgagtcactcctgggagtggctcctccccaccctgccacgcagcggcaaatgcgggctgggcctaccccctggtggccacgctacctccgcacccggcctctctctgtggcatgggggcggccatgccccttggtggagatgaatgggagtggagctgggctggctgggcaggcaggggcttgcctcttgctgactaaggcagccctggaggggcccgaccatggggcaggaacccagttgccatcctcagagcgaggatcattggccgggctcggggatcagggcctctgtggtcccggcacgcctggcccgtgagactgtactctgcacgactcctccaggtggccagggtcaccggaactggctcgctctcctctgccagttgccggaggtctgggcaccaggccaattctcaccttcccgccagggttaaacattagtgggaggttatcagcgtgggccaggggagggagaggggggaattcaactctgtctcctctgctggagccaccagttcccgcaagcccagacaatgccggtggaggaatttgtggctggctggatctctggtgagacatttttcttccttctgtcacatcacacccaatggtaggtcacttcctcgggaagatgggtgacatgggaggagcagagaccaaagtctgagttccggcctggcgggaggatcacttgagcccaggagtttgagaccagtctgggcaacatagggaggcccctgtctctacaaaaaaatcaaaataattagctgggcatggtggctcacacctgtagtcccagctacttaggaggattgcttgagctcaggagttcaaggctgcagtgagctatgactgcaccactgcactccagcctgggtgacagaatgagaccctgccacaaaaaaaaaaaaaaaaaaaaaaaaagaatcagggcatggtggctcacacctgtaatcccagcactttgcgaggctgaggtaggaggatcacttggggccaggagtttgagaccagcctgggcaacataggaagaccctgtctttataagaaatgagaggctgggcgcggtggctcatgcctgtaagcccagcactttgggaggctgaggtag

SEQ ID NO: 5352 - DNA, 6000 bp, Homo sapiens
gccgagatcgcaccattacactccagcctgggcaacaaaagtgaaactccatctcaaaaaacaaaacaaaacaggaaagcgcagagtcagagtccgggagcagcaactgcagccagtgcctcccgttcctcatccctcccacggtctagggatgaggatgagggggctgaagagccagaaggataacagggtgagcatcacagacggagggaggccaaagcctgacttgtgaggtcaagggctgggcagcagcattaacacccgttactgctgcctttgttctaagtgggtccttgggctggggacctcccctataggagttcaggctgagaactggtgaccaagaccagagaagggtgtgaagagctggctttctagggttccatggggtgggagacaggacagctataatcctgggatttattcacttacatgctcactactgcgtttcttttttttgtttgtttttttgagacggagtctcgctctgtcgcccaggctggagtgcagtggtgcgatctcggctcactggaacctccacctcctgggttcacgccattctcctgcctcggcctcccgagtagctgggactacaggcacccgccaccacgcccggctaattttttgtattttttagtagagacagggtttcaccatgttagccaggatggtcttgatctcttgacctcgtgatccgctcgcctcggcctcccaaagtgctgggattacaggcgtgagccaccacgcccggcctaccatgtttctttattaggattcctcccagagtcgtgaggccacactttgtcaccctgcccagagagtaaaccaaggggcttctctatctgaaaagcatgctgctgcctttattgaaatgcagtggacagaccatccccagagtggtgcctggccctgtggttctagagcccagttatgggccccagccagtcttgtcctgtgtgtgactgatagttaaggctccatgtcagccctcagaggtggaggtcccagtgtgggcctcttgtgatggtaggggatgtgggaggccacggggaaaaggaactggaggtgtggggcccagtggccttccctttgatcctctcctcccttcccttgaactagagctcctgaggccaggaggtttgggtctgtttttggtcagtgctgtgtccctggctagcaccacagcatctgcttcacagtggccactcagtaaacattgtttgttttgttttgctttgtttttttgagacagagtctcactctgtcgcccagcctggagtgcagtgtcacgatctcggctcaccgcaacctctgcctcccgggttccagcaattctcctgcctcagcctcccaagtaactagggctacaggtgtgcaccaccatgctggggtaatctttttgtatttttagtagagacagggtttcaccatgttggtcaggctggtctcaaactcctgacctcaagcaatccacctgccttggcctcccaaagtgctgggattacaggcgtgagccactgcacccggccgagaaaacatttgttgagtgaatcaatgaacttcctccacccactcactcatttgttcattcaactgcctactctgcagatcccagctggtacccagtaagggctgggccatgggcacaggggcctcactgcctgagaggagctccctgcttggtaggagggagacactgatccagtggtgtctgggaccttgaaagggacccagtgcagagcaggcgaaggcagggaaagtcactgggggtgcagaggacgagggaggcattctgaggaggcaactccaagtggaaggctcactcgggctggatagtgcaaagatggaggttcaggtctaggttgtgcaccagctgtgcactaagtcatcccccctgggcctcatgtcttcatctctaattggcaatgacaattctcaggctgaggcttgagtggaagatacttagtggagcacccaccactgtggctggcacagagtgggtgtttgcagggcgggtccttaatgctctaatatggggcaaggagcccagcgagtcttgaagtccgtgggacatgagtgcaagtcccatccttcacctgggacaagtctctcagcctccctatctgtgaaatggggtgatagcagcacccctttcctgcctttttttatatttcctttttttgagacagagtcttgctctgttgcccaggctggagtgcagtggcacgatcttggcttactgcaaactccacctctccggttcaagtgattctcctgcctcagcctcctgagtagctgggactacaggcgttcgcccccatagcccgctaatttttgtgtttttagtagagatggggttttgtcatgttggccaagttggtctggaattcctgaccttaggtgatccacccaccttggcctcctaaagtgctgggattacgggcgtgagccaccgtgcctggcctattgtggtattattacatactataaaactcacatttttttttttgagacagagtctcactttgtcgtccaggctggagtgcagtggcgcgatctcggctcactgcaagctccacctcccaggttcacgccgttctccagcctcagcctcccgattagctgggactacaggcgcctgccaccacgccaggctaatttgtttagtagagatggggtttcactgtcttagccaggatggtcttgatctcctaacctcatgatccacccgcctcggcctcccaaagaaaattcacttttttgaagtgtacaattcagtgggtttttgtatgtttgcatagttgtgtgaccatcactactatctagtgttagaatattttcattatcccaaagaaaacccagaccccattagcagacactccccattccccaccttcctctggcaaccattaatctactttctgtttttctgggtttgcctattctggttatttcatataaatggaatacgtgggccaggcacggtggctcacgcctgtaatccaagcactttgggaggccagggtgggtggatcacctgaggtcgggagttcgagaccagcctgaccaatatggtgaaaccccatctcggctaaaaatacaaaattagccaggtgtggtggcaggcacctgtaatcccagccattccggagcctgaggtaggagaattgcttgaacccaggaggcagagattgtggtgagctgagatcatgccattgcactccagcctgggcaacaagagcgaaactccatctaaaaaaaataaaaaataaatggaatatgtggctttttgtgtctggcttctttcacttcacatagtagtttcaagaattcacctatattggccgggcgcggtggctcacgcctgtaatcccagcactttgggaggccaaggtaggcggatcacaaggtcaggagattgagaccatcctggctaacacggtgaaaccccatctctactaaaaatacaaaaaattagccgggcctggtggcgggtgcctgtagtcccagctactcaggaggctgaggcaggagaatggcgtgaacccaggaagcggagctggcagtgagccgagatggcgccactgcactccagcctgggcgacagagcaagactccgtctcaattaaaaaaaaaaaaaaaaaaaagaattcacctatattgtggcatgcatcagtacttcattagtttttatggctgaataatgttcgactgtgtggatgtactgcatcttgttattcatcagttgacggcttttgtgttgtttctgcatttggctcttatatatagtgcagctataaacgctgcgtacagatttgtgtgtgtgtacatatcttttcaattatcctaggtatgtatacctaggagtgaaattgtcaggtcatgtgataacattttgaggaactgccagaccattgtccaccaacagtgcatgagggctccagtttctccgtatctttgccaacacttgttactgtctttctcgttttaaagagctattattattattactatttttgagatggagtctcgctctgtcgcccaggctggagtgcaatggcacaatctcggctcattgcaacaactgcctcccgggtttaagagattattctgcctcagactcccgagtagctgggattagaggcacgtgccactacaccagctaatttctttgtgtttttgtaaagacagggtttcaccatgttggccaggctggtcttgaactcctgaccttgtgatctgcccaccttggcctcccaaagtgttggggttacaggcgtgagccaccgcgtcgggcctattattattattattattttaagatggagtctccctctgtcacccatggagtgcagcagtgtgatctgggctctctgcaacctccacctcccgagttcaggtgattctcctgcctcaggctcctgagtagctgcgactacaggcacgcgccaccacgcctggctaatttttatatttttagtagagacggggtttcaccatgttgtccagactggtctcgaactcctgacctcaggtgatccacctgcctcggcctctcaaagtgctgggattacaggcttgagccaccgcgtccggcccctaaagagctattatttaaccttctgccccagcagctgggagggatggtggtggcagagtggcgaggagcgggcactgcgcagttcacctgagccccaggcgctcgccgcgggacccaccagcacgtcccctcctcggcagactccctccccggggtcacgtggagggcgactgcggggataagcagggatggcaaggggaaaggaagggcgggccccaggcgggggatccccggacacgcagtgctttcccgcctggccccgcccaaagacgtgggcaaacagaggccacgcccttcctgggagccagccccgcccatactccgccccaaggacacgcccccacttcgggcggaggcggaaaccgggcgggggacgctggtgcgaggaggtcgaggaggcgccttggcacccgactctggcatcccgcacgtccgacatcagccctgccctccttctcaggggcttccattcattttgtgccaaaagggaactgccgccctcgcccccaaacttgtagctttgtggatggagggtgtgggggaggccgtgtgtagtgaaaggaccacccggctgaagacggtcctgggggtggagggcaggagggagcgagaaggacagttctgctcctgggagcctctcgttcctgggcgagggtctggggaccctggatgaagttttaggatcttttacaatgacggtctggggcagagaataaaattttgcagggagcagattgagggtctggaggactgggttaggtgggctctaggtacccaggacgatctcgggaggcgcacaatgagaatctgggggctccaggattacggtgtgggtgcacaggatgaaattctgggggcgcagattaggtaggacctaggtgagcaggatgacatttttggtgagcgtctgggggcccccgggtgagtctgggggcctggcatcaaggtcggggccccaggatcgagcactgggggaccctggtccggcgccgggaggcggctcctggcggcgccgcgggggaccgggtaggggcctgtggctggccgggggcggagaagcggggggtcggggtccctccccctggcgctggctcaggaatccgccgaagggcgggcggaggcgccggggtgggccgcgccgcggcaggcgggcgggcggggggcgcttcctggggccgcgcgtccagggagctgtgccgtccgcccgtccgtctgcccgcaggcattgcccgagccagccgagccgccagagccgcgggccgcgggggtgtcgcgggcccaagtgagtggctgtgaccgtccgtgggggagggcgtgggccggagtctcggccgagtccgcggcagcgtagcgcccacagaggcccgcgctcctcggccttcgccgcaggggcgcggggc

SEQ ID NO: 5353 - DNA, 6000 bp, Homo sapiens
acaaacattagcttaaaattggtcatgtaaaacacaaagctatataaaacacttaaactgtacataactatataaaactcctagaagataacataggagaaaacctagatcatcttggatatagtgataactttttagatacaactccaaaggcacaaggcatgaaataagtagtataggttggacttcgttaaaattaaaaacttctgccctgcgaaagacactgttgagagaatgaagagaaaagccacagactggataaaatattttcaacacacacatcagataacagactgttatccaaaatatacaaaaaagggccaggcatggtggctcacatctgtaatcccagcactttgggaggccgaggcaggtggatcacctgcggtcaggagttcaagaccagcctggccaacacggtgaaaccccatctctactgcaaatacacaaaatcagctgggcatggtgacgtgcacctgtaatcccagctactggtgaggctgaggcagagaatcacttgaacccgggaggcagaggttgcagtgagccgagattgagccattgcactccagcctgggcgacagagtgagactccgtctcaaaaaaatacaaaaattaacaaataaataaataaataaaacaagatatcgctgcacacttattagactggctaaactctaaaacattaacaccaagtgcccacaaaaatgtggagcatcaagaattgtttcattgttgctgggaacaaaaaatggtacaggcactttggaagatagtttggcagtttcttaccaaactaaacagtcttaccatatgacctagcaatggtgctcctcggcatttaacccaaataaattgaaaacttatgtccacacaaaaacctccacacaattgtgtatagcatctttatttgtgatcaccaaaacatggaagccaccaagacgtcttgaaataggtaaatggataaacaaaccatggcaattcatacaatggagtattatttagcaataaaaataaatgtgttgcctgggcgcggtggcttatgcctgtaatcccagcactttgggaggtcgagacaggcagatcacttgaggccaggagttcgagaccagcctggtcaacatggggaaaccctgtctttgctaaaaatacaaaaattagctgggcatggtggcaggcacctgtaatcccagctacttggtaggctgaggcagaagaatcacttgaacctgggaggcagaggttgcagtgagctgagatcatgccactggactccagtctaggcgacaagagtgaaactccatctcaaaaatttaaaaaattaaaaaaaaaagaaatgaattatcatgccaagaaaagacatgcaggatccttaagcacacatataaatgaaagaagccaggttgggcccagtagcttatgcctgtaatctcagcactttgggaggctgaggccggtggatcacttgaggtcaggagttcgagaccagcctggccaacatggtgaaaccctgtctctactaaaaatacaaaaattagccaggtgtggtggctcgcacctgtaatcccagctactcgggaggctgaggcaggagaatcgcttgaacctgggaggtggaggttgcagtgagccgagatcacgccattgcactccagcctgggcaacaaaagcaaaactccatctcaaataataataataataataatcatcatcatcatcatcatcatcatcatcatcatcatcaatgttgaatgaaattcagtacacaggtttaacattagattaagtacaacctaaaaataaaatctattatttattttttaaaaccatgttgataatttttctgagcctagactctaaatcctttttacatttagacaaaatgtattatttgcaaggcttgaatatacacagcattcttcagtaacacagctactgtctgtgttgacggacagctgccctttgacttctttggaacttgaccaggacttggtcacatttaagaaaatcacatcctagcataaagaaaagacaaatatttaaggtgatggacatctcagttgtcctagtttgatctttacacattatatgaatagattaaattatcacatacaccctgaaaatatgtacatctattatgtatcaaaaaaataaataaatagggccaggagcggtggctcacgcctgtaatcccagcactttgggaggccgaggcaggtggatcacgaggtcagcagttcgagatcagcctaaccaacatggtaaaaccctgtctccactaaaaatacaaaaaaattagctgggcgtggtggtgggcgcctgtaatctcagcaatttgggatgctgaggcaggagaattgcttgaaaccggaaggtggagtttgcagtgagccaagattgcaccactgcactgtagcctgggcaataagagcaaaactctgtcttaaaaaataataataataagtaaaataaaataaaataaataaaaataaaatttaaaacataaatgaggaaaaaagtttttttttaggccgggcactgtggctcacgcctgtaatcccagcactttaggaggctgaggtgggtggatcacgaggtcaggagttcaagactagcatggccaagatggtgaaaccccatctttactaaaaaatacaaaaattagccgggcatagtggcttgtgcctgtaatcccagctactaggggaggctgaggcaggagaatcacttgaacctgggaggcagaggttgcagtgagctgagattgcgccagtgcactctagcctaggtgacagagcaagactgtgtctcaaaaaaaaaattgtttttttttttaaagaaaagaggctgggtttagtggcttatgcctgtaattacagcactttaggaggctgagacgggcagatcacctgaggtcaggagctcgagaccagcctggccaacatggcgaaatcctgtctctactaaaaatacaaaaattagccaggcatcatggcacacgcctgtaatcccagctactcaggaggctgaggcaggagaatcgtgtgagcccaggaggcagaggttgtagtgagccaagatcctgccactgcactctggcctgggcaacagagagagactccgtctgaaaaaaaaaaaaaaaagaaaaaaaaagagaaaaagaaaagaaaaaaaaaggtaagaaaagaaaagaaaatcctggcaaactagtgggtctctgagtggccagtttcactgcatgcctgtatcgcatgtgagtttgtagccgtggattcactgcagttttagaaagaagggcaagcatttgacagcttcatgtaccatgaatattaacacattcacacacaccatgttattactaaataatttcccttatgattcatctgcagtaaaatcaggatattatctcgacatcaaatgttattgtgtataggtaggttttgttttatatgagtttcattgcaggatagtaacaaaatatttattacaaggacgatggaatcggctccagctgaccgtctgtgctttgaaatgaaatctgaactccttaatcagccctcagacttgccataaccagcctggctgttgtagaggctctgtcccctcctcccaccaatgccagccaaagggatctatttgtatgtcccagaatgtgtcagcactctcttgtcccttgtcttgggacaggctgttctctccctgaaatgccctcatcctctcccttcactgtctcaacaaattcagtgctccctagcctccattctcaagtccttccttcacaacctgtgccatagctgtgctgcaccagcggcctcgcttttctttaaataactcattttccataaataaattgatttttcaaagaaaagttgatatcataatcataaataggaaaccagtatgagtagccctgaaaataaagttgctataaaaataaatataagaaaaatacaagttaataacttttgataaaattgtcagcagaccctctgaggctaactgaggggaagggatgggaaggcagattaagaagtgttagcaacctgttaacacccttgacatattcagaggcttgaaagaaaatgggaagaataactttctctttcggtgtaatttaatgctgtctctgttctccctaaaatcacctgcattttactgcaaccacccatttatcactcaacggcgctagatgctgccagtaaaccaatggaccagataagcacagcctctgcccctacagactctcagtcggctggaggaaaaacataagcaacctgggaatggctataaaatgtcattgcttaagaaaatagtttgtggccgggcgtggtggctcacgcctgtaatagcaacattttgggaggccgatgcgggcggatcacctgaggtcaagagttcgagaccagcctggtcaaaagatgagttcgagactagactggccacctcttcagtagagctggtgaagccccgtttctactaaaaatacaaaaattaaccggacgtggtggcatgcgcctgtagtcccagctactcctgaggctgaggcaccagaatcgcttgaacctgcctgggagggggaggttgcagtgagccaagatcacgccactgcacttccgcctgggcgacagagcgacactcagtctcaaaaaaactagtttgtgttttggagcctctcacttctccagcgtccccgatacgcccggggattgcagagaacccacacctattcgtagattatgagagtaggagcaaattaatgatttatagtcttttcaaatttttttttttaacagaaaaagagtagggagttgaaagtaatgctgtttttttccaggcactcccggggacccagcgcggcgaagcccgccaggatcgcgggcgacctgtggcagctctggttcccccgcccgggcccggctcgggttacgctctgggcggggactccgcagcggctccctagttagggggcgccccggtgggttccagctttaggggtcgcaggagcggctctggcatcacctcggagctgacgaagcgggaagagccccgcaccagtgctgcccctacagagctctcggcggggggtggaggtgaggttacacctcgtccctacccccgccttcccctccgccgcagggatccgggacccgcccccgcggagaggacggggggctgcggggaggggctgtgcggggagcgggcgggttccgcaggcccctaggtggggcggggcccgagccagagtcgagtccctgaggcgggtgggggaaggagagacgggtggcgcgaccctctgtccccgcctcggggcggagcccaggtcccagcctgcggagcgcgagacacgccgaaatccgcccgaggctacctgtgcgactccagccgccctgcaccggaatctggggagacccgccccccgccccaccggtctgcggccctccgccccagcgcaggtgcaggtgcggcttctctgcccctttcaccccaggcgcatccgccgcggcggccatggcgcgaggagacgccccgcgggacaggtgagtgggcccgggtgcgttgcaagtggccgggggcgttgcagacccgctccctgaaggcgctccgaggctcagagaagaccggatcgaactacaattcccatcagccgactccctcggccgccggaaccggggtgatcggggttgtagtccgctccggagggggtggcctgggaggcgggagggcctgcggaggcgggtgcgtcctcggggtgaccttcccaccgatccccacagctaccacctggtcgggatcagcttcttcatcctggggctgggcaccctccttccctggaacttcttcatcaccgccatcccggtgagactcctggcggcgtggcagcctcgtggccacagccagcacccctccctccagccctttggatgaagcttagcgggcgcttcctcaccgcgcacctgtgacccctcgttgagctcattatgggctgaagctcggagaggg

SEQ ID NO: 5354 - DNA, 6000 bp, Homo sapiens
gttggcattgtcagtgctgtgtttggggtaaatataatagttttctactttgtcttacatgaggtacaaactaaaagtatgttataaagatttgtctatataagaaaactagggtcaggcatggtggctcacgcctgtaatcccaacattttgggaggccgaggcgggtggatcacctgaggtcaggagttcaagaccagcccagccaacatggtgaaactctgtctctactaaaaatacaaaaattagctgggcgtggtggcaggtacctgtaatcccagctgctcgggaggctgaggcagaagaatcgcttgaacccgggaggtggaggttgcaatgagcccagatcatgccattgcactccagcctgggcaacaagagtgaaactcggtctcaaaaaaaaaaaaaagagaagaagaagaaagaaaactaggtggagtgtggtggcttgcacctataatcccagcactttgggaggccgaggtgggtggatctattgaggctaggagttcaagatcaacctgccaacatgacgaaaccccacctctactaaaaatacaaaaaattagcacggcgtggtgtgtgtgcctgtaatcctagctacttggaaggctgaggcaggaatcgcttgaacctggggggcagaggttgcagtgagccaagatcttgccactgcactccaggctgggcgacacagcacaactctatctcaaaaaaaaaaagaaaaaacaaaagaaaactaatatatcaaaataatttctagttagttggattcactcacttattcattcaatgacttattgaattatcatatattactagtgctttttaatacataccttctacaatttttcaactgaaaattacttcattgatcagggctctttaaactgatctccatttgcattgttttactaactatagttattattcatgtattagcactctgagcctactgtaatgatgtgtaccttaataaagaactgaatatttgtaatggctggcagtgaatttagtagttcttgaatttagagctcaaaatatgggagtaatttgctgctttatttcctttgagaggtaatagaggaaaaacagaatctaataacaatcacagattttcgggaaagcactgtaaaaccatatgatcaattctagcttcttatgtaaacatggaaagattgccagctgaacacctgtcatgctctaagaagttggggagaatttgcatttttagaactgtgagcaaaatgagaacgactgctatgttcatgctttgtgaatttagctttatttcattcacacaattcatgggaaaaaatgcatcttttaactcggtgtttttcaattcaacttttaaaatacaggagtgggccagacccggtggctcacacctgtaatctcatcactttgggaggccgaggcaggtggaccacaaggtcaagagatagacaccatcctggccaacatggtgaaaccccatctccactaaaaatacaaaaattagctgggcatgttggcacgtacctgtaatcccagctactcgggagactgaggcaggagaatcgcttgaacctgggagatggaggttacagtaagccgagatcgcgccactgcactccagcctggcgacagagcaagactccatctcaaaaaaaaaaaaaaaaaaaaaaaaaaaaaaaaaaaaaaaccaggatgtgttaccaaggaaaattcatttacaatggttaattatgtgacaaacatgtcaagtaattccatctggctttgtgtcaccatttccccacccttttttcagaaaccaaaaccaagaagaagaacaaacatcaaaatggacatggaaattaacaaatatatgattcaatttaatctcctaagaggttttttaaaattattttattttgagacggagtcttgctctgtcgccaggctggagtgcagtggcaggatctcagctcactgcaacctccatctcccaggttcaagcgattctcctgcttcagcctcccaagtagctggaactacaggcaagcaccaccacacccagctaatgtttgtatttttggtagagatggggtttcaccatgttggccaggatggtctcgatctcttgacctcatgatccacccgccttggcctcccaaagtgctgggattacaggtattttttattttttttgagacagggtcaccctgtcacccaggctggagtgtagtggcacaatcatggctcactgcagcctcaacctcccaggctcaggtgatcctccatgtcagcctcccaagtagctggaactataggcgtgcaacaccatgcccagctaatttttgtattttttgtagagacagggatttgccatgttggccaggctggtcttcaactcctggcctcaagtgatccacccgtctcaacctcccaaactgctaggattacaggtgtgagccaccgtgccccatctcatctgctaagtgggtttaaagaaattcagtttcatgtcaatttttaaaatgtatggttatcaaattcgacttctttttaaaaatgcaatcagataactgtatgcttgtttgatgaggggaggaaagttaatatagccaatctactcaatatttttagcagaaattatcagagactaaggaaatgtttaagtttttctcatgttggttttaattacctaatgttttcagttttctctttcattcttgtgtctttttttcattttcagtgtttcaaatacagtttgtatttaaagatttagaagttccaaaactgtaagcacagtggattgtttcctgggatgatgttaaaattatacaacaaaatatatgaaactttgtcaatttggttattggcacatacaaaatatttacaaataaacgtgtgtgtgtgtgcgtgtacacacaattcaatgaaatagatgtgaaacaagttttcttttttttttttttgagacagagtcttgctctgtcgcccaggctggagtgcaatgtcgcagtctcagctcactgcaacctctgcctcccgggttcaagcgattctcctgcctcagcctcccgagtagctgggactacaggcacctaccaccactcccagctaatttttgtgtttttagtagagacagggtttcaccatgttagccaggctagtctccaactcctgacctcaggtgatctgcccgcctcagcctcccaaagtgctgggattgcaggcgtgagccacctcacctggctacaagttttcaaaatacatttatctgtacccatacattctccagtttgtccacaggacatcttatgacttgagcaagctgctaaaaatccaagggtgcagcgtttgtatgtctataggattgctcagatctgcccccaccctgaaagaatttaagagaatttcttgaggccaggcacagtggctcacacctgtaattccagtactgtgagagtccgaggtcagaggactgcttgaggccaggagttcaagagcagcctggacaacatagggagacctgtcactacaaagaataaataaattagccaggcttagtggctcatccctgtggtcccagctactagggaggcagaagtaggactgcttgtcccaggaggtcaagactgcagtgagctgagacccagccacctgcattccagcctgggcaacaaaaagagaccctgtctcaaaaaataagttaaataaataaataataaaaatagtttaaaccctaaacacatcttctttttcaaagaggacttcttaaggacttcatgctgcgtcctgttgatctccacttccctttttcagcgtccacacttttaacagtctcttttgccaaggataataagtatatagtttctggaatccagattcttccctgtttggacagccagggggacaatttttggtctgcaggcctttgcatctgttctgctgttgctcagcaatctcacagcaaatttgccgagcctctccggaatgcacagccagacagagctcagcgcaaaagctagagaacctggcggagggagactcacagtgccacaaaaaaactttatcttttctttttttttttcttttctttctttctctttctttcttgtctttctgtctttcctctctctctctctgtctttctttcctctctttctttcttttttcctacatggcaagatctcctcatggcagaaataatctgccttgacttctgtttccacgctgcttctgccaggaccatgcgctcggcgtgtttttctttccgctataattatccaggcccatcccagctctggtcccctcagctgttccctggcagtcccttctgctggtgaaaacacatatggcgccggcctgaccagggtgtaagtgtgtgaatatcaggaagatgactgaacgtctttgggactccgtttcctcattgtaaaatggaggttaataccagccttcttctactccccaaacgcacgtgtttgtcccggccagagggcccaattgttggctgttcacgcgtcagttacccccacaggacgggtcagccaattaaaggcgaaccaggcccggtccatctcctgacgccttttctcatcccagggctggacaggcagctggcctgggcccggctctgccttgtcacgtgcgggggccggcccgtttgcttgtctgtgtgtaggagcgtgaggtcacgctgggtgctcccgccccgccggggcctttagtgtcctggtccctaaacgccaggccgctccaccgggggagaaggcgcgaaccccagccgagcccaacggctgttgtcggttgccgggccacctgttgctgcagttctgattggttccttcccccgacaacgcggcggctgtaaccaatcgacagcgaggccggtcgcgaggccccagtcccgccctgcaggagccagccgcgcgctcgctcgcaggagggtgggtagtttgcccagcgtaggggggctgggcccataaaagaggaagtgcacttaagacacggccccgctggacgctgttagaaaccgtcctggctgggaaggcaagaggtgtgtgactggacaagacttgtttctggcggtcagtcttgccatcctcacagaggttggcggcccgagagagtgtgaggcagaggcggggagtggcaagggagtgaccatctcggggaacgaaggagtaaacgcggtgatgggacgcacggaaacgggagtggagaaagtcatggagagaaccctaggcggggcggtccccgcggaaaggcggctgctccagggtctccgcacccaagtaggagctggcaggcccggccccgccccgcaggccccaccccgggccccgcccccgaggcttaagccgcgccgccgcctgcgcggagccccactgcgaagcccagctgcgcgcgccttgggattgactgtccacgctcgcccggctcgtccgacgcgccctccgccagccgacagacacagccgcacgcactgccgtgttctccctgcggctcggtgagcctggccccagccctgcgccctttgcgccccccacgcttgttctgcgtgcgctgcccgctcttccatttaccttctctcccacccaagtttgtactcttttctttctctcggttttattttttgtttttgtttgtttgtttgagacaggctttcgctctgtctcccaggctggagtgcagtggcgcgatctcggctcactgcagcctccacctcccaggttcaagcgatccgcctgccgagtagctgggattacaggcgcccgccaccacgcctggctaatttttgtgttttgtagagatggggtttcgccatgttggccaggctggcctcgaactgctgagctcaagcaatccgcccgcctcggcctcacaaagtcctagaattttaggcatgagcctccgggtccggcctgtgctaatcctttctgtccttggttctttatttctcttctctctttttcttagtcccttttgttctttccctctcccgttcagttggctgtcgtttga

SEQ ID NO: 5355 - DNA, 6000 bp, Homo sapiens
tttggctggagccaccggctctgcggagctgacttgcccattccctctacacctcactgtgtccttcaccctgtctgacctagtcccgggaaacctggtgactcccaaaagcatcttctgctgccagtaacataggtcgaggctgggagtcgggagacttgagttctagtttacaggctgtgtaaacccgggcagtcatccctcagctctgcgccttgtgctcgcttttcctgggccaccatttgtaaaacgggcctcctgctcctgttgcctgcataccccatgggacagaaggggaaagggggattggacctcagagtctcttatctcgaaaataaatgagtttagttcttgcgtgaaagcccaccagagtatccctcctaaaatcctctccactaatttgcatatagggaaactgatgccccaggggagatgatttacctaaggttacaacagagaccaaacagaattagaacccaagtttcctcagtcctagcccagggctctctccacttcacctacaaaggcatgttgtaaacgtgtgagctcctccttatttccttgcatccgtccactttgtctgttcctgatggaggaagacccatgctgggggcctagaagctgctttcagattttcttgactccttgagatgataaccatcaccttctccatccctcactcagtctatacgtctcaaagcacatccataaacttaatgtgcgagtgctcaaaataccttctaagagggaagcaagacaagaaactccatcttactgatgaggaaaatgaggcctagagggatatagacttagagtgataaagttacttaaccaaaacgcacggctagacgtgttggcctagtaggggcaggaacccaggtctcctgattccccctctgatgtgttctccaccagctacaggactacagaatggtacccctcaatgataagggactgcgggaatgatcatagagggtaggaaacaggaaggcttctggagaaggtgaggttcctgggaatcaagaagaataataagaacctcctggctgcttctgaggctaggagacctggagtgggaaaggagacacagagatggttgttcttggtaatatggggggaaaggaaagatgtggagacagaaaaggaaaacagtgtgaccagcctgcctgataattatcttgtatgtttgcaatttctaaaacattcccatctcttgtctcctctagttctcatgtgtggtaggcagggcagggatcattatccccatcttatagatgaggttcagaggaagtaaatgcagtgctcaaggacacagagccaagcatacagccaagattagaatcatgaaaggaacacttgaacggcaagatcacaggctgagggactggggagttggactgtgtgtgtgtgtgcagtgggtgggtgtatgtggccacaccctgggtaggtacacagggaagagggttgcaaagccattgctggtgttttgaggccaagaatgtttgccctttggattgaatggggtccaggtgcagggagcatctgggcttccaaagaaggcttagaattcttcctcctctgactcaccccacctgactgagatggcttcttttctttgagccatcccttccccagaccaaatgaaatctgttttgccctgccctggaggttgctttttaaatattgtaaactgttttcatgaatgtatgtgcgtgtgccagagcgggggaatgctcttagagaagaggcattgattcatttattcttgaatgcctgctaggtatcagggctgggaaataaagaaatgtatgaggcacaggaccctgccctcttaccttaaagcgcacagttacacacatacacatacacacacacacatacacacacacacacacacacacagagtttcagtacagtatagtgctctaataagccttcgtgcaaagcacttttgggaaaaaacaagagggagagactaactggctagggagtgaggaaggaggagtcccaggagaaggtctgcagagatgaattggagttgggtcttgaaggatgagtaggagtttgccaggcaggtaaaaagaggaagggcattcttgtttaagaaaacagcatgagcaaaggcaagagatgtgcaagtgcaaggaatatttggagagtggcctgtacttcagtgtcatgggtgcaggccactgaaaagagctgtggggagatgaggccagtgtcagagtcacatttcaaggagcttcagtggtaatcagaagagtttagagtctgccctactggcagaagggaacttatagtggaaaggtctgtggaggggaagtcaagatacttggtttctggctccaactctgccactactgagctgtgagaccttaagcaggtgattcccttggggaggagggtctattttcccactggttgaatgagggggttgcaccaacaacatgatcatgaagatctcttccagctcagattctattcctttgtccttccaactggatgctaagggctactccttcaactcctctcccactccaccagctctccaatccacaggagtggtaagaccaccaaggggacagtggtaaaactgtgcaccccaggaactgtctttggatcacctacctgctttatgtgactttttctacctacctctctgtacttcatttccagacactgaagacgctcattctgaaagagtagctgaaacggagtgacgggaaagaaagacccaagggtagagtttcacttttccccagagcaacctgaatgaaaaccccactaagatccccagttcatccctcagatcacagctttattccccaacttccaagttaggggttggacaagtgtaaggcaagtgcagtttgtgagaacctgtgaatgtatgggaaatagcaggaacagagagtgaacctggctcatctggggaatcaggagtaggtctggagcagtggggtgcatggaagatgagagcataaacgaagtctaactcctcctcccaagcttaccaacctccatctcactggatcattgactaagattggcgagaatctgtggtgcatgaaaaggccatagtgacgaagttagaggagatgatgccccatgacactaacaggctgtgtctggtgtgatgtgaagcttaggtgtgaggaaacactgccatttgtagtggaaagagcacctgaacagtagcccaaacacctgggttcttgtctgagtgctgccatttatgggccatgtcattttggactagtcacttctcccttctgagcctcagtttcctcatctacgaaatggaggggttggcctggaatctagattctagatgatccttaaagtccctctcagcttggccatctgctcaccttccttcctcactggcctatcttctatttcaaggcaagacctctccagggcaggagctccatctcccccatccaaggatctcagtaatcagggactctcctggacagggaagccaaggagctcagaaacagtggcaaaactcccctgttgctgactgccagtccccagcttgagccccagaggcagccccagagccccatagagaaccaacttgtgccttcatcagctttctgcctctcctaacgcagacaggaggccctggcaccccagccttccctcccatacaaacccagcacctagagatgtggaactatggcccctttcctcctcctgtcagaagcacaaacatcctagtctattcagagagaccctgaggcatgaaaggtctcatgaatctttattcccctcatggaaccctgcctcaaagcccaccctaccctccacactgtccccttcccccaccttctgcagagtctatcccctcctcaggctagatcatcctggcaggtgagctgtgaagaggaaaaatgagtaaatctctcagtttggctcgactgggatattagatgtcagtcagtcccagggctcagaagcatcttaacctgtgaggaagaggtccacagccttctctatcttgggatttgagaagctctagaaagcccccaaaatgcctctcccatcagcctctccaacttcccatggtctcacagcatggtttcatgattcgtatcatcacaggacgttagaaccaactgagaccccttcattttacagatgcggacagaagctgaggcccagaaaagggaagtcttatgtccaaagtcacacaaggagcagctgagctgggacaactcccctggtttccatttccttcaccgtaaagtgagggcatatagcctagatgggctctgaaggcccttccagccttgctctacaaaaacaaccaccgtatgtgcagtgtctagtgccaagcactacatgatgttctttaattttcacaacaaagctatgctacagatagtgttcattctgtgaccgtgttcatatcctgtctatctgaatagattgggtggtaacacatcatttgttcctatgtaaaatatcaacccagctgccagttggcattctcccactcatgtcaattcccttgggattcgaaaaggaccttgctaaggtaacccttaggaaagggaatgttttaggctgcaccatcagctggtccctgagtgggagtccacattttaaacaggtttctcatgaagtcacccagtgaagacactgtaagtctggaggtaggggacagcaatcagaggccctttggtcactgcacagttcctttaactgcaaccctaggctggcctgacccagctgctgcaggaaggggaggggccatgggagggggtcagagcccacagcaggactgttgcataatccttggggcctggccttgggcaatccaccctggttctgaagtttgtgctttgtgtctggttccttccttttctgccttctctcctgctttctagctctgggctttcccagctccgaagtcaatactgagatcccagatgtgtccagagacatcctgaagaggctcgggggtggaggagccttagtgtgtccacaaagggactcctgaaactgactgagagccagtggatttgccagcagtctggtgagtcttccagattgagatttccctccctctccctgtcagttaaaacccctttccaatgatacctaagaaaactgaatggtaactgccctgccctgggatggagcttgggacgactaggagctttcaccttcactgtatgtgctgcgtccattctttttttttttttttaaacctatgtgtacatatttgcttcttgaaaataaaaaaaaagtttttaatcctcttctacataatacaagtatatgctcatagcaagccttgaaggaggagggaaaggatgatcatctttctttgtggggttttttgtttgtttgtttgtttgttttttgagacagaggtcttgctttcctgcccaggctggagtgcagtggtgtgatctcggctcactgcaacttccacctcctgagttcaagcggttctcctgcctcagcctcctgagcagctgggaatacaggcgtgtacccggctaatttttgtatttttagtagagacggggtttctccacgttggccaggctggtctcgaactcctgacctcaggtgacccactggcctcagcctcccaaagtaccgggattaaaggagtgaggcaccacagctggcctattttttaaaattgtgcttaaaacacacacacacacacacacacacacacacacaaaacataaaaatataccatcttagtcattcttgagtgtacactcagtagtgttaactagattcaccttgttgtgcagcagatccccagaatctcctcatcttgtaaaattgaaactctatacctaccatacaacaactccatgataatgtcttttggtagatgaggaaaccaaagcccacccagggaaaggaacttatttccttcagagtaggctcatcaagacacttacactgtttgtttgttgtctacctatgaaattgcctgaggccccttcctccttcaaccct

SEQ ID NO: 5356 - DNA, 6000 bp, Homo sapiens
ccatccccccaactcccttggggcctctgggagcctccagtcccttcagtcacagtagtcactgacgggactctgaaccaggagcctttcgtgtggtggctgcggggtatatggggtctcaccagcacctgcttcccctgccttggtaacgctaagtgctgccatgagggggtgccttgtgcctccatcaagaacagaaaacccgcagagtaagtcctcattctctggccacgaatgaggacttggagcctgaggacttggatgggcatgcccactgtgtctgctgtgtgaccaccagcaagtcatagagtccctgcaggcttcatctctcttctgtaaaaggggggcagagataggcctcccctcgtcagatggctatgggcaggggataagtaaagaacctggccccaggcctggtcctgcaagcccttgatattcccactcaagagaccagctactccccaccactgggccattcataacatcctcctgcccctccaggaggtggcctagagctggtgtggcctgagtccatttgccctagggagaaagggaggggagtcaggggaagaactggggaacccagggttctgccctagaaggcagggcccagaaggggctcgtgagggaactcccagactctcaggggcccatgtgggtgctgggcagaagcagggagtgaggacagccacatctctgcactgagacctggcctgaaaatcagaagacctcggttcaattactggctccatagctgtgctgtgtgactttaggcagttgcttaacctctctgagcctggtcagtaattgagaataaaggtctctgagtttcctggtcagtcattgagaataaagacacctaactggaaggctgtctatggctgtctttactctcatttgccacatgagatgaaggactgacccacagtgagggttcagcaaacagcagtggagactaaattgtcagtctagggtgccatggtcctttccactctggctctacagttagatcaggacagcaaggctcagagagttttagcagcttgtccaaggtcacacaggatgtgcacatcatcacctttctgggccacttgctcctgcgtaggaccctcaggtttcaatctggcctgaggtgaaatcctcccagggagctttgagcctgacttggtgcccgagtgggttttttcattacagaatggtagtcccgaggacacaggaagagatgcatctcttatattttcactgacaatgcatgaaggaatggaagcatttccacaaaaatatcaacaccatgaagactgagctgtctgctgatgggctgcccaggagaactccccatttctggaggtgtgccagcagaagctaagtgacactggatgggaagttggacttggtggcctttaaaagaccctccacatggctgcaaggcaagcctgagtctgctcagtttccacccactcctcctcctgcagactcaagctctgcctcctagacttggccttcaaggcctctggactcaatcatcctctgtgctctcatctgtctctcatctggcctgggagctccaaaaaagtaggcattgggcatttttattcagcaactgtcctgggcccaccagaggagagaggtcatgtttactgagcaaaggcccccgcgaccaggaacttcacacgtgtcattacaggccatcctcatacacccggtactgtaattagtttcactttgcaggtcagcaaaccaaggtcaggaaggctgagcaacctgccaaaagtcacacaacaacatgactgccaaagaagtgaagagatgaaggaaggggcgctgagcctgtgggcttcccggcttttagcccctggtccccagaggcatctgcagcaggtgggcacgcttggttgcccatctgcctcaaatgtgggggagccccatccgggcactgagtaaggtggaaccccacgagctgactaaccacaaccacagcctctgggggcgggggagtgggaggtggggcactcacccccagcccaccatagccccagccccgccctcctgggccctagcagaagctctgccatggcccagtgatttctgcttggtagcagctccgggaagggtgaggcagtgctcagcgagcctgggtctggatggctgggagctggtctgatacacaaggccaggaactgcccgaatgatccagtcactctgctcatactgcagggcagcttcaaagcactttcctgaacatttggccccttggacagggacctggaaaaggaagcccacaggatataggagtatccaccaactgccacaataaaggcagtgagaagttgcctaacaaccactgggtgcaggctccagctggatccattgcacttagttctagcaccaactccaagtagtagctactatctttcccactttacagataggggcactgaggttccatttgaccaaatggagcactagagaccagagagggggctggatggaccagctaggaccctgtggacatagatctgaggccttgggtggctgggagggaagggaaagaggtttggatacccttcgcaggccctgctgagagattccttacctgcacctcctgcccatcccctcactgcagctcaggcctcctccttagggaagccttccctgatttcctcttctaagactaggtcaggcccctatggcacctgctatcatggcttgtcctctctgggttgaccccatctccccagatccatctccacagtggactgaacaggggtaagaaaaggcagtaactgtagagacttcagggaatcccgcttctgagcccagccttaccctgatttgccacaaggccctgggtggtcactttcatgcatgtaaaatggggcaccctgccccactctcagggctggtgacgatcagggaagagaaacactgtggaagaggccccttctacacttggaaccaggacctggaggacagccagggcccctctcttctagggacccgcatactagagtccacaggcagcaaggcagggtacctgtgatttggtagggtcaaggcatctagaagagaggtggctttgggaaagatctgcttcaacctccaatctaaatgacaataccgccaccccatatttgcacagtactttaaaaattcgggcaagataatgcccaaactgaatcagacttagctttatgaacagattgggctcaaatcactgattcttattagctgtgttgactttggacacgccatttaaccttttctgagcctcaggttccccagctataaatagggaccttactagtctcagacaattggttttcatgtgtacacactgcccccacccctagcctcagcttctccatccgaaaacaggactttgatggtgccgtttcacaggctgttgaagggtcccgcagatgatggaggagtacgggtccagacactagagcacaatccggagaggaaaagtgacctgccaggacccaccagagtggacggcttggtgcggggaaccccctccgcggccgccccagggccagcgaagggtcatttccttccgcattcagccccgccgtcacctcgcctgtttgcccccgcgttaagtgcggcggcgccagcagctgggaaatcggggccaggccggatttcctctgtggacctgcggctcctagagccaccgcgcccccctccggaccccgcggggccgcgaactgcacgtgcggcggccgctgggatgggcctcgctcccacggcgcttcctctgcaacccctctccctcccgccctctcatccccccacactgggcccccgccccttcccggccgaggtcccagggtggtgaagatgcttcgccgccccaccccactccgcccccgccggctccggataaaccgaggcacggggccaggcgctaggaccccacggcctcgccagaggggggcgtggcggggcgggccggcgggagaggtatttaaattgcagccggagcgcgggggctccggtggggcagctgagcggcctgctcctcctcgggccgtgaccccggggtctggcgcggggtgggacccgggggcgggtttgcgcaaaatgtgccgagactgcccgggagaggagctgcggccgcgctgagccaggtaggagccgccgggcaggcgaggctggccggccctcggggggcgcactgtcgcgcgcctctagcgagcgcaaggcgggggctggtcccaagggacgccccccaaacactcccctcccgccatccccactgcgcgcgtggagccggggctgaccctccctcggtccctgggagttccccagcgctcctgtcttggcggatctttcccgcaaaggggtgaggccggccttcccatttgacagctgggaaaacaatggcctgaagaccgtgacttgcccaggaacacacagctaggcaagggcaaaccggaatttgaattcaggtttcctgcaacgctccgatcccagccaggcgtggggctgcccatcccacagcactagatggcctgcccatttctcgtagtggggtagggggcacccaccgctctccaaggggctctgaacccagccttcttcatgggtggtaagatgtgaggggcccccacccccacgccgagctgcctgaaattccgccatcacagccacattcctttgggttaaggtctaattcccccgtgggatgcacatgtctccagaacgaggcttgcccttagtgattcactgcttgacaggaacgtccgcagcagctctcccaggaccccactctgccagtaagtcagctgaggccgagaggagggagagaggacctcagaggccagactgtgagctagtctgccctgctcctgcgtgtgaggggtcgttggcagggcttagggaaggagaccttgatttggtatagtgggaacatttgctttggagacagatgaactggattctgatcgtgaccctgctattttctccttgtgtgactttgggtaagtcacttctctgagcctccttttcttcatgggcaaaaaaaagacagttctattgggggcagtcggctcagcatgtgctggagaaaacacagtattcaggtcatgtagaactggataaatcccagctccaaagcccttatgagctgggtaactctgggggtaagtcacttcactttccggaaactgttttctcatccgtaaaatgggaattacagtaatttcctcaataggtgattgtgagaattaaatgagatgatataggtcaagtgcttagaagactaacatccttaaatgtaggggtgggcttattgtggtagtagtcattgccccccgtacccctgctctttctctctcactctctctctctctctcacacacacacacacacacacacacacacacacacacacacattctttggcacttttctgagttggactcctgagagtccgactctcctgcctcctcttgcccaggccacttgtctgcaggcttggggcctccccactgagcacacctcacctgggatgctcagccctgcgagggtcactgtgtcagctgggaaggacagtgaggatgcagggcaccttcgccaccattctttgcctgatcatcacaatagttggggttggccagtggcagaactggaacccagctgcctaccctgcagacaggacactggggcaccaagaaaggaagggacttaccttagggagcagagctggtgagtggtgggctttggatgcaagcctgggtctaagtgacaccgtcctcctttttgagagagagtagtctttaaatgctacaccctgtacttgggcaccactgaggagggcccacagctgaggggcccttcccgtcagatgccaggacagagtgcccatgtgctgcagggacgatcccttctggatgtgcacagggccaccttggggatagagtggggtttggcagaggaaggggaaataagggcctaggacccttccttgtcctcacctggcactcaccactc

SEQ ID NO: 5357 - DNA, 6000 bp, Homo sapiens; identical to SEQ ID NO: 3216

SEQ ID NO: 5358 - DNA, 6000 bp, Homo sapiens
gattgcttgaagccaggagttcaggaccagcctgggcaacaaagtgagaccctgtctcaaaaaaaaaaaaaaaaaaaaaaaacttagccaggcgtgtggtcccagctactcaggaggctgaggccagaggactgcctgaagccaggatttcaagtcttcagtgagccatgatcataacattagactgtctataagaataaataaataaatatatacctacatacataaagatttccttattagctcctcatgtttgtaggattgtaggattggcagggatgtcatcttcctccatcttgattttgataatttgtttctcctaatcagtcttgctagagtgtcatcaattttattgatattctcaaagaaccagctttcattttcattggttttcctctatcttctgtgctgttattttttatttcctttcatttgcctactttgggtttaatttgctatattttttttctcgtgaaagatggaagctgaagtcagtaatttgacactaccttcttttcaaatataagcgtgtagtgatatgtatgtttccttaattactgctttaagggaatccagcaaattcaatatattgtagtttatgttcattcagttcaaaatatattctcatttttaatttttttctttaaccagtgagctatttggaattgtgtcatttattttcttaatattttgagagtttccagagattgttctgttattgattttcaacttagtcctattatagccagagattatatttcctgtgacgtgaatctttttaaatttatgaaaatttgatttcaagttaaaaatatgttctatcttggtaaatactatttgagcacttaaaaatgtgtacattttgctgttgtggagtaaaatattctataaaggtttattagctcaaattggtgcctagttttatacaagtcttctctatctttacagattttctatttgttctattaattatttaaaggtgttgatatcttcaattataattgtggatttatctatttctacttgctgccttgatcttcccagcaaaccaattctgtcttctcaacgcaacaagtccattggccacaactggattcctcctttctggaatatggcctggaagttaaaggctataagaattagaaatcacagggcccaccttgtttgtttcttttctctctgtgttcattgttttttgtctcatgtgcattcttgaaacccattctttcctacattgtgtccttttgtttggttattttaggtgggaatgcaaatccaggccctgttactctatttttactggaagtgcaattgtcatgaagttaaatttaaaccattcaccagcagaaagcactcaacgtatggtagtcccaccatacaaaggtaccgttaggtattctgaggtctgcagtctaagttagagcatcgtgacatatttagatgtgatagacatgtagcctagtgactgcgtgtttaatggaaaaaaaatggtagcaattacttatcaagcatcgtgctaacaggaagaaaatacatatgctccacttgtgggcagagacagttgcacactgagtgatagtagaaaagaaacagaggattgacataatattacatttatctttgtgttctctatttctagcacagttcttggcacatagtagagctcaataaatgtttgttaaactgagtcaaattgaactaagttaaatatttgataaggtaaatattggatttatagtggaccccacttgaacttagaaagtaggaagtttagaacttatgaaagtgggcaggaatacaaaacacgtaatatttgcttaatgaaaaataataagtaatataacctaaatgattgagccacctagggcctccaaacgtatatcaatgtgcctatttcaaacagtgaggaataaacacatagaacttatcacctcaagaggtttaagaagattttcactgaatttatgaacatgaattatctgtgagttggttaaaggtaatattggttagcatcaagaataggaagctattagttttcaatcaagaataagctcaaatttggtctaaatcttaattttaagctgggtaatcattgatttacaatttttttcttggtgtcacatttcttccaaaacaataatcaatgaagcctttcccaccctgtgcctttgctgtacctttcctttctcagaattccccctatatctgtataactaaatactaccctaacaacagactctagcaaagtgctaaatcttccatgagcctgccctaatgtccaccatggatataatctcttctttttcattgctttctaaatagtttatgctacctcttttatggtacttacacgtttttaaatttgcctttttgttatttgtgctgatttaccatcccttctgttagattctccttaaaggtagaggcaacatctgatgtattcatttgtccaaagtactaccaaaaattatagcacggctgggtgtgtggctcatgcctgtaatcccagcactttgggaggctgaggcaggtggatcacgaggtcaggagatcaagaccatcctggctaacatggcgaaacaccatctctactaaaaatacaaaacaattagctgggcatggtggcgggtgcctgtagtcccagctactcaggaggctaaggcaggaaaatggtgtgaacctgaaaggtggagcttgcagtaagctgagattgtgccactgcactccagcctgggcgacagagcgagactccgtctcaagaaaaaaaaaaaaattatagcacatgggagatgcttgatatgtttgttggatcaatgaataaatgaatgaatgcaagattcaaagggcagtttttaaaactgtttccacacacaaagactatgaattctttacctttttttccccaaaaactaaagagaagaggatttttaggacatgctctttaaaggaaagaataaaggaacctgataaacaggaggttggaaaagcctcacaagacccagcaagtggggtctggaataatgataagcatttgcttaagaatttcagagaggaatgactgggattttggaaggtaacttaaaagacagctttttattttcctgttgtttcctgagaaattcagaacatttactagtgaaggaatattttctgaaagttgtgggctggctggtcgacaatgcatggagaagaagcatgtggctggggcagatgggagactataagggcaggaatgaaggcagaggagggactgtgggtgtgagctgaacagaacaccatgaatgagaaaaagagaaggttggttgaattgatattgaaaaacaaactgtctaatggcaatagccttatggtgtgtgctcgtgaagtactaaggaaaaacaatttccctacaaattaggtaaaatttacaaattaggtaaagattttgaaagatcagttctacttttcattccttcagttcaaaattgaaaagaaatgaaggtaagaggaaaacttccctggtgtcagcctttgagactttaacactacaagggcattagtatgaaccagtctaccatcatcagggtacaaatggaggaaaactaggtaacccaaatcatgctgctcttccaaaaataatacagggaaaatatttcgtgtatgttatcaaactgtttcctacaatttgtaccttgtttggtcttccttggattttctaggtcaattaaatgcataatttattatgctgtgagtttctctccttttgcctcttacctcttgacatgcttgagtaaatatcaccattgttgactgtgcaaccagcccttagagtacggattcctttggaacttccaagtgctctgagcatcaccttccaagatgccttacctcctagcaccttctagctcagcaatcctacagagacattagggactggtggagcctcacctccctgtgtgggtactgtccttggtgaagggaattgagaatatgtccctaaattctgttcatattttatttcatgcttatacgagtcttttttgttgtcgaagtgcacatgcatatttctttggaattaacacattccagcctactctcatttcccgagaacatttaaagacacgattctccttgtattatctatgtaaattttatctagaataaggaataaaagtgacttttcttcaatatataggcaacataaagttcttctagttactcttacattttatgatgccttctggcttgtctttagagataatcccagataaacaactcatagtgccattaagacagtaatactctgtaggtgaagaatatgtcacatctagctcttaactaaactgagaggagagctggacatattaaatgacactgtgagtatgcatgtatatagttgtatttctgacacagcaaacaagtgctgacatctgtatatgtacatatatgtgtgtatataaccgactcccttcaatgttactacttttcacaagctacttaaattccaccaccatgacctgccacccaaatcttctggtaggaatattttttcacatctctcttcttcctacttctttccccctacacgcttatggtatgtgccatttcaccagacccgtgtgaagacaggagagcactgatgggattgcttttcacaagtgtaggaatgaaaattcttcccgatgaaaacatctgtctctgttcaagtcatgcccagttatcccccaaaagaaatgttctgattaactttttttttaagtcttaagatagcagtttgtgtagcagatctaattaagaagtttatgtaacagatctgcagggtttttttttttttttttttttttcctcttcaactgggttctgtgagctcagtttgagtgttaccagctttcgctatgcaacggccaagtgtttctcgggctgagaattatcagcttttgtgggatactattgcttccttaaaacaatgtgaacaagctatgcaacatgcatttattccggtaaggaaaattttcttttattttcctagggattcttttatttattcttcctttttctcctgttgtatctatagagaaatgtataaattctgtgcatttgatgatcatagttattttctctgtagttctcattcaggctaaatatatggtttttctctgtatgaattcctaattcttaatatgtccaagcattaatcggtgagaaagaataaacagtggtccaatcaaactcatcccactgaagacagtagtttctaatagtggcatgtactaaagaaaggaaacaatattgatattccatatattaatgtttgaaataaactgcaatgtttatttccccattggttcccccagagctacttgaatatcttttgcagttaggtttgatatatagatcaagaaaccaaaattgctattctttactccaagtaaaacccaccaaaaaagttatcttgaaaagtataattgcttctttagtaaagtagtgatgcaatatttagattttgtaaaaatttctgacagaagttgtgtatagctatgtaaagtgaattagtgaatcagtgtcattgtgttttattttggagaaataatgtttgtgtttataatttatttaaccagaggaatcaggctggcaacatttgataggccgagataaggtaaataggactaccaagaagaatattaaaatgtttgattattttcattagatctactttgaagaattgagatcaccaattagctatgagagaagagtcttaaaaaataatctctgctaaaatttatttggtaccttctcaagaaaaacattatttctgacatagaaactcaagagatatgcttctttcaacagttggaataaatcttccttgaagttcatgttattttcaagtgactcaagttagatgccatcatatttttccctgtaacttcgaaatcacttaaatgtcacaaactctgggctatatttgaagctcttctaattgaaccactatattttagttggatcacggtaagttgatct

SEQ ID NO: 5359 - DNA, 6000 bp, Homo sapiens
gagtagctgggattacaggcatgcaccaccacacctggctaattttttgtacttttggtagagatggggttttaccatgttgtctagggtggtctcgaactcctgagctcaagcaatccaccagccctggcttcccaaagtgctgggattacaggaatgagtcaccgtgcccagccagtttttctttactttttaaaggaaggccatatgaaaatacatacacagggttataaattataatatatgagattgttgctcataaagatgatacataatgatgccacagttttcatgaatatatgaaatacctctggtgtagtagatccgtgggtcctaaccttgactttgtcatttgcaatttggccttggtttaagggcctgatcctctcatgtgcctcctatcttcatctgtaaaatgcagacactaatagctgcgcttcctacatcatagggttgaatgaagatcaaacaagataatcaaagtgaaagggctttgaaaaatacaaagagctgtagaagttcaaggcattattaaagactgtggagagattgctaacacaatttgattcaaggccaaagttttatacttttgaaagttaaaagaatattcagtatttacaaattatttaaaaaaccaaattcttgctttggtgactcagtaccatgactaaattgtgttttaaatgctgtacatttgatacgtaactggtataagtcatctaaccacattaccatgccagatataattatatagcattttagcaatatctacaatttctggtggttaagaagttataaattcacatagcttaaagacaaagtcatgtctttaagagaaaggttcttttactttttcattgtggcaaaagtgctgctctttgtaacatgcatactatgagagacctgtttgtcaatgcaacttatcaagcatttatttagtgcctattgtgtataagtcattttgggtatcaatgaggtggggagaaggatggaggtggtaagaagaaatacaagagaaagaaggggtcccagaagtgggtgagctttaaaactagtagggggtggcagatcctgtgacaagtaactataaagacaggatgaaatcgatgccaagaaaatgcttgaggaatacaccatgggaattggagaggttgcaaggattaattttttcagtctaggagggtgaatctggtgacacttgtcctaggccttgatgcataagaaggattccttgggtcagaaacagagggaaggatatttcaagcttgaaggaaccacacctagcttatgctaccaataaatatttacttactagctgataaaactaaacgatttagcaatgtgcctgtgactctacaaagtcacaggtggtgttgggtggtgttaggggttaaatttcagattatcatttaaaagcaccagccttccaccattccaagaaggcagctcagagagtggtcatactcaattctgcaaacaatattccattttgttcagttccatagagctacaagaatcttatccttgttcagacaggggttctcaacttaaataagtctacctacaaaactctttcaggcccatgccctacctgcagttttctaagctcacttctactcctgtcccagttagttttcacagatccagcaccaacctttacatgtaggtttagttttttccaggattacatttcccctttccaatatattagttacagtcacatacactgaaggagggggacaataaaagcttacattcaaatgtgaccaaggtagatgttgaaggagggctacaagttaggtcatctggaaggggtgacagaaaactggggtgcagagaggcaggcagaggcatggagattattctttccaaaaactataataactctcttccaaccattatcacaccattagctaacaggaattgagatcttaccttgggccaggcaatatgctatatgtgttatgtgttatctccttggcatggggcaggtaatatgactacttctattttatagaagaacaatcgctaacagaagttaagtgacttaggctgggtgcagtggctcacgcccgtaatcccaacacttagagatgctgaggcgggcagatcgcttcagctcaagaggtcaacattgcgaaaccacgtctctactaagaatacaataattaactgggcgtggtggtgtgtgcttgtagtcccagctacctggaaggctgaggtgggaggatggcttgagcctgggaggttgaggctgcagtgcgctgtgtttgtgccactgcctgggcaacaaagtgagaccctgccaaaaaaggaaggaaggaaggaaggaaggaaggaaaggagggagggagggagggagggaggagacttgtctaaagtcacccagagaaagaaggaaattaagtgacttgtccaaagtcaaccagcgagttctgtggtagagccaggagatacaccaaagtctgtgcatttaaccttacaccatgctatccctaccctcttgccttccccttcaatgtcaacctagaattctctaaagtttaagtgtcacttatatgtaaaccattttgaagggttcctatgggataagtggaacaggccattgctgacttgatatgatcgtgttaaccaaggctttttcagtgcactgtatgtgcaaggcatcatgctaaacatgtgcatcttcttttaatcttcacagtaggcctgagagagcagtgcaattattttctctctaacaaatgagcaaactgaagcacagggaggttgagtaattggtctaaggtcttattagaaattgacatttctaacagcatttggatcttggccaagagctctaagatttagtctctgagccatacaagatttagatgaattgggagccataacaagaccctgccttaaaatttctcccccacttgcctgccccacaacctgaagcaaggatcctgtgaccctctctagcatttaggcattgctatttgtttccaggggacgagtgatactgggaacagcatgtatttagttccttcaaagtcctatgccagatgatacaaggcacccagaggtgagcaagacccagtgcctgccctccagagctagagaggggcaggaaggggataaccaaggcaggtgcaatcaacaataaaagtgaagtaccaaaagcatctgaggtcacgctactcccctgcctaaaatcattcgccaacagccatcaccaacaggacacagcctgcttccctcagcaaggcaggtacagccactcctccaacatctgcccacctacctccttagcttcatctctgcctcattgtcccaaatcctgtgcaatagccgtgacatatgacaggcatctccatgtctctgcctgcctctctgtgcccagtcttctgtcaccccttcaatctgacctaatttgtagccctccttcaagacctaccttggtcacatttgtattttttattgtccccctccttcagcgtagtgactctacaacactttgtcaacctattataacacttaccctaaaatgaaattatttacaaatttgtttcttcaaaggcaagaccagtggcttattcctcttttgcatgtggcatgctcacccagcacagggacacaccaggctctcaaaggctgaaggaagccagaatacacatctctgcacagtgccaggactcttgggccaggctagcagcctgcactgggcactaactgaagcccttggggataagtatttgtaagtttgggagaaggaagacctttggaagaaccaaaggcagacctgggccaccctcagttaaatggacaacactagtccaggaaatgataaggaaaaaggctttaaggttcatctccttcagaggtttgcctgggctggccccatcatgggtaacttgtaaaaaataggtcgtgatacaatttttaaattattttatttatttttttgagacagagtcttgctctgtcacccaggatggggtgcagtggtgcgatcttggctcacggcagcctccacctctcgggttaaagcgattctcctgcctcagcttcctaagtagttgggactacgggcgctcgccaccacacccagctaatttttcttttttcttttctaattagaacagagttttgctatgttggccgggctggtcccgaactcctgacctcgggttatccacctgcctcggcctcccataatgctgggattacaggtgtgagccaccgcgcccgaccacaatattgtatttactgtattgcattgtctgcctccctgccacacagcgtcttccaggagcttaccagtcctctgtgcataccccagtaagtagctcaggcagtgcatgacgccctcacctttctctaggtattattgtattttaaagcatcacttcatttagtcctctcaacaacttttttccccccttcttctatttcacatgtgaggaaattgacgtcccgagggttaaagcaagttaccccatgaccgggctccataccctccgcgcccctttccctgcgcggtggctgtcccttctcggagtgcagaggctcctagtgctccacactctcgggctccaaggccccctaacgcgccgtgataaaaataataataacaataacaacagtgctgctttatttgcacagaaaacaggttgtttcggggcaaggtacacttgagaaggaggctaggaaccggagagaagcagcaggcgggggcggagggcgaagggagggaaggggagagggcaggggctggcaggcgctgtgtgccgggcgaggaggccggggcgggccggggcggggagcgggcgaagcgccattggcccgagcacccgggaccggccccaccgcaccgcccgccgggggcgggggtagcggggagggactcgcgcacgccgctctgcgttgacagtgccgggcgacacccgggccgtgccgccagcgtccgtcgggagagtgaaggctcgcaacgccttgcccgggggaaggtaacgcgccgcgcccggggctgcgcggtttgcaccgccaggccgagggctgggggccagaagacaagagagacggcgaggcgcgctccctgcccggcagcgactcggaggtgcgcactcgggttccagtctctacttggcccactcgctgtgttacctcgggcaactttgtttccctctcttggtctctgcttcctcctctgttaagtgagggaggtggtgtagaatgttgttccttagtctaaccagttctaaaatgggaactgcgttttggcacggggaaagctcctttcctcagtttcccacctactccagagccacctccgctgcccaggcggccaggaagctgggatgcccgggtaggcgagggttctgctgagctatcgcgttttctagggctttcagggactgacctgggcttggggctgggtgctggggagacctggctgcagagtaactgcccccagattgctcaggtgcagaaaggtaggagcgtcagcacctgtttacaggtggggtgttgggaagggccggccaggggatgatgatttctcctttgaaaataagacgtgttttggaattctcttccatacccacacctcgtcccacggcgagctataaactacacgagtgggctttatcatcctttgaagtggaaaagcgactgtttttagcgtctaagacacagggctccaccagcatataggaagtgggtctctctttctctgcacccatcctgccgcgtcttccctttctttcctcctctctttataaatcccctttgaccttgaggggctccacttcctgccttaatgaaaagttcttcttttcatttagtgctggtttgtgaccagcagcctccagggctttgggcgcagggttgagatagaagcctagataagaacaggctatgaatcaccctgtcagccccctgagccacacagcccggcagggatgtgcagaggaagcccggtggggcttcagacagatagaccctggaaggtgg

SEQ ID NO: 5360 - DNA, 6000 bp, Homo sapiens
cattctaccaggagggttagaaacatgcagctactgatttattgtcctcaaagccccttggaaggtatagcagagaactggaaatttaaaaaccatttttatattcattagtttatccatccattcaacagatatttgttgaaagcctattatgtgatatgaaatacgttgagatgttcagacagagatgattaagacatgtccctgcactgagggaactctgtcttctgggttgtttttttttttcttcatatcttccccaaaatttctaactttatataaatttagacttggtttctgttgagtcttttactagtttgagacattttattgcagtatagtgcaaagtattaatgggctaagtatgttaaatgctgctgtatttgtaagatctcttgctttgtctgtgaccatgaaagtctcagtgaaatgggatcttattccctaaatcatagctctggttttaatgtttcttgatattattgcagagactctccaacatgtgccttctgaccatacaaatgaaacttccaacagtactgtgaaaccaccaacttcagttgcctcagactccagtaatacaacggtcaccaccatgaaacctacagcggcatctaatacaacaacaccagggatggtctcaacaaatatgacttctaccaccttaaagtctacacccaaaacaacaagtgtttcacagaacacatctcagatatcaacatccacaatgaccgtaacccacaatagttcagtgacatctgctgcttcatcagtaacaagtatgtattaaagctgaccttttttttcctatgctgcaagtagttaaatgccacatttaagtcattattctgtctggcaaaaataatatagaaactttatatgcctagatttcccttaattcctaattaaatgttcttaacacagaaaatcagagagctttaattacaatgttaaaaaaaaaaaaataacgctaaagcccttttttgttttcttttgttctagtcacaacaactatgcattctgaagcaaagaaaggatcaaaatttgatactgggagctttgttggtggtattgtattaacgctgggagttttatctattctttacattggatgcaaaatgtattactcaagaagaggcattcggtatcgaaccatgtaagttttgaatggccaggactttttaaaaaaaattgttggtgcacatctttaattatgatagaatatcaagccagtgctcatctcagggatgaataattgatagatttatgagttatattcccattaacccttttggcccaaagtaaattgtttatgtacaagcttgtgattataattatttgcaaatgaaaatggatgtatatacttaaaaaaatgtattttactagtgtcaaacacactttacaggagaccaaagttaacctaccctgaaattttcacttactcataccaataatcgtaagaaataccagttcccagcaggcttttgacttagtatgtctgtgtctgttgtggtactaaatagcatccttggtaaaaccatggcttttgttttccacgacaaagacaaaaaaaattcctctgacagcctcattatccctgaaaatttaaatgagtggttagtataaataatataatttatcattttacctgtagcaaaactctctttttagatgtgcattatcaacaagacctaatccatgtttactctacatgtagctctataggtctgatggtttgaggatatatccaaacttttgttgctccaatagtcctttttgtttttgtttttttgagtcttacgtgttgtcttagttcatgctgacacaacaaagtatcatacagctgggtgccttaaacagcagacatttagttctcacacttccggaggcttggaagtccaagatcagggtgccaccatggttgagttctagtaagggccttcttcacatggcagaaagaaggcgagctagttctctgacctctaattgtaagggtattaattctgttcacgagggttccaccctcacgacctaactaccttcccaaggccccacttcaaaatatcatcacactgggattagggtttcaacatactcatattgggtgacacaaatgtaagagctaattcactttttttagtgttaatgtatataaataccatagaacagatgactgttttccaaaatttgccctgtgggttaacatttgacatacatgtgtcccacacacacagttcctatatcaaaaagtgtgggaaatgttcagttgactaaagtaaactaagacagtttactataagacttctctaagcctttaaaatattgatatacattatgattttccaggatggaatacagtatgaactgtttcccaaatttttaaccaaaatacttgttgaatgaataaatccctccccctgcccctcttcaatgggagctaacactgtctatctcttggaactagtattgtgtggaacacattttgggaaatgttggaataggccattggaatcttccagttttgacactacatatgattcagtacacataaaagtaaatcaaacttcttgatagattttaagaacatggaagtttcccagattttcaggttactgacataagctctaaataaacatcgcatcataaatgaaaattggatctaacagttatattactaatacttaaacaaaaatgataatttaagaacagattttttttttttttgagatggagtttccctcttgttgcccaggctggagtgcaatggcacgatctcggctcactgcaacctctgcctcctgggttcaagctattctcctgcctcagcctccccagtagctgggattataggtgcctaccaccacgcccagctaatttttgtatttttggtagagatggggtttcaccatgttggccaggctggtctcaaactcctgaccttaggtgatcctcccaccttggcctcccaaagtgctgggattacaggcgtgagccaccatatctggccttaaaaacatatttttaaaagttatatttaaagttacgttgcatatatttatcatatcaaactcactttagcttccatgatcacatgagatcagacacattcacagtggcatggctgtaggctcaaactgattttaaaagaatattaaggtggtggtttgtcagattaaaggcatattcagaaacattcttttttaaggtcaatacatgaaagaatacataaaagaaaccatgactaaacagagtgctttgcagtggctctgtcacccaggttggagtgcagtggtgcgatcacgggtcactgcaacctcagcctcctgagcttaagtgatcctcttacctcagcctgctgagtagctgggactacaagcatgcaatgccacaccaggctaatttttaaatgttttatagagatggtagtctcactgttttgcccaggctggtctcaaactcctgggctcaagtgatcctcctttctgacctcctagagttctgggattataagcatgagccactgtgaccagctagaaagaaatatttaatagggacttacaaatagaagctatgtctgtgtctatgattgcagcaagacaagatggtggatccccatgccattaacccccagatctttaaccactacagtatattggatacttaaggaactttacacagaacactgaccattttgattgtgcagcttgaaattgttctaatcctactttactaacaaataggaacataagtagttttgacagaaaaaacaaaacaaagtaattgtaacttttaatatattacagagatgaacatgatgccatcatttaaggaaatccatggaccaaggatggaatacagattgatgctgccctatcaattaattttggtttattaatagtttaaaacaatattctctttttgaaaatagtataaacaggccatgcatataatgtacagtgtattacgtaaatatgtaaagattcttcaaggtaacaagggtttgggttttgaaataaacatctggatccttatagaccgttcatacaatggttttagcaagttcatagtaagacaaacaagtcctatctttttttttttggctggggtgggggcattggtcacatatgaccagtaattgaaagacgtcatcactgaaagacagaatgccatctgggcatacaaataagaagtttgtcacagcactcaggattttgggtatcttttgtagctcacataaagaacttcagtgcttttcagagctggatatatcttaattactaatgccacacagaaattatacaatcaaactagatctgaagcataatttaagaaaaacatcaacattttttgtgctttaaactgtagtagttggtctagaaacaaaatactccaagaaaaagaaaattttcaaataaaacccaaaataatagctttgcttagccctgttagggatccattggagcattaaggagcacatatttttattaacttcttttgagctttcaatgttgatgtaatttttgttctctgtgtaatttaggtaaactgcagtgtttaacataataatgttttaaagacttagttgtcagtattaaataatcctggcattatagggaaaaaacctcctagaagttagattatttgctactgtgagaatattgtcaccactggaagttactttagttcatttaattttaattttatattttgtgaatattttaagaactgtagagctgctttcaatatctagaaatttttaattgagtgtaaacacacctaactttaagaaaaagaaccgcttgtatgattttcaaaagaacatttagaattctatagagtcaaaactatagcgtaatgctgtgtttattaagccagggattgtgggacttcccccaggcaactaaacctgcaggatgaaaatgctatattttctttcatgcactgtcgatattactcagatttggggaaatgacatttttatactaaaacaaacaccaaaatattttagaataaattcttagaaagttttgagaggaatttttagagaggacatttcctccttcctgatttggatattccctcaaatccctcctcttactccatgctgaaggagaagtactctcagatgcattatgttaatggagagaaaaagcacagtattgtagagacaccaatattagctaatgtattttggagtgttttccattttacagtttatattccagcactcaaaactcagggtcaagttttaacaaaagaggtatgtagtcacagtaaatactaagatggcatttctatctcagagggccaaagtgaatcacaccagtttctgaaggtcctaaaaatagctcagatgtcctaatgaacatgcacctacatttaataggagtacaataaaactgttgtcagcttttgttttacagagaacgctagatattaagaattttgaaatggatcatttctacttgctgtgcattttaaccaataatctgatgaatatagaaaaaaatgatccaaaatatggatatgattggatgtatgtaacacatacatggagtatggaggaaattttctgaaaaatacatttagattagtttagtttgaaggagaggtgggctgatggctgagttgtatgttactaacttggccctgactggttgtgcaaccattgcttcatttctttgcaaaatgtagttaagatatactttattctaatgaaggccttttaaatttgtccactgcattcttggtatttcactacttcaagtcagtcagaacttcgtagaccgacctgaagtttctttttgaatacttgtttctttagcactttgaagatagaaaaaccactttttaagtactaagtcatcatttgccttgaaagtttcctctgcattgggtttgaagtagtttagttatgtctttttctctgtatgtaagtagtataatttgttactttcaaatacccgtactttgaatgtaggtttttttgttgttgttatc

SEQ ID NO: 5361 - DNA, 6000 bp, Homo sapiens
tttctttgaccccaccctctttttttaaactaattctataactgacactcttaaccatacccaactagcaatggggattcaagttgatgcgtctttgtttcctcagtcgtactagttcaaaataaaacaactgaaagaatatctcgctggggagcaatggctcatgcctgtaatcccaacactttgggaggtcaaggcaggaggatcatttgaggtcaggagttcaagactagcctgggaaacatagcaagaccctctctctacataaaaatttaaaaattagccaagtgtagtggcgtgcacctgtagcttcagttacttgggaggctgaagtgagaggactgcttaagcccaggaggtggaggctgcagtaggccatgatcgcaccactgtactccagcctggatgacagatggagaccctgtctcaataatattaataaaaacactcgaagctgattccttcctgctgggagttaactgtgagcgggtgcttaattaaaaattcaggcatatacagtacctgagtttgaatcctgactccgcccaccatttacaagctgtttgactctcggcaagttacctcatttgtaaaacagaaataatactatccacctaacaagactgttgtgaggattacatgagataatgcacataaagtactcagtacagtgcctggcacatagtaaacattcaataaaccttagctgccattattactagtgtatgaagttgattttatttatcaaaactctgactccaacatagcttggaaaccttgggcaaattactaacctctctgtgtctcagtttcctcaccggtaaatgcgaataatattatcactacctcctgggactgttgtgaagattaaatgtgttaccacgtatggaactgtagttaagtgttagctactgtattaggggacccaggtacactggaaaagagttgagggacggccaggtgcggtggctcatgcctgtaatcccaacactttgggaggctgaggcgggcggatcacaaggtcggaagatcgagaccatcctggacaacatggtgaaactctgcctctactaaaatacaaaaaattagccgggtgtggtggcgggcgcctgttgtcccagctactcaggaggcttaggcaggagaatcgcttgaactcgggaggcagaggttgcagtgagcggaaatcgcgccactgcactccagcctgggtgacggagcaagatgccatctcaagaacaaaaaaaaaacaaaaaaattgacggagctaggtgcagtggctcatccctgtaattccagcactttgggaggccaagacggacagatcacttgaggtcaggagttcaagaccagtctggtcaacatggtgaaacccggtctccactaaaaatacaaaaattagccgggctaccaagcaggtgcctataatcccagctactagggaggctgaggcaggagaatcacttgaacccgggaggcagaggtcgcagtgagccaagatcgcaccactgcactccagtctgggggacagggcaagagtctctctcaaaaaaaaaacagagttgaggaagaatacacagtcagcctctttatgtagaatgtggtccacattcatggactcaaccaaccatggactgaaaatattcaaaaggataaacgtttgtgatgatggacatgctaattaccctgatctgatcactatacatcacatacaccacaacatcactatgtacccccatgaatacgtacaattatcgtgtccattttttaaaatataaaaataaatcactgaaaagtaaaatacccagtctggccaacgtggcaaaaccccgtttctactcaaatacaaaaattagccaggcgtggtgctgggcggctgtaatcctagctacttgggaggctgaggtaagggaatccaggagacgtttgaacccaggagacggaggttgcagtgagctgggttcacgccattgcactccagtctgggcgacagagcgagactccatctcaaaaaaaaaaaaaaaaaaaaaggctgggcgtggtgactcacgcctgtaatcccagcactttgggaggccgaggcaggcggatcacgaggtcaggagatcgagaccatcctggctaacacagtgaaaccccgtttctactaaaaatacaaaaaattagccgggcgtagtggcgggcgcctgtagtcccagctactggggaggctgaggcaggagaacggcataaacccgggaggcagagcttgcagtgagccgagatcgcgccactgcactccagcctgggccaacagagtgagactccatctcaaaaaaagaaaagtgaaatagatttgaaaccattaaaaaaattttcagaaaaaaattggatggttgcatctgtactgaacatgtacaaacttttttacctgtcattattccttaaacaacacaactatttacataacatttacattgtattagttgttgtaaataacctattgtttaaagtatatgggaggacatgcataggttatatgcaaatactacaccactttatttattttttatctttttaatagctttaagtagggtgggcatatgcctatcccagataaaatactacaccattttatgtaagggacttgagcatttatagattttggtatcctcagtaggggtcctggaaccaatctccagcatatactgtgggatgactatatagctaatttagttcaacactgtacataacaatgtatcatattagctactatgagatataagtttgggtaattgtgtatctgtatgtatacatatttagatatccatgtacacatactgatataacatttctcatatataacatataaacatatggttaaatgaacatacagtccacgtaggaaagggctggaaaatgtttgcattttttaatgagtttgaccccatgtattctattctatttattccccaaacatttagcatgcctgctgagtatcaggtgctgtgttggataccagaaatacaaagatagatcagacagtcctgtacctttaaaaagctagtgcagtgccatcagagccaaaaagaaagaccagctacacaagaccatctcaaaaaccctttacccaaatgaatcttcccagtcaggagtccacacattaccttagaccatctgggagaccttcgtctgatttggaagcacataaactagaagattccggaggactgggggcattggccacaacaccagcaacctcagacgctgccattatgctctgtacattcagaaacaaattacaggctacaagtttccaaagtttaaaacaaatgtatctctcccccctcagaatgtccacacaacagagctgtcgcagtaaagaaacacaaaaacctgggctccgggagaaaatacttaagagtactaaaagagacattgtatgcaaagtcctagtgtcctagtgggcagcaatcctcaggagtcactgtatttacataaatatctaggagtctgtgcaaagatcttattttcacttttggcagaaatgtagtcatttcaaacaatacatcttagtctgccaggatcttccaagtggtcccaggcctaccttgtctgctatcatttttaataaaagacgtacttttcggcctagtatcaatcagatctcatgtttttaaatcactttatggctgttacattcaaagcattctccattaatttaagggaagtttttggaggtgtctgcctgtaagtcaacaagtaatgcaatactgggcaatccagggtgcatattttactgtcagcgtgctccccacagatgggaaaggcctgatacccactaactgagcaaagaacagactcttcagagtgactagtggtgcaaaaaagaatcctgggttctctagcgtgaaaaagtcaaggtaaaaaacatggtaacacaagtaagggaactgggacggacgccttttttaaaaatcaaaaggtcatcttttatgccgcagagcaaacttatgaccttatgaggagaaaagaaaatcaaaatacttgggaggtggggatgaacatcgggttagtttgcattcttgcttttattttaacagcatcacacgtattcccccccggaacactgaagagcgcatagggcagataggtagatggggctgtgtcaacacctcagtcacagcccacagaccctctgtgcctcagtttccctcattatacaaagctcctgggagaaaatgggcccaaaccgccattgctgctccctcaggtgcaaacatcccgtctccaacatagcccagggctggggggtcctctgcgcccggtgaacgaaaccccaggacaagggccatgcatgcaactccgtggctagagagcccgtggcgcgggtaggaacagctggctggagggtcgagtgtaccaaaaagaactccgcaacccggggcgaccaccagcgaagcaggggcgccggagccacgggtcctcgggcgagaacaggggacagacgggaaggggacaatggggggaagcggcgctgggtggccttggccaccccccacaggggactgctaggctggccgctggctcggaccagacccccctccaccccttcccctcggtccccccaccccgctgccagccacccccccgtcccacttctaggccgggacccccgcctcggttctcacagcaccctccacgccccccacccgacccccatgcccggccctcgccccgcaacccccacccacgctcgccccgcacacacctcccgcgccgcgcccccgggaggaaagtgggggagggacgggacgcacctgagcgggcggagcggggggagggggcggccgagccacggggggaggggtcgagcgccggcccgcgcgcggcacctcccacttccggcggcacgagcggagggggcgaggctccggccgcgagaggagaggccgcggtggcgccgcgccgcccccgacggcgccctctggcggcgacagctggcgccgccggggcacggggatgctgcgggagacccctgagatacaagtggactctcccggggcgcggggaagaagggagagccgactgcgagaaggaaggcgacctgggtgggcaggatcccctctgggaagattacagggacagtcggggccatggcggtcagaaggagaagagcaacgagtggcttttaaaggtcggaaccgaaatgccctttacagaggacgccatgaaggagagccttctgaagagggaccatgtggaagatgccccgaggactcggggaggcggagcccgcgggttcagcccccagcgcccgcacggcccctgcctgcgtaggccgcccgcgggagccggaccccgggcgccggttgctgtggcccgcgggggtcgccgggccgcaggcgccgcgctgattggctgcgccgcgggcggaagtgatgctgctgtcactgctcctccggctcccgggaagccgcgagtttccgcagggaggcggcggcagctgcggcggggccggtgagttgggaactaggtgtggggctggacctgggtggtcagggggccccagaagtgggggaagccggcgtctgaggatgagggagctgcacagagggtgcctgaggtcctggcgtgggggaccaaggagatggggccccagggcccagaattcctggataatgtgggtgctaatgaggagaggggcacattgcacggagcgatcgaggccgacggagggagaatcgggaaactgacccggtacccaagctggcttctaggagccgggtgtggaacagcgaggacagtagcttgggagcaggatcttggactccaggctgcccattctcttcttccttgtcaattaagagctgtaaagggaggcctagccgttgggagaggttgagacctgctttcagaaggcatttaaggttcctttcccagaagcctgggggataaaaatgctgctttgccactagtagacagaaggagctcctgcttctctttcttcctgacatctgt

SEQ ID NO: 5362 - DNA, 6000 bp, Homo sapiens
ggcccgtcctgttaagagccccccccatccccccgcttggaatggagcaggggtggggaaaaggctgccgggactggccagggctcccattcgaagcgctgaaggacaggaccagaattacttctctcgggcgggagcacaccgcagagggcagacgggtcgacatttgctcgggagagaagcccaactgtttattctggttttcttttgtgtgtgtgtgtaaggtggagaggggaggcagagagcagtggggacctgaaatcgtagtattggggtgggtgagagggatgggagtggagggggacgttccttcctgggctcggcctggccccctttggggtggcagggggaaaggctggggctggaaggacagcaagagcgcccagggcctcagggctggggtgggagtaccctgcagagagctccctcctgcctcgcaggagaggaagggggaggcagggaggggcagggacagcaggagcccccaggtcaaagctccactccagtgtaaagcagtagccatatttgcttagaacttgccggatgttccctcccttgcacaggccacagagacttgttgtggaggagatcctctttctttggggtccagtgatagcagggagccctgtaatatgaggccagccccccatgctgggagctgagtcctgagaatggggaagagggttcgtggggagagggtgggtgaagaagccttcttaatcattaacctggttgatttcatctgaactgctgagcctcccagctctattgattttctctgaaagcacagcatctggagctggtggctgcccagagaccggggagagagaccacgggtagaggtaggggaagaggggcagggaggggaatggaaaccaggccaggagtggggggctgggaaggagggaggagacaaggtctgagggccgggagattgtcagaggagtctttggggatgtgaggaggccaggaggtctaagcaggcactgggggagggcacagtcagcacagccacagaggcaccacggagagcaggaaggagccagagaggatctggcagagaggacgaaactgaagtccagagaagcacagtgatctgctcaaggtgacagggtcagggcctgcaccaaaactgaggtcagttgatttcactggactgaggagagaagatacagaaatgaaggcccctggggcagaggagaacctgaggtgatggaaagtcggcaagaggcgagatgcaacttacaaattaccatttttctgagggtggggcctttcctttttttgcctgtgaggatatagtagactttcaaaaaatggctctggtctgactgaaggtggggtcaggccatcaaaggaggaagaaagggccaaggagaagtgatgctagaggccgggcatggtagctcacgcctcagcactttgggaggccgaggcaggtggatcacctgaggtcaggagttcgagaccagcctggccaacgtggtgaaacctcgtctctactaaaaatacaaaaattagccctgcgtggtagcgcacacttgtaatcccagctactcaggagactgagacaggagaatcacttgaacccaggaggcggagatggcagtgagccgagatcgcgccattgcactccagcctgggtaacaagagcgaaactccatctcaaaaaaaagaagtgatgctagaaagagctggacagaagggaacaccaagacacctgtccatcttcacttagccaaatccagggccctgacaagatgggttttcaccaggacattttatggggctcctggctccccactatttctgacagtaggattcctaggtctgtgtcacctgtgagacagaaggggagccacattctggtggcagggacagaaccacacgcatggacactgatgtgccatcctggtccccacaggtcccctgaccagtacagctcctagaataggtcttctctgagctggaggggataagccagactgcttcctgggagaattgaaaaggagcagggggccctgaagacagaatcagtcaggtacacagtgagcaggggtgatgtgacggtagagagacatgggaacagagacagcacacacaccacatagctctgagatgacgcacaaaatgttatgactccatagactgaagcagacacagcgtttcttttcttttctttttttttttgagacggagtgttgctctcgtccaggccggagtgcagtggtgtaatttcggctcactgcaacctccgcctcctgggttcaagtgattctcctgcctcagcctcccaagtagctgggattataggcgtgcgtcaccacacccggctaatctttgtatttttagtagagatgggattttactacattcaccaggctggtcttgaactcctgacctcaagtgatccacccgccttagcctctcaaagtgttgggattacagttgtgagccactgtgctggcctcagacacagcatttctaaggccatgttgagggtgccaaaggaaaccaagatattttaccccagaatatactactttgacgtattttgagtcggctgtcagagggccagcacacagaagtggccctgcaaatctggcttttgagggagatttgcatctgcagagaatctgcattgatgcaacctggctttctctgaggccctccctggtccaaatctaggaaagattaactgaaagtctgacatgtttaaaggtctgaaagacacatacatcacctgttttctctgaggggtgttacctatgaggtttcattcatataaaaagaccacttttactggcctggcctccgtttatccctcccataactatttttgccaaagtccaagtcccttttttttttgttgttgagacagggtctctgtcgcccaggctggagtgcagtggcatggtctcagttcactgcaacctccacctcccagggtcaagtgagtctcatgcctcagcctcctgagtagctgggactacaggcatgtgccaccatgtccagctaatttttgtatttttagtagagacagagtttcgtcctgttggccaggctggtctcaaactcctcacctcaggtgatccacctgcctcagcctcccatagtgctgggattacaggggtaagccactgcaccttgcccaagctcccattctttctgtaacctcaagatggtataaaatcatcaaccatctggctatctctttgacttcctatatttttttgactcccttgcatattagttcttctactaatctgccttttttcagttggtttttcagcagacctgcagagggcacaggggaagtgttcctttggcccctgcagcaccacaggaccccaggtcctgtctgtggtcgtggtggtaacgggtgccagcctggaccagtcctgcatcgtggagcttcactctggacattctaaggggcagactgtggctggggcgtgagggataataaaggtggtgtgaccgaagcctcctgtctatactgtcttttctctcccctttctctgacagctcaacatcctggtggatacaggcagcagtaactttgcagtgggtgctgccccccaccccttcctgcatcgctactaccagaggcagctgtgagtcctggggagagcccgggggaagtaccttttccaaggatccagggctaagaagggtcaggggaggggtacagagagaaagagttgatcctcagattttcttcttgccagggaaggggaagggcgaaaaaaagacagtgaccaggagagacagggtgaagtgggtggtgagaggagctataccatgggaaagggtgaattgagaggtagccaggaagtgcttcagtgctgagacagggcagcctcctgtgggagggaaaggaagaagagcccatagctcacagaacaatcttagggggcccattttctctgcctgaatggggagacgaaaaccccacatcccctcggtgtctctcagttctctaacaccagctaagtctaagctgaacaggcctcagtgacggctccccttgctgtgttcttacccaggggccactctaggtggctttgcatagtccaaggacatgaaggaaagggtctttcataaacccctctgcctagaccagtatcagaactgaaagctgaaatatctcctccatgcaccacccagggtgccaccagttggattcagcttactggtgaaaggggggttgaagaggactggtgaaagtgggggactggtgaaaggggggttgaagtgggctttaagataagaggcagtgaggggtaatctggaagcccccttagcataaaagcaggaagaagaagggatgagaggacaccaatatctgagacatcagtgtgtgcaaacgtgagtagaggcttaaatcctatccttggacttgtaggcagctgcaaaacgcaccttccctgtttcctctaatgtcccaatctaaaagaagcagtcagggaggagggtgcaggtaggatcgatgaaagggcattcactccagttcctcgttccagttccatcactgcccccaccacacacagaagccctggttagtggtgtgattaaacacaggtggggctgccacatgttgagcacgtttcacagaagtggtgtgtaataccaacctgcttttctgagatgcttgaacaaaccccttctctagaacttgctgtagaggttccacattcaccctgcctggcactttctctaccactcggatggtaccactaggttccaaggcagtaagagagtcaatggttccttttctcggggagcttgacggagccagagggcggaagagatgcccactagctgtccctgcagcagcagcagcagcaggcacaatgcacaaagcccaggcttgttcttcacagggcctgagctcaagatctaggaatatgagcaatagataggagagcaagcctcaccaatggttcccttcatctatctgcaagcccactttacactctgttctgggtggtgagtctagggatgttttgctgagcagcctgaaagcagactctaggattcccctgagatgagataaggtggtgtttgggagtaagtttaacttagatccttataccagttgtggttatgcatccacagatctctgccttctttccacaggtccagcacataccgggacctccggaagggtgtgtatgtgccctacacccagggcaagtgggaaggggagctgggcaccgacctggtaagcatcccccatggccccaacgtcactgtgcgtgccaacattgctgccatcactgaatcagacaagttcttcatcaacggctccaactgggaaggcatcctggggctggcctatgctgagattgccagggtgagaggaacagggcttggccctacacactctatgcacactgcactatacagagaaggaattaggagagagaaggggaattagcagaaggagggcaacaatcagtttaaaggattatttaacaggggtatagggtggcagtctaaattttagccctatagagggcagaaccatagtgacagaagctgtgataggtacaagaataggctgtgctttctatgtactcttaagatctttttttttttgagacggagtttcactcttgttgcccaagctggagtgcaatggtgcaatcttggctcactgcaacctccacctcctcggttcaagcgattttcctgcctcagcctcccgagtagctgggattataggcgcccaccatgacgcccggctaattttttctatttttagtagaaatggggtttcatcatgttagccaggctggtctcgaactcctgaccgcaggtgatccgctcacctcggccttcctaagtgctgggattacaggcatgaaccaccgcgaccagccactctaagatctttaataaaggcccccataaatttgaagcaggttaggcatagggggatcaaagatatatgaacctggccaggcgtggtggctcacacctgtaatcccagca

SEQ ID NO: 5363 - DNA, 6000 bp, Homo sapiens
gggagagaccacccatcccgctcctcttgccctctctttccggagactatgagaccgttcgcaatgggggcctgatcttcgctggactggccttcatcgtggggctcctcatcctcctcagtaagtggggtggcctccagggaaggggtgctgaccagggcacctctcttctcaaggccgctgagcaggctggctttcgggagttgccaagggaggggtgagcctccccaccacgccccccactgcaggatgtgggaatgggtgcccggtggggtgccaggctcgctgggagcacagtgtgaggttcctgcttgctcaagtgcaccctccagtgggcccgggaggagccgcagaagtgagagcaaacccacggggtaactgggtaaccggagggccagacagggggactaggccccccgctgctaaccatggtcccaaactcatttgttaaatagggatgatcccacctgcctcacaagattagggctagcatccaaagacatggcagtcaggacagcgctctgagaacggtccagtgcagactcggagtgttctgggggagacaaagagagttatgtatcctcaagccccgaggggcacacagcaggagcttaataactgcacattgacttgttttggtccaacccaaagaaaaatacacagaaaacacaacccatggaaagaagatacagcaagcacacctgtgggctctggacttctaatgcacgtgtgccactgccaccccaccccaaggctcgggccacagtcctgcgggtctccccattttcccgtgttgcccatggcagctctctctacgtgtgccactgccagcccaccccaaggctcgggccacagtcctgcaggtctccccattttcacatgttgcccgtggcagctcccggagggcagtgccgggtggcagctgatcacataggcacaggaggcaggtggcctaagcaaggggctccactttggagttgctgccatccttctccaggtgttcatcgggcagctgtgctgggggcaccatgatggcccagtctctgctgctactctcgatatgccaacagaccaccgtggatctgctccagtaaatatttgctgactgactgactgacttaggttcttaaatgcctatggtccagccttatataaagagagagaaggctgggcgtggtggctcatgcctgtaatgccggcatattaggaggccaaggcaggaggatctcttgagaccaggagtttaagaccagcctggtcaatacagtgagacccgatctatacaaaaaaaaatttttttaattagctgggcatggtgacatgtacctatagtcccagctacttgggaggctgaggcaggaggattacttgagcccaggagtttgaggctgcagtgagctacgatcccaccactgcactccagcctgggtgacagagtaagaccccgtctcaaaaaataaaataaaataaaatataaaataaaatagagacagtcaaacgtggcctccaagcctgaccctgcgatgatactggcaggagggaggtaggagagactggaagaattttgagtcttccagggtctccttggaaaattagtccatggaaacaaatctccttttctcttttcaaggcagaagattccgctgtgggggcaataagaagcgcaggtgagcgctgcctggggtgaccgatgagggggttggggctggagaaggaggggcgggctgaggattttgtctctgacacagtggaggatccccagcctcagagatccctagacccacccctccccctgccctctcacctgttgcttttccttcccccaccaggcaaatcaatgaagatgagccgtaacagcaggtatgctaggagggcctggggaaggtgcggggagggcagggcaggcttgggagcaacagggaagaattctggctcctggactcggtaaataagaattttagggtcgtccacacatcagccaggtggtctgtcacccatcgtgtgtttaaaatgatggccaagggcctggcgtggagtgtgtgccgcaggagatcacagaggagccctggagaaaagtgagatggacaagggggaagtaaaaccccaacctctgctgcctcccacccaaccccatcctgcctttgtcttctcagcctcggcggtgccacccactgcactggggccagctgggaagccaagcatggccctgcctctggcgcctccccttcttccctgggctttagacctttgtccccgtcactgccagcgcttgggctgaaggaagctccagactcaatgtgacccccaggtggcatcgccaactcctgcctcgtgccacctcatgcttataataaagccggcgtcagagaccgctgcttccctcacctgcctgcctgtctccctcctctgtcaccaccagcctctccaagctcaagtacaaatacagccgggtctcatttgttttttcaattaattgctcaggcacctgtctgcctgtaaaagcaagaagttcagtgttgtcatctgtaggccactcctcacaccccttgaactggcagaagccctggggacagaggcctcagcctggcttttatacacctgggaagtctgaaaggcccagaggtcaaaaccacagcccattggatacccatgaggcctctgccccaggcaccactgttgggttcctggaagcgaccctgcttagcagttgctgtggagaggccccaggctaccaagatgggcctctgtgtggtcacattcctgtgctctgccgttttccatatgtacccccctgggccaaggtgggtgggtccggggagcctggtgctgggcctctgcacatgtcctgaaggagccagccctcttcccagccccctcctggtactaagctcgggccacctctttccactcttggggccacctatttggagggttggttaattccagggcctggggccagggaacagatggtgagagtgagaccactgtcacacttgctccagcccccgtccatgcaggcagggacccacccagggcagcctcagcctgagatgcttccaggtcgctccacctagtgcggactcctaatgtgcccgactcctaatgcccatgccccctttgctgtgagtccaaggccatggccatgcagggaggcctctgggaccttctgcactcaggaaggagcccaactttcctctccctcccttcactcagaggcctcgaaggctggagggattgtgggattctggcaccacctagcgtctggcttcctcatctgggcctgcaagcttttgagggaggagaggggagaactggcaggagaaccaagctacaggaccaggaaatgaacagggtgtgtttgggggccagaggcaggatagacctcactccacttgggaattaagctctttgtcttaatccactgcccccagtccctgataaccaccaactctcctagaaacacagaaggcttgagcagggaagggtccttagagagcaaaacagaccgtcttcaatttacagaaggggaaaccgaggctctaagagaggccgtggcttatccagagtgacatggccagcctgagtcggagccagaggtaaactgcaggtctctggctccccttccagagctcttcccaccacacgaacatccaaaggacgggaagcggttggtggggcagggaggtggactacccactgactgcctgtgggtttggagagtgaaggggaaacagagaaggcctggggttgtggggagaaactccagaggagaccaggagccaggcaggggaaggccaggtgacttacaactcagcaccaagtccttgtgacaccccactccaaatgtggactcattggtgtaggccaaacccttaaatggaattcagttttctttgcaggagatagaggcacacacttgagctctccctcgagggtgggagaaatgaacttgaatggggcaggtctagccaggggggctttcaggaggagggaggctcccaaagcctcttggatgcagcagcaaggcaaacaggaagagggggtattcagacctgtggcccaccccaggagaagtaagagcactggagaagaatcacgtttctagaatgttctagaatgttccatacagaggacaatccagcctgccaccctcagagggaaattccacctgctctggatgagtcacttcccttcgctgaccctgcctcaaggcctccctccttgtgaaatgtgaggctttatcaggtctgaacctgaggggcttttcaaaccaccacgtacccagatttccccagcccggttgaatatgaggtttggggggtggcctctgcaggcggaggcttaacgagccccatggccccaggtggtgttcagaggcctgggacctgcttcctaaccaggactcttgtgaacatttcccttctctctccagaaaggtcacatgggctggcagttactgaactttcacttcactttgggattttccacaattcagacctgcattgagtcacaaagatctaccaagcctaggaaattattgggtgaattactcttaatcagacaactccgaccatgacagtcttcgtctgaggccgcaattccctttctgaccaccagagggagcacgtggcttgcgccgaatcccctccagctgtgtgttttcaactcaatctttccaagggcctttgccgggaggaggggctcctggctcctgaatggtccgcccggtgccgtgatttcctaggaaagccctcagctcttctcattccgcttgttcaccccccaggtacagcacttgccccactctggggtaattcttggctgtggggtcttaagtgctcattccttcccagaggcagagaccccacgtgatctacacatcttccccaactcctggggaacggcgacgcctctaaccctgtagtctgagtaaatcaacaacagcaggacatggggaggggcagagaagtcaagcagggacgtttgtagggtgggaggggaaagaggctttgcctcagtagctcttctcaaccccagctgccgtgagtctgattcaactgatggggcatcggtggttgttcagcctccccaggtgaactcgaagtggagcaaaaggtgacagtcacagcttagtaggtgagcatgtccaggtgagggtgaggggaacgcagccaggcggagcaggtgagggcccaagggaaactggacttgtttcaccatctggggagagggcaggtagctctgccctgccagcccctgggagagcacttccagagcccccaggcccagaagtgctggccttgggcaatggggttgcagggtctctgctaagtccgctgagtcctggccttcctcacagcacccatgaacaggaagagctgggtaggaagcccagggagggccaggagaattagcctgtgagccagcagccagtcccacacctatcccttgctaaagggtccaccatccaaacccatccagcctctgagcagctccagagaaagagccctgtgggcatgggggcaggagggcttctgctgggttctggcaggcacttcctggctgggtggcctggacttccccatcagaggaagaagagcctcagacaggccgatcgctagctcctacaggctgatctcctgtccagggtgagggtgcccctggcatgggcctccagtttttctaaatgctttggggcatcaggagaaatctccaccccacccccccagcaattccgaactctctctcttgtacagggagcaaggaaggggtgcccccaaagaactgagcgtctccactggcgctgcgtctagtgaaggaagtgggctccctggacagacgggtgggagtggagggcgtgaggggtgttgtgctgaagaaaggcccagggcagggggtggtgtagcgtctcctcccagactctccaggcttccaccctccctccgctctgctcggcagggctgctgtgggggagattagtcgcctccctgttgatccatg

SEQ ID NO: 5364 - DNA, 6000 bp, Homo sapiens
gtatcaaacccagtctcacagactgagaccaaagtgatttttgataacctaacaaaatacccttttcttaaactgagaagcagtttccaaggctatattattgccattgaggtttatgtgctttccaatctcttcctaagcatgtaactggtaatatctctgtcctgcccactccttccttgttcccccatttacttaattgctgtgatctgtgtttaattatcacttgtgagggtgctctattgcacaaccctgtttcccctggtgtgtatttattaagggcttgtttaatgagaatgcaattaaggagagggtgctcagtcccactcagaggaagaaaaaggaaagaagaagcaaggagactgtggagaagagaggaaaggggagaagtggagggagtttgaatctggaatcctgggtttgaatctggaaaacatgcttagttctccttctgaacctgctggaggtgcaagcctgtgggggcacctgagagagaaggctggagttccaaagctcttatgactggcccccttctggtgggatcagcatgagagggagactgggcacagcagaccaccttgccctgctgccagtcctcaaggaggtgtagggatctctgcataagccaggggtgggccgtgccaacacaacctgctctctggcctgtaagaggagggacaggcatgctgctgggacttgtttgcaaagctggtttcactgagcatcccatgctgtctcaggggcatgctttcataccagcaaagctcctggggatgggcaggaagcaggtaggttgcctagggagagaaagctgaaatctttcctttgtctctgggcccaggggccttacctggcccatccctgcctcccaaagcccccagggcctgcaccccaggaggggtcctgtcctgctggcctcagcccactttctgccccccagctctaactttgagcctttctaactctccctgggccagagtgtatcagcctccctattaaagtcagccgtgtgtccacttgccatgccagcaagccctcagagctatatttagagtgggtaccagcctgcccctctttcctccccgcatcctggggtggctgtgagtgatccctggatgtgggaaaaggtggtggaaagttttctgcctccacatttgccttgggatatatggtagctgccataagattcctgctggtgtgaatatttaataatatgatttgcatgtgctgaatacttttccactttaacaaaagtgatcctgagtcagtcctcagacaaaaccccagatgaggatggcagggggccaggacttcagagaaggcaaagaaaatggctgctctgagagtggctttttagtgaggaaaagcaagattttggggttcaggatggaattccacaggatcaggactgggaagagttgttcctcaattccacaatgccggaaagaggccccccactctcacacacacacacacgtacactttaacattctagaattaactttagaaaacagcaaagcaaggctttctttactccggggaaatggccacatggaaataagccaagaagtggtagagggtgaaaatacagatcaatgtgggaatggcctggagacattcttggctgacactggttattcagggaagctaggggtgccctggttacctgtgatgagggacacccttgtcccctgctcccctttcaaataccaccctcctctacctgcagggtgcccactcacggcggcccctcttgtgttttataatctcctgttctggcttcacaccaagcttgagaagtaggaaagaggcatccctgccctggcttggggatatgcacaccggatgtggcacctctgactttctcaaggtcagctggcagagtggggcctgccttgcgcatgctcaccagtcctctctggacttggtcatcctgaagcagccctccggcggcctttgtggaccaacacctgcccctggttcccccctctcccccagagcagcctcataggagacactgagttcaatgggaggcaggcccctcggctttcttgtgcatgaccctcccagacataactggcaggactgcatgactcccgactgggagggctgtgcactgaagaagccaggcttgcccaccctctctgatgctttcactcgggcagggctctggactctgtgaaaccatttctgccggttttcattttcccctcccagctactgaggaaatggcaatgcttcacttgcagagtcctgagtgtattggacttaagtcatccacataggtgcacacaaaccaggcagaaacgtgtactgtgtcatgagccagaccttaaagatacagtgttcccctctcttctggacccatcttttgctcgtttttgcttctatttaaagcaatcaataagatttccttttcgcacgcatcttttgtgctcttgaatatctctttctggctagggttgaggtggggagatttgggcacggatttgagttcccccatctcctccaggaccctgattcctggaccggtatgctgatgaggaggagctgccacactccttggtgccctgagggaggccattagctatcaggaagctgccttgtctgacagcttccctgtccactgctctgcattcacttcctgtttgtgggggctgtggagggtgggaagcagagttggtatctcccaccaaaaggttctagtgctggctgcagactggagagtgggatcttgtgtctggcttctgtccctagacctctgggggagatggggcggaggagggcagaggtaaacagaaaggcaggagttctatggagtgctaagccctgatagcagtgtttttcttggagagtgtggttggtcacagagtggtggaaaggggctaatatctgaacgctgcttattccactcactgggtgtgtggccatgagcaaggtaatctttttaagcctgtttcctcatttgtttattgggaataaaaatagtaacttataggattatgatgagggttaaatgagacagtgtatataaaatacctctcctatcctatagtaactgctcagtctcaaattcaccatttactctgtggccctgggcaagtcaactctctgagcctcagtttcatcatatataaaatgggaacattatacctgcctttgagcattctaataaaagtcgtagttagtatgcacaaatcctctcgcaccgtggttctcaaagtgtggtccctgcgcacagcattccctgggaactttctcgaaatgtaaaagctcaggctccactccagacctgaatcagaactccaggggctgggcggagccagccgtaactgttctccaggggattctgatgcgctctcaagtttgaaaaccatggctctagaacaaatcctggttggccacaaatcctaggagctggccaaaaataaaggctaattgaaataacttcccagcactaattggagccctggtgggtagatctgggtctcttaggcaagttacataacctctctaggctcagttgtctcacctacaatgtggacctataatagtacgtgactcataggacaggccgtgaggatgaaatgtgcctggcacatagtagatgctcagttaatatcagctagtactattgttagcgacaatggccgaatcacgatggggttactggaccacggggtgtgattttagggctgggggatataagcacttcactttgtcatcagaagctaagggcacaggaagaagctgagcaagcagggctgcctgctgtccttggagatccttttctgtcatttgaaaagcattgctcagacgcattatcatccggtgggggcaaaacaagaggtttatgatgcagaacagggaattaagttagacaacagagggccttcctgagagtggggttggaaggtgccagtgtcctctagggaggaggtgaggcaggcatccacttccagacaccctccccgcccccgcctccaccgaccttgaggcgagtggggtttccttggggcatctgcaggactgggggtgggtgtgtgtgtggggcggggtggcggggaaccaggcccccttacaaggactccggagcgggagtttggaggccgtgagtggagaggcctagtcccagcggagggggccgcatcggagtgctggggcggaggttcgaagcgtgagaaagaagcctgggggcgctcggggacgagggggcggagtgtggcgagaaggccgggctgcagggctcaggaggggaccgcgggtccagcgccctccccgtcccgcccccgcgcgcgtgcactcgggctggcccggaatccctccccagggtgtcttctgccactgactttcccaccctggctgcgcccgcgcgcccccgcggctgccaagctccaagccccgcgtcggtccccacccccgccgtgttcccccctgccaggccgtcttcctgcggttcccagggtcccgtttggcggccagagggcgtcggactcggctggcccagcgaggtccagcccgaacgtgtccttctgcctctctgcccctggggaccagggaggagcctccagggcgggggaacgagaggctactggacggcggcccgggactgcggcggccgcgtttctcttcttcaccttacgggacccggctcttccccctcctcgaccgccccgcccgtcagtcctgaaaacctggcgagaggcgcgtactgtcctaggggaattcccctgcaaacagaagggagcccgccctgcgcgtcctggagtgggtgcggcaggagcgcttccaggcactgcgtccccaggtgaggggcggagccggggcgcggttcgcggcagtggccaggcctttgtttccttgggttggggtgacccctggtggtcatccagagcgcaacaagggctactccctggtccagaattcagtcctttccaggggagaaatggagaatgatggagggtggcccaggcggtgctgattggagtagacagccatcctcccgaggttggcactgagggtgatagagacctacctgcctggccaagctactccgccctgcctaagcatccccttccagagctccaggctggtggggttttattaagggaggcggtgctccttacacaggcctcttcctgctccccgtaaccctgtcgctggaggtgtctgtgggaaaggccaccgacatctacgctgtcaatggcacggagatcctgctgccctgcaccttctccagctgctttggcttcgaggacctccacttccggtggacctacaacagcagtgacgcattcaagattgtaagtatttggaggaagaacagtacagcccagcctccctcacccatgcctcgcctcctacgctctggtcccttctggactgagacccactgcgatggtccccagaacccaccttttgccaccctttctcccagtattcttttcagagcctgccaggaaggatgtaactgggagagatgcttagatcgtgttgccagaattcggggactgttggaattcttggctagagtcctctgtctggtcttaagaaacacccggagcttggattgcttgtctaaaaatcaatagtttagtctaagaaacaggagagagaaaggccttggaaagcttggagagaaggaatgagaagagtctgaatgagggaagggctgagaagctggactggcagggaaaagagagaggaagagagggagagctgcaggagcattggcgcggctgcggtgggggtgggagtgaactcactagattgtactcactctacaatctagtgggggatccaacctgagactttcacagggaagccacaagagaccaactctggttataattaaatgctgacctcagagggtgctgacgggcagagctgtgggattgatccaggtcttgacagggggccaaaattcagttgggcaggtgacatggtgtcagcaaaggctgggtgggaggtgacagagggagatgagtgcggtgcttgcag

SEQ ID NO: 5365 - DNA, 6000 bp, Homo sapiens
atcctaacatgtggtctttgcctaaattccaactctggaattgtgtttcacacctgctgttttgctccctccaggattcagactatgaagagacatattgatgaaagtctgtatgacacaagaagagtcacctaaagacaggaaacatcccattccactggcagctaaagcctgtcagagaaagtggagctggcctggaccatagcgatggacaatcctggagatcatcagtaaagactttaggaaccacttatttattgaataaatgttcttgttgtatttataaactgttcaggaactctcataagagactcatgacttcccctttcaatgaattatgctgtaattgaatgaagaaattcttttcctgagcaaaaagatactttttgattcatctttgctctggaatgtattacatgttttcttccaactgtttgaaggagaattttgaatgtttgccacaccgctgatacccaaataattttttaaatgaagtggagcttgtggcttcctgatgtgtcaccagacaaaatattcgcttgggatatgtattctttgttttttgctccatgtacactttcagctgtgagttagtatagggcgtatacttaccggtttaatgacctcaacctcagttgtgtttggataacttagggtgtatacccttagtttccttagagttggtaggatcaagtcattggtttgctttgactgggtttttaaagtattaagtacagtgtcatcaatttacagttaaggaaaggaatcgtgaagtagaaaaattattttctttagtcttgctggtacaatttgggctaaggagtctttgttattttctgtcttgcttttttttttttttttttttttttgaggcagagtctcactctgtcgccaggctggagtgcagtggtgtgatcttggctcactgcaacctctgcctcctgggttcaagcgattcttgtgcctcagcctctcgagtagctgggattacaggcatgcgccaccacacccagctaatttttgtgtttttagtagagacggggtttcaccattttggccaggatggtctcaatcccctgacctcgtgatccacctgcctcggcctcccaaagtgttgggattacaggcatgagccactgtgcttggcctgttattttattttcttataactacaacttttcttcttgaattttcaggtcagaggcaagaaaaactctttacaggtttttagtggggggcttatggagtatttcaggagttctttgcaaattaaatcatcttttcacttgtattgtttttcaaaactttgttgatttctaaaatgtgccaactgtgagtaaactatggtatttgcaagtggtttttacataatatttgagatgaggaagtgagattgtgcatgacatacttctcctttgtattctctcagtgccttacagcaggttactccattctgctatgacaacttgtttcaaatgttaatttacataggattttttataagccattaaggcatatgtatagtatatcagtaaagatggatggtgcatatataaatagtcttctgtaatagtgattggatttacttctcaattatgagagacaaaaattatcccctcacctgtctctattctttcaacaggttgatcccttttcatgatttttcattaggtggttcaggaagtttccatattacagcgcttcagactgtatatgttagtttaaaaatcacttttctctctctcaacttctttcttttttttttgaagacttaatttaaaaaatttgggttgttagatccgtatcatagatttggcctagcctcttctgttaacctagtccacagatgagcgaatctggttagttgaaggacattgtgatttgactctggtcacgcgaggaagtagaagggcaaagacaggaccggcagtttacatttccagtggttaaacctcacggtactttgggactgcttgttaacttttgtggttgtctgaggccaatctaacgtgaccatttctgacacctcaacagagagaggaaagcaacttgagcaatgagagtaaataacttgggctctcagagatttgaagatagagatctcattgtgagggggactattttgcaggtcctcatttctccaagaaagagatggtgttacaggaacccactgaaagccatatcccattaaatgaggaactaattttggctgggccttcttgtaatgtcctcgcaggtgtgttgtgaagattaatgcagggtagtatgtttgtagattgacacctagtctaaacttgaggtaattggtgctctgtgaatactcagtcgtgttcttttatagccttaatcatgatttgaactagtcccttgctttttaaatgactgaatgaagtccttcgtggtaagggagtacgttgataacttagtttactatatgggtttgtggtcgcatcccagtcatcagctgctatcattttccttcttcatcccttatactgagatttgggttacagctttttattcttcgaaggatcacaaagcagtgtacagacacctgccttctttaaggatgaaaggaagataaagtggtctttttttgtttacttatttgtttcacctcttgtttgagtaacttctaaggtgctattctctctctctttttgctacctcatgagctcttgtcacagccatggaaaccagcctcgtttagaaagggaacttagttcagaaggggttaaaagccttccagaatttttctttagctgctgaagtttttacatgtggttacatgactttaagttttatgcattacgctcttaattctattacaaaatgtggactcaccaattgctttgtgttttccatgtgacctgttacttcaggctacttggggaacatcttagtcctctgtagctcctgaacccagcactggtgcttcaagagagaaggtagcacgtctttgttcaaaacaaaacaaaacgacacttctggaggccacatcctgaatatgaatgttctactaagtcactcagttatggttctaaagggaaactgtaagaagacccacaaggagtggaccaagactattatttaattgcacaacttgaaactttgctgccagaagaggcagctccattcctttgactccagtgttgggctgttaactgctgcacctcattgcctttttttgtttttgtttttgttttgtaggagggtaggcactgttgggccatatgcacaaatattgtaactcttggtatctttactgcatcatagtcaataaacttctttgtaccctttggctaccttttggtgtgtgcatatctacataaaaggtgggaattgtcatgtgaaaaagatgggggtttgtggtattaaaagctgaattaaatttaaaagagtttaattgagcacagaatgattcatgaatcaggcagtctcctgagccagagtggactcagagactccagcgcagccacgtggtggaagatttatggacagcaaaaggaaagtcatgtacaggaaacagaagtgaggtacagaaatagccggattggttacagctcggtgtttgccttatttgaatagtttgaatcattggccatcttcgattggccaaactcagtgactggcacaagagtagactagagtccgtatactattccatttacgttatagttcatgatgtacagagaaacctttaggccaaacttaaaatatgtaaggaggcagctttaggctaaacttgatttaacagtggttttcagcatcgtgcaaccagtcatgtcggagctgtacccccgcaagaacctgcagaggttccgtggtgtgctggaaccagcttacatagcaagagctgattacaggctgagtacccctaatctgaaaatacaaaagagtggttgctatttcaactccaaaatctgtaactttgagtgccaacatgatgctccaaagaaatgcttattggagcattttggattttcagactagggacgttcaacttgtatgtattcggcaaatattctaaaatctgaaaaaaatatgaaatctgaaacatttctggtcccaagcatattggataagggatactcaacctgtattaagttttttaggaattttgcaagccagttgttaaactgttggtagcttgaaataggttatgatgggaatatttatgctgtggagattgctggctctctagcacatcacttctcaaggaccatgcagcgtagtgcttgggagcaaacgttcaacagcttttcagatgatacaggacaagttccatgagtctgcccatgcctaggtcaagccaatctagccgaggttgaaggtgcgtacattgagaacacctattttgaagtggtgactaagactgagaggtatcttgaagtgaagaaaccttgagttctaatctaggatgtccaagtcacccaagaggttctctatgggaatcaatggctgcctgtattctggaaatgctgatatcacatggccagaggaaactttcatgtctacatggtgagttggaggactgggcaggcgtatctttggaagcagggattgggtgattgcctggcgaggttgcacctctgttttgagaggaaaaataaaagaggttgctgtatctttaacacagaaggttttgtgttaatattacgtttattgtattttgtttgcatgaaatggatttctttctcagcacctatttgcctggtgccattcaagctcctaccctcagagggcttgtcatctaaaaggggagatggcacctgaagaggtctgagtgtgaggttcacctcagtaggttgaatttgtcacctctttttagaatgaaagtatacataacaattgggtaatgggccagatgactgaaatgagaaccttgatttagaggttcctgtttgcatctctgcaaccacttcagaaggcacgtgtttggtttgctctgagcctaacctagagtgctcgcagcagtctttcagttgagcttggggactgcagctgtggggagatttcagtgcattgcctcccctgggtgctcttcatcttgggtaagcagttgctttgaatttcttaagccattttttgaacttttctcacacagaagtgtgccagtcctgaaggctggttgaattggtagtctctcaggattgtgaagctgcgattgcagaactcttgatctctgcagggggatgtcataaagtagtctaatgggtgctgtttcagttactgtcgtgtagagtaacttaggtgaatctcctcagcaaaaagaggagcaaagtttcatcataataagagtacgtgacaatgattatgacaaggcttcagcttttaagtcacccgtgggtttaggtggagctgtgactggctgttcttgagctcacagcagagctctttcttcactgtttttctttttagaagacagtttttaattttatttttaaacaaattttattgtgtgtatttaaggtatacaacatgatgttgtgggatgcatgtagatagtaaaaagtttactatggtgaagcagattaatatatccatcattttacatagttataccactgtttttcttctccccattatagacaaaccaatatttaacctttagaagcccgagacttaaatctcccaagaaagctaggctactgtccatgcttgttacaccctcagcacagccctgaccttgggaaaggctgatgcaggatggtttaggtataacctactctggagaagagagcaggagtaaggacctccagggtcccattcgcgtagagcattaaccgatgtgacctagactgtgttacagaagccacgtgacctaccagtctgtattcaatggcttaacaatggaaaatgagggcatattttaagacgcatggcttagagtggttatatggacttgtagacctaaaaacatctgagagcctagaagtgcacagcagtgtgcagatagattgagaggacttggctctgcaggtggacaacactctgtga

SEQ ID NO: 5366 - DNA, 6000 bp, Homo sapiens
ttagtttggaatcccaaagtgcccacctcatgaaaccatcccaaagctatctgtcccctgaggctatgacccacttccgagcagcctagacagccccaggctactggcttccttaaaggacagtcttctgtgcttgtttggtggggcaatgcgaagggacgtcaccctgggctctaggctctgacctcatttccctttcaccgcagagacaaatcctccacccccacctggcttcactctcctccagcggaagaagaattcagaactgactgtccttggtggttagctggctttgttttcaggccagagaggcgaatgattagttaatggtgttaagtgaaggaagggggttgggcagggaagccagctccatgcccagccgggcctgccagggcaaacggcatccttcagccattcccactccagcccagcagacaaaacattctcatctagtcagctctgggcctggggccagtccatacattcactctggagggcgagccagcgtcctcctcttgttctccctgcaggctccaggctccaggcccctggcccggtgggcctgggctctgcacagcctctggctggagactaatggcattggaggaggggtcgagaaggctctgaaagacaagcctggtgtggttttccagtcatctctgcgtcatcaaaacgccaccccggagcatgctctcaagtcacctggccatctccagggtttgctggctcaccctccacctcccccagcgagcaaaggggtggccccgctgggcaacagacctctacccaaatccaggcccctatttggcactccctggtggaggcgcgccagcagatgtggaccccttttctgaggccaggctgctggggtcagagtgaggcaagagcacctccccctccctagagccttagttcaagaggccagaagacccagggagaagccggcgttttgggagaaggggagctgcagagctccccacccaagcaggtctgatttgattcttccctcagctatggacccacaatcaatagggctggggaagacatggggtgggggaagatcagcgctgccgggatcctttcaatcatcaggaacagcaacaggtttgcagggtcaggctggggaccctcgcccattaactctttcttctccctgtttctttctcttaggtgaggggaaactgagttccagggtaggctccagagtgaagagggaagaaacatgattctcaaggcccaggtctggacaagtgtgaacaccttgggcctgcgaattcagccccctccttcctttctctggtcaaaggctagacttgcaggagcttgcgtttgaagggacagcccagaaggcatcgtctgcactccccatacaggtacttctgggtctgtgggactggcgcagggttcttctcccaaagctgccagcactgaggctgaggcagtgtcaggccggcggcagcggcagtggtgcaatcgttctgggaagcgatagaggccggcctgaattctctgtggcaagggaggggagcccaagtgggaggccccttggggacaccgaggaccaggtccgctactgctcctcccccaggaggtcccctaggggctacattggctggcaggggctgagcagcggtgagcctggctggcttcgacccggggcgactccgggcatccgggacagcttctcctcgctgccacctcggccagtcagaccccgagacacctgtcactaccccctcagccttcccaagccaggagcctgggagtccggctctggcctacctccggcagcgctcctaggcgcagctcccgggctggcggcgccggggcccgccccctagggctgcggcgcgcggggcgggggctgggggctgcgcggggcggggcgggcccgggcgctccgggccccctcccccgcccccctgacgtcagcccccggcagcctcgagctgctcacttggctctcgccctccggccgggaagcatggggcttcccaggctggtctgcgccttcttgctcgccgcctgctgctgctgtcctcgcgtcgcgggtgagttcgctcgcaggggggccgcgccccggctaggggtctgcggtggagcgtgccagggagcagagccagcggcgcggcggggtcggggcgttgcgtctgggaggacgagcctcctccctgggtccccgatccccgggcgccttgcgcgcgagcaactcttctttgcagccagtttgcagccgggattctagagtatcccgggagcagcactcggaaggcggggaggaggctgcttctgggaacgagaaggggtggagctcagcctttcggggtgctggggggtgggtggtccctgaggtgctcactctgggggcccgcaattgaagccgggcaggaggcgcagctggggcgcatcctcaaagcctgaattccgcgcccgcctgttgctggaaaaggcagcttccttcgctggagggggtgcgccgacccaccccttcccccttctgcctgggcatcacgccaggctggaggtgagcgagagcgggaggttcggcggctcccgcccgagctgggcgttggcaggggttgcggggcggtgtgggtcgcctcgcgcctccccgagtgatgggatcataggggacagagatgagggatggaggattcccatactggaagcgcccgctggcttattttggggaccacattcaggtgggaagtgcgcccgggcacctcggagcgtttctccggatccgcctggtagcagggcgctctcgggtccacgctgcccttgtatggcccgcagcggtgtcgcgtgtttctcttggctcccattccgccgtcccagccgctgtccggctggggaaggggagggctaggcaatacccagctcgctggcctcatgcccagtgccaaccatgtccctggggtattccaggctactgcctcccaggctgactttatttctggggaaagggctaaatcgggctccacagttgcagccggtccagctccaccctgccctgctcttctagctctgggaggagtcaggggtctgaggctctgggttggagaccccaccttccacctgccctccttgtccgagagccaaggtaacaacccaggcatcccagagcccaggcagatggtgtcgagtgacatcacctcctcacagggctggcagcacgctggcaccactgacgtcactcctgcccactgcctggcccttgccctgacccctgggggagactctgacctctccatccttaccagctacctagggtggggtccgcgggtgtgtgcggagtgttcatggaggtgctgctgagggagcatgagaccggaacttccgccagagttagcccgctggggagtgagggcagggattttggagggcagaggatagagcagtggtgtcttcccctggcggtggtgacacaaaagggcctgtgtgccccagcctggcacattctttgcattcccacactctgagctcacccggagaggagggggcctggaaggaaaggggccttcctcttggccccgagcctaggttgcccctttctgcccctctaccagcctcagctggagctgttcggtgctcagtctctgctcaatctctgcttggctccaaggacctgggatctcctggacggggagagggctggcccaggtggggcgcgggtcggggtgggggtagagcgttcagaggacagggccctctgcagaccctctgagtggcaggaaaaacagctgcagcagcgctgcgaggggaggggcggacagcagccggagctgacacagctgcgggggccccgcctccctcccccaggtgtgcccggagaggctgagcagcctgcgcctgagctggtggaggtggaagtgggcagcacagcccttctgaagtgcggcctctcccagtcccaaggcaacctcagccatgtcgactggttttctgtgagtgcttgggctcctgcaagagcagcccggggagggagactctgcccctcttgtagcccaggacccttctcctcctctgtgtctcctcccattaggtccacaaggagaagcggacgctcatcttccgtgtgcgccagggccagggccagagcgaacctggggagtacgagcagcggctcagcctccaggacagaggggctactctggccctgactcaagtcaccccccaagacgagcgcatcttcttgtgccagggcaagcgccctcggtcccaggagtaccgcatccagctccgcgtctacagtgcgtgaccctgtgtctgccagcagggtagtgagggtggtgggacgtggccagatgtccccctcatttctattttcttgtagaagctccggaggagccaaacatccaggtcaaccccctgggcatccctgtgaacagtaaggagcctgaggaggtgagatgtgtggcaggtgggctgggcagctggtgcgcagccgctgagatggggcttgaagggggctcggaggcagggagactcacaccctgtgctctttaggtcgctacctgtgtagggaggaacgggtaccccattcctcaagtcatctggtacaagaatggccggcctctgaaggaggagaagaaccgtgagtagccctttctcccaaaagccacccttgggccaggtgtggtagctcacacctgtaatctcggtgctttgggaggccaaggcaggaggatctctggaggtgaggagttcaggaccaccttggacaacatagggtgaccctgtctctacagaaaataaaaaaattagccaggcatggtggtgtgtgcctgtggtcccagatacttgggaggctgaggcaggaggatcatatgagcccaggaaatgaaggctgcagtgagctaggattgcaccaccacactccggcctgggtgacagagcgagaccccatctcttaaaaagagctgtccctatggtactacacaggaactgccttatattttcattaagcttttaacttaaaaaaattatacaaatggtacttgaaaatattttcatgagaatttaaactgacaaaaaatctagaagtttcttcttgcctgagaccccccctcccagaaataatctctgctatcagggtgtgttctttcaagcctatttctatgtatttgctcatatatagaaatatttctagaatgatataggcttctgtgttttattatctaaatcagtcattcttaaccaggggtgattttgtaccccctcctcctaggagatacttggcaatgtctggagatatttttggttgtcacacatagagggggtgctactgccatctagtaggtagagagaccaaggatgttgctaacatcctatagggcacaggacagcccccacaataaagaatcaacgtggcctaaaacatcagtagtgctggctgggctcacgcctgtaatcccagcacttttggaggccaaggtgggcggatcacctgaggtcgggagttcaagaccagcctgtccaacacggagaaaccccatctctactgaaaatacaaaagtagccgggcgtggtggcgcatgtctgtaatcccagctactcaggaggctgaggcaggagaatcacttgaagccgggagggaggtggaggttgcggtgagccgagattgtaccactgcactccagcctgggcaacaagagtgaaactctgtctgaaaaaaaaaaaaaaaaaattatcagtagtgctgagaaaccctggtctaagtggtggtgtatggtatacattgttagacaatttcttttatacaatgtttctgggtcagtctatttagatcaactgatcgttttgcttactgccaagttttccatactacgcatagcaggtagtcgagttcaccattccccatttagtggacatctagacggctgctcgtttttatcattgcagcattctttgcacacatccttggatatgagcagacatgaaaatgtttttctagggttgacactgagcagtaaaagtgctgggttgaagggtttccag

SEQ ID NO: 5367 - DNA, 6000 bp, Homo sapiens
tatgtaattcataatatacaataatctgtcacgttttcaaacctttttaagcagcagaatcttcaaaatccattaagagatatctttctcaaaagcccaattttcaagcacatgaaaacacatgctctttaaatgtggctcctgttgagcccaggaaattctagggtttccaaaacacaactggaaaaccagtgaacaaattaaactcctcagtctgcagatgagaaaactgaggtccagagaggggaagtgattggcagaaagtggcacaggatgtgagttaatcaacacattttcattacaagcctatcaggtaccaggcatgttctaggtgccagagatatagcagagaacaacagcaacatgatccctgccctggaggagctgacagtctaatggggagtgaatcaggcactataaaccatcacgaaagtggtcccaagtatgcaaagtctatagcaggggatgattggaaatcccagtggctcctccttgaagcctcagagcagggtgagatgaggctgcagaagcaggcatgggccccttaggccttgttgaggacttgacactggtctaagagtctggcaggccaagaaattgttcctgggcattgcaacttgaccatctgcatttgaaaataatccactactaaatgtaatgttgtatcctggattaaattgtggaacaaaaaatagacattagtgggaaaaaacctggggaaatctgaataaattctgtagttcagttaatagtattatactaacactaatttcttagttttgatagatgtaccatggttctataagatgttaacattcagggaagatgaatgaagggcatatgaaaactctgtaccattttcacaactctattgcaaatccaaaattatttcaaaataaagcttgtaaaatatatataaaccattttcaggaaggggaaaactggatgtggagagacagatgacaataataatgatgactaatacttagacagtttttactgtacaccaggcattgttccatgcacttcacatgtttggctcaaggctcatttaatcctcacaacttcaagaggtaggtgctcttatttctccctgttttacagagaaggtacctgagcacagagaagttaagtcacttgcccaaggacacatagctattgggtgtcagagctggagtttaagaattccaatccaggcagattagctctccagagttccatgtgctggactgttacattttactccccatctcagtgcagactggctatactgtcagaaagtattgtaaagaccaggtagaaatcatgagtgcatggactagattaataacaggagaaatggagcaatgtcactagactttatatatatatatataaagaatatatatatataaaggatatatatatataaaggatatatatatatatctcaggggcatatcaggggcatatcaatgtcactagactatatatatatatataaaggatatatatatatatatatatctcaggggcagaatcaacaaaattggaacatggtggttcaggaagaggtaagaagcaagagtgactcctgggctcacagcttaagagcaggaaccaaagcctgctttcctgctgcttgatcctgtgtttcttccctgtcactaaaggaaaccttctggtccttttgccttctgtttgcgcctacctgtccctttctcttatacatctctaaaacgcaaaacaaactggaatgcctactgtcctaacacaggtggcacctctcccacctccacgcacctccatgttcttgtacaagctgttccttccacttaggagtctctctcctgcctcttttggtccaaatctgatctgtccttcagggtctcagttaaatgtcccctcccccagcaaccttccctgcttgtttaaagatgatgagtgaacaaccatactatatcacttacttgcttccatcttctccacccaaccaatccccaggcagccacatcttccctgctggccgcaccctctttggaagctcatttaagatcagaggatcaaagaagcctgacctaaagatggagagagtgcagccgggtacagtggctcatgcctgtaatcccagcactttgggacaccaaggagggcaggtcacctgaggtcaggagttccagaccagcctggccaacatggagaaaccccgtctctactaaaaatacaaaaattagccgggcgtggtggcacacacctgtaattccagctactcgggaggctgagacaggagaaacacttgaacctgggagacagaggttgcagtgaggtgagatggcgccactgcactccagcctgggcaacagagcaagactctgtctcaatgaaataaaataaaataaaattaaattaaattaaaataaaataaaataaaataaaataaataaaataaaataaaataaaataaaataaagatggagaggatgggagggtaagagcagggaacaagaagacattggtacatctgggattgccccttcaaaccatgccttcagctcctgcagtgtgcctggcacagagctaaaggccatcacaatgaattcaattcaaccctggcccttaaagcactcagcagccagatgggagattcccagctgccacaaactaaatctgatagcgtgttccccagtttaaaaccctcctagcagctaccgggcatgattcacgaatctgcagacctctcctttcctcaagtcttaggctcaggctaaaccagtcaaccctttgtgggccccctactcacctgactattgcttaccttcattcctttgctcgtgctgaccctctaccttaaatccagtctcttttatgtctctgccctccagcacttaccttggtctgatagatgactcaccgagaccctgtgttcgcttccctgaagcctttacaccaaccccaccccgggctaaactgggcactttttctgtgacccaccaaacccacacaatcccatattaaatatttgtttacgacatccgtttctatgtctgtcttcccccacccttcaactagattgagttccttcaggacaatgatgatgtctctgtatccccaagccaggcactgtgttttgacacaaagaaagcccaggttacatttgttaaatgtaaaagaccatacagtgagtgggtgagtgttcatgacaatgccagatctgactacttccgcgagaaaccgagacactccagggccggattccagacagtgggaatatggcgctgtctttgccccttctccagtgaggaaccagaatttacgtgttatcagaaacagccacttcccctctgctcctgcccgcctagagggctgggcaaagggtagagggagcagtgtccggccagggtctggggagaattcggctctccttagtgggaaactctgtctgtcttcctcccccagggggaggggatggggataggaggaccagagtaaggggaagagggaaggcccggagggcgcagtcgccttggcagaaatcctaccacacccggatgtagtgggtggtgaacgggatggggcggagagtccctgccctgccagggacactgactggacgatccactttcgcgggaatcccacaaatctctcaaaactaaggtcctggaaactggaggagagctcgttttcaggctatgtttgggcaagggcggggcgcggggtgcttcaatttttggaaaaggaacccccgaagggagcagggattagaaaagaaactctaccagaaacctcagtgggcccgtctcacccactcatgcccaccactgacttctctggcagctccccgtcgccccgcgcaccgctgcctctccgtggaacgtccaagtggtgcagaggagagggatctccggagactgggttctgttgcgagctatgccacgttccgtcccgggcggaactcttctttgggcctttgtttcctcgtctgtgaaatggggccagggtgggagcagagggcttgcagaagccctgccagctcccacgctgctagccgggattctccatcccgccctctcctccaccgccgcccccggcccggtcctaactccacccccacccgccgcgcctcggcgccgccggccgctaggggtcactgcctgcctttgtcagcggaggaggagggcagcccgcgctccagccggctccccagctggaaggcggccgaggggtagctcccgagcgagggtcctgagccggaccccgcagcccgcgctcgcgatccgcctctgcttcggtcgggaaggcgcgtgcgctcgggctccgaccgggccccggcgggcgcgcatcgaggccaggagggggttaacgctaacccctcccctctggctgacatcacgggcgagcgggtgagaggctggagctcggcgagtgagagaaagagagcgagagcagcgagcgcggctccacattgttgcggatcgccggcacccggcagagcggcggcggctgggacgcgcggcgcctccgacccgttctcctcgcgcccggccgcgcagccagagccacccgggccgccgaccgccgagccccgcgcccgccgcctgggccccgagccttctgcgccgcccgggtgcgtcccgccaccctcggaggacggccggccatggacgcctgcaagttggagccgagcgggagggtgtgagcgggccggggccaggagcccgcgccgcgcaaccgggcagccgggcgcgccgggggtgggtccctctccccagccccgctctgcgtggaagaagagggcggggaccggcgccgggaggagagcggaggaggcgaaggggcatgactcgtgcaacttgcggcgggcatctgccgagcctctgagccggcggcggcccggggcccggactgcggccgcgcggatcccacccagcccaccccgccccggccgacggctgcagctgacctggatccttcgagcgcccgccgaccgccagcgatcttccctcatcttccgggctggtttctgctgcgcgaggagcgctgccctcgccgcccctctcgccggacccccggcccccgatggctcggatggggcttgcgggcgccgctggacgctggtggggactcgctctcggcttgaccgcattcttcctcccaggtaagagcgctcacctctgctgtccccacccccatccaatgcctccccggggctgggagccggatggcgggcacgactggattgtggggagtgaaaggagccagaaaagttgggtcacggcttgggtaaagggggtgggaggtggcacggcggagaaagaggttgagaagccgaaccgcctgccctgcagggaagcagtcagatgcacgtctctatgtagcatgaaagcactttctccgctcagttctttacaaaaaataataatatgtaatagcgttctgtttatttaataaccagctctctgctcgggaagcagtttggaaacactgcgtgttacataaatgcaaaataatcaccgtaatcaccgtcttggggtgggagacaacagccccagggggagggcgtcagtctcggagctgcgggtttggagtatggcgggggggcttcgtctctttcggcggcccctttgccagacggctcaggacgctcgggccccctcccgccccacaccgccccacagcgggcgcggagagtcggctgctgcggcagaggcggctcctcgctcacctgcggttcctttcctggagggtgaggccggggcagcctcctcccggcctggcgcgggaccgggctccccctcggaactctgctcccagctctgggggctctccctggaggagacaccgcgggcttcctgccatccaagtagctgcatgacccactttcccgagggtgccccgcgtgtccttcctcgaggtgcgggctgccggcagccgaggggttaacctcgcgcccgaccccggggtggccctggtggcccattctgacgggtggggtggggacggaggctgggaccagcccaggca

SEQ ID NO: 5368 - DNA, 6000 bp, Homo sapiens
gtgcctgtagtcccagctactcaggaggctgaggcaggagaatggcgtgaacctgggaggcggagcttgcagtgagccgagatcacggcactgccctccagcctcggcgacagagcgagactccatctcaaaaaaaaaaaaacagaatagaacagagaatggaggagagacagtgttcagagacagaacggctgagggagggatgactcttcagattcaagaagcataatatgccctgagcaggatgaataaaatacatctacacctaaacaccaagcatctttaaagtgataaatggcagctactaagagaccctacagcaaatatcatctatgtgttgaaacctcaagtgcctgtaatatcagggacatatcaaggagactgcctctccctgtttctatcaatattgtgttggaaatcctaggtgaagaccaagtaaatacaaggaagaaaaagacttggaaaggaagaaactaaattatcattatctatacctactatttacataggatacctaagagaatctacaaaaatactattaggacaaggaagaatattccacaaaattgttgatagaaatcaaaatataaaaatcacctatattccagcaacaaatttagtaacaaatttaaatatttaaaatattaaaatgcttttaaagttacaatagcaagaagtactccccagttccggggataaatttgacaaaaatatacaagacatttaaagaaaaagttagaaacctttactgaaagactttaaacgtaactagatggagagtaaaacctcacaattgtaaacaattttctcccaaattgatcttcaaattcaatgaaatcccaatcaaaatgcccattagatttctcaaagaacttaataagctgatattaagtcacatggaaggctaagtagccaaaaatagtcttaaccaagggacagccagataataagtgttttaggctttgcaggcgccataggtccctgtcatgtattgttcttctatttgtttgcaaacaaccatccttagctcttaggccacagtttgcccaccctcggtctaaaccatttcaaagaaagagcagtaaatttgcaagaggttggtaggatttgtcttatcggagatgaaggtttcctttgttttctttttttttttttgagacagagtctcgctctgttgcccaggctggagtgcagtggcgcgatctcggctcactccaagctctgcctcccaggttcacgccattctcctgcctcagcctcccgagtagctgggactacaggcacctgccaccacgcctggctaattttttgtatttttttagtagagacgggatttcaccatgttagccaggatggtctcaatctcctgacctcgtgatgcacccgccttggcctctcaaagtgctgggattacaggtgtgagccactgcgcccagccagatgaaggtttcttacagagctatcagaatacagagtttgtgatactgcacaggcatacgaaatggacaaacaaaacaaaaagccaccaatcaggttaatgcatgtaggaaaacctgatatgtgagagagatgacgttacagtgattgaaggaagaatgaactgcccagtaagtggtctagggaaaattcctaatctatatagaaacaaagaaaaacacaaaacaaaattagattccccatctctcatactaaaccaaaataaattatgaggggatttaaacacaaagtaaaatgtcaaacttgaaaattccattaagggaatataagagactctctttatcaccatgcaatagagaggatttcccaaataaaatacaaaaggcacaaatccaagaggaaaaataattttgatcacattatatgtaaagaatcagctgttcattagaagactccataagcaaaattcctagacaaacaagagattgggagaaattgtcaaaacatgaaagcatcaaaggaaaatcaatgagaaaaagacaaagatctcagaagaactggaaagcagatgaacaaatttcagaagcagaaacccaaatagcctgtaaacatgtgaaacaactataaaatataatttcacagctgtcattttgaccaacattttattttatttttgagacatggtctcactgttgccaggctggagtgcagtggtgcaatcatggcctcgacctcccaggctcaggtgatcctcccacctcagcctcccaagtagctgggactacaggcacgtgccaccatgccaggctagttttttgtattttttgtagagacagggtttcaccatgttgcccaggctggtcttgaactcctgggctcaagcaattttcctgccttggcctcccaaagtgctgggattagaggcatgagccttggccaacataataatctaactaaatgctgaagacaacctggataaatgagaagctatacactcctggtgggtgttcgtgtacatatatgggggaaatgattattttaatctgcagaaaaggttgtttttctcttgagaaacacagcagaaggaaatgcagagctgttctgtagatccttgctcctgtgccctgctccttccccatcttgtgttcccacgctgggcactgaagctctgattccctttccctgtgtcctctataggtctgactaccttgccatcccatctgagaacaaggagaactctgcggtaccagtggaggaatagaacaggagcagtgtgacatgaggtgacctacaggaacatgggaggggaaggcagatgtggatggcaggttgtacaagtgactttgttgcccacaactgaagtgactttaaatttggtcccttaggtcactgtctaccctgcctggggtccccgccctcagggtaattctttaagtcagaaagctctgtatgatgtcagcgcttcggaaggtgaactgctttgacctgagtgtcgaggcaatctgaacttgcccatggtaacagaggcacaggattctccaactcccttctttggtcaaagaatttttgggctgggctgggctggactgggtgggaaattctcagtgagttattttatctttggtaggtggcctgaacacctgagggactggacatcccatgttcagcaatgtcaatggcatcaggagggcgccccaagggccccatcgcttcccttcatgcatccattgttctgttcattcattcatccatacatccacctgcctctgagctttcacctctgactccctaactccatcagacctctacgcaccataagactctgccagaactgagaagccaacatttctacatagactcaacctcaccctctcctagttttccaacaagacactccaaagccaactggatttctcccctgtgctccaaatgactttgtacaagtgctggagttagcacctccctctgcccttaactggctggaactggttcattctccattactgcaagagaatggaagtcttaatagaaggaagcaggagtgattagttcgggttaaagcaaaagtgtgtcatgaacttggattccctgaagtcagttttgtcaggttcatggcccactttgctacagcatcagagtgaagcacgcctgtctaggttctccagtgacagaaagatcctgaagcatggactaacatgctctctggagcttagtactccagagctagatcctgatgggtctctaaggttccctccaagaagacaaggacaggagacttgggaaggaccaatggtaatttaagtggctcttaaaaagtcatgcaacatgtttctggacacgttcctgatcctattgcgataatgtatgtgtgccctccctgtgggcacaccacctgggcattaggactgaaattcctgagttcttcctctcaaaatttctgtgcaccagtattattcctcattttacatacaggaggcaactaagactcatacagggctcaactgaataagaggcttaagaggataaactggagcagaaataagccttaggtgctgcccagtttacacttcctgggatggatgtttttgtttgttttgttttttgttttttttgtttgagatggagtctcactctgtcacctaggctagagtgcagtggtgtgatctcggctcactgcaacctctgcctcttgggttcaagcaattctcatgcctcggcctctccagtagctgggattacaggtgtgcaccaccacgcctggctaaattttgtatttttagtacagacagggtttgactatgttggccaggctagtcttgaactcctgacctcaaatgacccacccacctcagcctcccaaagtgctgagattacaggcgtgaggcactgcgcccggtggataactttgtttctgaaaagactgacattgaacttgtctatggcaatgcttctttcacaagcacggactgggctgaggtcaactctgatagattcagatgactagaaattggccaaaaaagcagggagaagaacatgaggtagacttaaagaacttcctttatgtaaagatctgtgactctgaaatatcctccaaaaggagagtgcatctgagactgatatttaaactaagaaaaatgtttagtctgagatggatcataagtaaatgagcagtgtgagaggggagggatgggtaggtgctttccaaatacttcgcctatgaatgcataattttcagatttttttcccctagattttgagggagcagagaaactggaaaaaactttagtcaatatctcgtgtttcattttaattaagtgacaggtccaagtgtgacatccttcagcacccagggacaagagaggggaaagatgctttatggaatgtaagaagatgaaggtgactgggattcagcgagagagaggtccctcagacctgggacctccctttatagggaaagaccatattccataggtttagggctttaccttaaaagctcatttttttcattcttccatccctaggaaagtacttaaaaccagacttttaaatttttatttatttattattatttttttgagacagattctcactctgtctcccaggctagagtgcagtggtgcaatctcagctcactgcagcctcaactgccccaggtttaagcaatcctcccacctcagcccccaggtaactgggactacaggcatgcaccaccatgcctggctaatttttgtattttatgtagagacaggggtcttgccatgtcgcccaggctgatcttgaactcctgggctcaagcaatctgccagcctcagcctctcaaagtgctgggattacaggcctgagcaactgtgcctggcccaaaaccagaccgttaacacattaaagagtctgattttgttgaagaaaatatttgcaataaattcaagactcttcttattggtaattttccacacaatccctctgaaataagggagaggatatagacctttttaactttatagttagaaaaattggcctcagtgtgaaatttttccagtcccatagctcatggatgccaccagcttgcggtagtagcaagatgcttactaccacaccgttttcctcggtggcccaatagctcgtgtatctaagttgaacccggcagtatgcatgattgcctttttctcttctttttaaaaaaacccaactcagatgctgcttgcgtggcttttaatgaagctgaatggtatctatcacttatttatccttgacaggttatcttccccactcttcctttttctaacttctccattcttctcattcttgacactttcattagaactatatggtttacgaagtattttcacttaactattttatttcttctctataactggtcctgtgaggtcacattacaaaagaagaaactgagggtctctgaggttaagtagctttactaaattataaggaaacctagctggtaggtagacagcaagaatccaggtcttctgactcctctttcagttctctttccacttagaccatagctgcttccttttcttattttttagcttccatctaacc

SEQ ID NO: 5369 - DNA, 6000 bp, Homo sapiens
ctgcccagtacagtagctgctagtcacatgtggctatttaaatgtaattttaaactaaatataattaaaaatgtaatacctcagccacatttcatgttctagtggccaccatattgggcagcagatacagaacatttccatcatcacagaaagttctatctgacaccgctgttctagatacttagggaatttgacttttatttgtctttccaggaagagagacatcatgcagaatattgtacagattttggaatcggtacagttgaaatgggaactttttcagagctggacagacttttcaaggctccatctttctaataaactggccatttttggaattggttataacacccgttggaaagaggatatccgttaccattatgctgagatcagctcccaggtgccccttggcaagcgacttcgggagtacttcaactctgagaagcctgaaggacggatcattatgacccgagtgcagaaaatgaactggaaaaatgtttactacaaatttttagagatcactattagcgaagctaggtgcttggagctgcacatggaaattgactggatacccattgcccactccaaaccaactggtgggaatgttgttcaatatttattgcctgggggtattcctaaaagcccaggcctttatgccattggctatgaagaatgtattgagaggcccctctcaccacacatggagcaaagttccctggacccaggaaaagagggccgggttgacctggaaaccctttcagcacaagcctcattacaggtggaaatagaacccacccgaattatctattgctacctcgggattgctgaggtcaggactctacagcagtgcttatttttacatttccaagcgaataccaaaaccttcagcaaagattgggttggtattaacgggtttttgtctcagaactgtattgtggatcccggagtttcccccaaatccatctacatcaaatttgtagaagtagagagggattttctttccgcaggctctttagttgagtgcctggaaaaagccattggataccccttaaaatttaacaactgaatgtcatccttcataaggatttgggctcttagctccttcttctctactcacttcccattacccggaccacccctcatccagatgccgccgtcagactcttcatggaaaccctttcttcaattgggccagtacgacttctaaggaatcatagtagacttgggccagaaaaaacagacctcacctgaaaatgctcattttgagcaagcaagatatatagcgaacttgcatggtgggtcagctatttcttttttaaaaacagaaaaacaatttttaaatggattttagagccctaatataaacaaatgtaggtacattccatattggacaaaacttatactttgagtttcatatgaaattgaaaaattgtatttttttcacaatgtttcatttttacacatctctatgtctctatataagtaatatttacaaccctgaataaataagcaatagataatggcaagttaaatcttgattcacagttaaaaagactttttcaatatcacccttagctactattgtatataatttagattttcatttttttcaccagccaagtgttttgctatttccaatcagtattgcttgcaaagacctttgtttctgtgatgtaccaactttacagttgtgttgccatttaaacctttttttaaaaaaaaaaaattaaagtaattcctggccccttggcgtactagttgagctttttgtagcagagtgtggctgcactggcagtgggggctgcgctctgacttgactgctaagaatgaagagaacaaacagagcagggtatcttcacatcctttcattctctatacctcactgaccaatgtcattatttactgtcagagtaccaaaggtcactgaacatctcattttgtaattctttgaaaaatgactaaaaatgactaggataatccttttgaccctaagtacatcaatttgtaagagactcattcctcatcttttacactcagtactcaggggcagctctcaaggagtacaactggaaaactgatgtaatcttgctatctctcaaaaggaaggaagatccagtagaaattttttttttttttttttttttaagacagggtcttgctctgtcacccaggctggagtgcagtagtacaatcatagctcactgcagtctcgaactcctgggctcaagtaatcctcctgcctcaaagcttcctgagcagctgaaactacaggctcaagtgccaccacgccagcaatgtttttcacttttttttttctttttttggtagagacatggatggtgctatgtttccaccgagctggtctcaaactcttgtcctcaagcaatcctcccaccttggcttcccaaagtgccgagattacaggtgtgagccactggggccagcccaaaagtattcttttaggagagggaattgagaagtatgagtccagtaggaaggtaactgtcatgtttagatctttcagagatttctaatgggccaaccaccactccacttacaggttcgtactcttggctcagagtcgcttactaatagagtagtcaaggatcactttggtctcatggcaggaatttgttagattggttatttatctttatgatttcccagcatctcaggtgctctactttaagtgagccgcaaatccaggtaagaactctcgttcttctcatttttctgtactactgaagatatagttacatattaacaaaaagtgttcttttcctgcagcctgaatgtctcaaatcagtgattttctcattctgatgcctgttggttgattgatgcttatttatttttgtaataactagagagcttataatcagtgagatggcttttatttctgttatttgagtctggggttatggagttgggtactagttcagggaggatataaataaaatgagaatgttttgagtgtagcacctgttctccccaggcagcatctatagtcagaggcctgaggaaatcctcttgagtttgctcttctttggaacttagaattctgatcctaatggctgaggcagtcttgaccatcttttagccataatcccatagtattcattgctaaatgctgtaggaagaaggattattaccaggaattcttcatggcatctctaaaacgttgccactgacgagtcccaaaactaacattatgctccatgcattttttttctgcatcttcccattgttattagttgctcagctggagcagaacatttggggaacatttcgtgaggatgttttagacctaccaaacattaccgagaatgggacattgctagacccactatgagcagcatggagaagatagcaaaggctggatccaatagatgttttcatcatttgccttgggatgggtgggggtagaggacaaagatgagcattgggaaatggaggtttaccaagaaagtagcttgctgatactggatctccagtctctttggccagaacagtctagaaaagaagatagcaggatgtcagataactatgagcactgccgaaaataagaaatggaatatttagaccttaatgaagccttataactgattcaagggggacagagaaagtatattcaaatgtaaaggtaaatattaggaattactttcggaatctaacatgagatgtgattggaagaaacactaatgacctgcaagtctctaacatatgaaactatgaactagctcttgcacacgtttatgtaagcagttcccaggtcgcacatagatcatctgtgtcagcattcatgatttacaccagggtggagagcagtccaccctaaaatgcatcttggtgaaaactttcacaaagtaatggagctgctctgctaacttctacgacttgactgccctcagggtcagaagaaagaaatagctgaaataggagacaggagacagtgaggacaattctttacggtcaaagaatcttgaagagactgcccctgtgtcacatggagacattcactgactacaaatcattggttgcagctttacttcccatgtcacaagtcatttgggatctgaattctgaaggaaaagttagctacagggaatgaatgttgaggctacaccttatgtagcacttgatcaggataagcacagcctgtgtgattagatacttggtgtttctgggttagaaccaaaagactttgtacttcctctcttggaaggagttacttatttggggtgacttgtctggaaacaaaggaggggtgtttacaagagatggtttgcaatgcagactaaagccaagaaaaatttgagtgtgatggaataggaaaaccaaaccaacagcccccaaccccaccacacaatctgcttggccaagtccaagtttgtagctccctacacaagagtgtgagactggcaggtatctcttcctgttgtctgtgcctccactgagctgccaagtactagattctagggtttgcatgagcagttttgtgtttgcataggcatttctcaaagccactgcatggcaggtatttgaagaggagccaggcaggtcacactagaaagaagcagctgagagggcatatggggcactgtatagaaaaagatcttgtgtgaagtgtgggcccagggactacactctgttaaaacagcaaaactatgtgcagtaaatggaatcccgcaggcctggctgcttttcttcccagacagctctgcccgcagagcgggcagcgtcaggaattcgttgttatgctttcttccctcactgacctttgctgggtggttgagctgtgctgggatgtttgaagcattttttttttttttttttttttttttttttggctgttggacagaaaagcaagaacaggtgcgtgcctttctgtaagggagcggcggccgccagagggcgcagaggtgccttttgaccgaatggcgcgggaaggggggcgtaaaattcaattcacagcgaccaagatctagtctcgggaattaaaggatcagagcgcgcctgagcctttcgctgcggggatgggaggcactgaagatttgggggataaagaagaaacggagggactgtcctgtcttccttcccgcagccgcccctcctccccagtcagcatcaggcccgtacgccgctcatttcaggggctaagctgggagcagcacgcacgttgcctcagtttcctgctcagctcccgggactaccttgtgccaaccttccctgctcggagtatgaggcacaggccggggtaatcctccagcctgggctggggtctgctgaactcgcggagcgctttttcctgcccgcgggtgaagattccccgctggcgcgtcccggggcgccctgggctcccgcgcgacctctgccgtcgccctcgctgccgcgctccggtggccgcgcagcccccgcctccaggaaagccacagattcccgctgtgccagggagcccgcgcggccggcgctccggcctctccctgcagctggaaaacgctgctcccctcttcctccttcaggaagaccgccctgattgggccggggatgcggcacccccaagtttggagccagagcccaggagcgtttacatgtcaggtgttacgggtggttctgacttcggatagtccccaaatttcccacccttcctggtcacccttcctatcccaccccggcggaagggaaggttacggctcaggatagttctggagcctcctcttccccctctactcgtacctggctggctcgtggggcatcagagcttacctcacccctccctgcgtccagacctggaggaggccgcagggtcccgccgtccgcgcgctgggggcgcccccgggcggcggaccccgcgcgccccgcccgggaggacggcgacctctccgccccctcgaatgccccgccccgctgtcgccgtcggtccccaccccgccaccggcacacaggcgcgcagacttgggctggagccgccctgggtgtcagcggctcggctcccgcgca

SEQ ID NO: 5370 - DNA, 6000 bp, Homo sapiens
aacctcaaaccctataacataggtgggataggtattcctgggtaccagccaggcagctagagagatgacaagtcagcatctgaacagacaatataacttcaaaagtagtataggttgagcatcccaaatccaaaagctgaaactttttgaggacagacatggtgctcaaaggaaatgctcactggagcatattgaatttgagatgtccagatttgggatactcaacagtaggtataatgcaaagactccaaaatttaaaataattcaaaatctgaaacacttctggtctcaagcatttctgataagggatactcttagtcatgatgttaatttgtctttatatatgtttccacatatctaagagggtttcactaggggccaccgtgtcatgatactcagccaagcatttcctagaaaagttctgacataaactacttagtccttgttcattgtgaacctcagctcattttctgtttctaatttcaatttggtctcagccttatattctataaatgcacagactagtccacagcagtgtcctacagaggaatgaagtctctcccacacaactgtaggctcacagagattaacattaaatgagacctttgcagtcatttctctgatctgctagcccatgagttgagcccgtttattcactcagaaatattgagctaggaaatgctgttacagaaggaaatagacacaggccctcttccttaggactccagataccttatttcaggggagccagctgtgcaacaaaatgggatacttggtttatttctttgcaagagcaagacttattatatattgttaagaaaatttacacctcgcttctgcccatctctgctgctcttctttacttgcctcagccattcttttcctatcgggaacctcatgctgtcctagcctttctctttttccttaataactcttcctgtctcaagcaatcttttatgagttgatttagcaactgctccatttttgtctcttgagaagcaatagaaccagcaggtccaggagagaggaagggatctgaatgccctacaaccaagtggcagagctgcgagccttgaggggcagcctgacccaactccacggctgccacccacctgtgttcaagctccaaactctgcaactgaagaaaatcataagcccggcctcaggttctcagctttacacaaattaaagtatgaaaaagagcctttcccgtctggtgatactagactagaactcagagttgagaggttgaagtacaatgtcaatcaggaaacccgggttcactcaagtcttgagaaaagacatgtgtcatgaaagctagtaggaaatcccaaaataggttgtggggctgctccctgagcccccagcctctcctctctgcatcacaactccccaaagccttgtacctcgggagcttatggatgagacctggaccccactgctgcctttgtcatacctgctttctggaaaggacctaacccagtggatcactgtgtaacaatgctctgtcaatgacaggccgcatatatgacagtggtatagaaaagattacagtggaactaaaaacttctcatcctccagtgacactgtagccatcttaatgtcttagctcaaagtgttactcaggtgttggtggtgatgctggtgtaaacaaaccctactatgctgccggtcccatgaaagtctagcacatgtaaatatgtacagtacataatacttgataacaatataaacgactatgttactagtttttatgtttactatactatactttttatctttacagtatgctcctgctacttattttaaaaaggtgattgtaaaacagccacaggcaggtccttcaggagggatttagaagaaggcattgccatcataggagatgacagctccgtgcatgttattgctcctgaagctcttccagtgtgaggaaatgtggaggcagaagacactgatactgatcatcctgactccatgtaggcctaggctaatgtgtgtatttgtgtcttagtttttagcaaacaaaatttaaaaagtaggccgggcgcagtggctcacacctgtaatcccagcactttgggaggccgaggcgggtggatcatgagatcaggagatcgaaaccatcctgactaacacggtgaaaccccgtctctactaaaaatacaaaaagttagctgggcatggtggtgggcgcctgtagtcccagctacttgggaggctgaggcaggagaatggcgtgaacccgggaggtggagcttgcagtgagccgagattgcgccactgcactccagcctgggtgacagagcgagactccgtctcaaaaacaaacaaacaaaaaagagtggaaaaaagcttagaataaggatataagaatatatttttgtacaactgtacaacgtgtttgtgttttaagctaatgttatcatgcaacagtcaaaaagttaaaataattcaaagtgtataaagttaaaaagttacagtaggctaaagttattattgaagaaagaaaaatatgttttgataaatttagggtagcctaattatatagtgtttatgaagactacggtggtgtgcagtaatgtcctaggcctccattccccacccgctcactgactcacccagagcaacttccagttctgcaagctccgtctgcggcaaatgtcctgtacagatgtaccattttttaatcttttgtaccatatttttattgcacattttctgtgtttagatacacaaatccttactattgtgttacaattgcctgtagtattcagtacagtagcatgctgtacaggcttgcagccaaggagcaataggctctaccatacagcctaggtgtgtagtaggctgtgtcatctaggtttatggaagtacacactaggatagtcacacaatgacaaaatctcctaaagacagttctcagattgtatccccctccataagcagcatatgactatatatgtttcactatagctgatataattagtgataagtattctcccttctaggtaagatgctctaattaaaaattttagacctacacatatatgtgggctaacccttttagaatggggaatggggcagtatttatttgtgctccttctctcagaactgaaagcaagtagtatgcctttgtatccttcagcaactaaagtaataaacgataagagcttaatgcttatttttgaattaaatttcattttgccaattgtgcagagcccagtctaatttaacaaaaggctctgagagaaaatacagtagagcagatgcacatagcaaccattaaattagaatacaacggggaggcttctgccaggggagcggagagggcctcccgaggggcccaagggaagcggagctctggggtttagagcagaaagagacaaatccgagaccaaagaaagggggaggctggcttccaaaagcaccccagtcacctcccagcaccactgcggcgccgcttcctgtgaggggttttaggaggatcagtcctactactttttaggatctggtgtgtttttcccagcccttgctttttaccacgataaggtgtaggacagggacaatgttgcatgctgtgttttaaggagaaattgagatttgccactttggggacaggcgtccagtggaggggcacgggcgtttccgaggtgggtcctcggaggtgggtgcactccacctctgcgcgggcccaggacagcgcgccgtcagggctggacttggctgggcggggagccgttcgcagcgcgatggacacgcacaccggtgccccatctggcgtgggcagggtagttcagctctccagggcggggtttgtcaacttctgcgctggcatcggcgagggaaggtgccagtgtcagttttcagtttgctgctttccccagaactccctctcccgccctcccctctccctccccgctccccccaccccgcccctctgtaggggaagccgctgcgaggggcgccgcgttctctccgctggcgcgggtgtcgggacggagcgaagtgggcgcggtgcgggctcatccccgcaggcatccccagcccggtgggcgcggcggaggttaaggtgggcgcccgcccgtcgggatgagcgcgcagtccgcgccgcccgccagcccgctcgctccgaggcggcaccgggagaaagtggcggtcagggatggagctgctgccatgacaaccccggcggtccgggcccgcgcgcgtcggggctgctcccgggaggaaggcggcgcggaggccgggggcggccgctgagcgtggcgtccgcgcgtccccgcgtctcgtgccgcgtccccggaggaggcgggggccgccgtccgcccagctccccgtgcgcccggagcctgcgccgggcggcgctcccccggctggccgcgagtcgccgaccgggctgcagaggacggccaccgaccggacgaccctggctgcgccggctgcgcgtccccgccttggaactttttgccgccttggggttccagatgcgagacctggggctgggggacacgtacatctgtccatgtgtgtgatctaataaaccatttcctcctctccttgaagccgcagctttttatgacagctcctgtatgtcagagacacttgccttcttctttgggttataaacttttgatgccagagctctgcagaacgtgcccaactgaatcttaaagtagcgtctcgaagagagaggcagagaaagcgcaatctgtgaccttcatccccgcaccttgcttcttcctctcccctcctggccgcctccctcctccccaggggagcgtcaagaaagctctttttggatgcaggagggggcatctggttctgctaggctggaaagctgaggcaggatctgaggaagaattctcagactccggagagcccggactcctctcttctccttccccctgctcctggcgaactctgccccttccctcctccccgcaccgcttcccgagcccgctggtgcgcggggcgggggaccaggactgtgcggctgccggagtcctgggaagttgtggctgtcgagaatgggggtctgtgggtacctgttcctgccctggaagtgcctcgtggtcgtgtctctcaggctgctgttccttgtacccacaggagtgcccgtgcgcagcggagatgccaccttccccaaagctatggacaacgtgacggtccggcagggggagagcgccaccctcaggtagggagctgtccttccgcgggggccgagcccctgggctgtggtcgctggggagaggagggaagagggggcagaaggctccatgggggaccggaacgcgagtgggccttgtgcaggcccgaggggcgcccgcttgcgtgctgccgtgccgactgccgtgcccctggacaggtttgtcctgtgctccggctatgctggtccaggatcttatgcgtgaaccttgaagtccacgtgtgggactccatggttctttgaagccacgacaggctagattctctcctgcttgggcaccgtgatgagaacatgagtgcatgggtttgaaacactggggggctagcctgagccccttggatggctgtcacaggccagaaggtacatgatgaggcaggatcgtcctcaggaccaccaggctagcccttatcagagatgcacctcaaatgtgaggctgtggaattaccagtgtcagcccacggcctgttatgagtctcctcaagacccagcactcgtgccaaacctggtgtagtgctcctagggtccctattgtaaattatgacagcagttttatttttgcagactgggtccaaggaaaggaaacatgtagcttttatgcaacaacatcacttctgtgtgaaaagcacaataggagagctttttgttttaccttaatgagttacagagaatcacttgcatgctccaggcagagaggtggagaatcttggaatatgaacctttggggactggacttgctgcagcagatactttaataaaaatgcagccaccactttccaccagctcagcagatatca

SEQ ID NO: 5371 - DNA, 6000 bp, Homo sapiens
cagaagggccagtgcccggtccaggagcctctcgcaggccttgggctgcccatccaggcgtggcctttccttggccctttggacgacgacgccgcgttttcctcttggtctcggcctccctgcccaccatgagagtggacatgagagtgaccatctccaaggaggcagctgggtcttttccactccccatggcagggagccagctgtcttcacgccctcaccctagtgaagtggctgaattgccaggattgatcacagctctgttctgtgtctgatcacaggacatacaccgtcctgcagagtctgcaggcgggtgggaggagccattgaacagacctggcgtcctgggagggacacggaattcttcccttgagagtctcatgctatcttgagcggcactctgtcacttccaagatgtgtagacgtcgtgctgcgtgtaggacaaggactggagctcactaatacggaccttactttccaggagcgttggatttgagcagctctgagatgtgtcctcctgcagggctgctgtgcctggtgccctttctctgggtcccttaccctctgcctcccttcctgttgggtcctcttcattcccatttctgcttccccagggccaggagggtgctgggcactcggtggccacctcaatgacagtgtgcacatttacctgaaggggcgaagggttacctttatatttcaggtaatctctgtgttttggggaaatggaaagatggtgttgggttagggttgatcaatgatcagcgtttccctgggctacacaaggagtgagtgttgggttggtggccactttagaaaccacaggaaggtctctgtcgtggaaagtcgtattaaaggagtcaagttttacgcctgtaatcccagcactttgggaggccgaggcaggtggatcacgaggtcaggagtttaagaccagcctggccaatatggtgaaacccggtctctactaaaaatacaaaaattagctgggtgtggtggcgggcgcctgtaatcccagctgcttgggaggctgaggcaggagaatcgcttgaacctgggaggcagagatcgcgccagtgtcctccagcctgggtgacagagcaagactccatctcaaaaagaaaaaaagaagtcaagtttcaattttaacttgtgttagtgtgtgatcctgtctttgtgtgctgtggaacttggtgctggtgggacacaggctgctcaccccatcccttgagctttgcgtttattcctgggattctgcatgtgaatgggagcctgtgctgtatctgggagatgctgactgggttgcaggcacgtccgagggtcagggtggggccgagtgcagcctcctcctccagtgggcctgtgtgtggagtggtggcattctgggtgtccctgaggcctggtcgtttccatcttcttcctgagcccacatggagatgacgaggggtttcctgctggtctcttgcagaacagggttgagtggtgtcctcacgttgatctagcttctgggtctcccattctgcatgtgagcaggttgatgggctgttgtctcttccacggttagcctcccttaggctggggctccttcacccctcttttcttagagacattactgcccagagtgagaacccctcacgtggggtggccgtgtggttccaagacagggtcctgtggaggccctgttagcttccccactggaggcctccctcacagcaggctcctgtcccggcatctgcactccagccaggcagagtcctgctcccgtgcacaccacaccctgtctgtctgtgctgtgggcccttggcggggttctgggtgtctggagccccttgaccttgttcctcctacaaggtgacctcgtcaggaagccccaggatgagactgtccctggctcctccaaaggtcacttcagacatgtgcaccctttggagaggtccctgctgtttctcagaactgctggggatggaggctgagcccgagagtgcttgctcctcgcgctcccttcttgctatggtctccggagatgcctcccaggccacgagccctcctggcgtggttttactgggacctggctttgcaacaaaaatagttgttttaacctccctaaccactcccatccctcttttgtttttctctataacgtgtagggtttcttagctctcctgtattggtctcactccactggaaggaaggctcaggaacgcaggctgtgtcttctcccgggtgtggctggggcgggggctcagggaatggctgtgatggcccagtgtccaggaggctccgggccccaccccccgccttgctgcatgaccttcacagtgtcacttaccggccctgacttgcctgcgggcaccacgcacacggcatgaaggtgccctggcccggggcacggacacagccagagccaccgcgctcctggctgtcatcacgtcgttggctttgcgatctaaacctgcttgttgttttggtttttctttctttctgttttctttcattcttttttttttttttttttttgagacagaatctcactctgtcacccaggctggagtgcagggatgtgatctcagcttactgcggtccccgactcctgggccgaagtaatctcccctcaccctccctcttcccaagtagctgggaccagacatgcgccaccacatccagttaatttttttttttttttggtagaaatagggtctcactatgtttcccgagctggtctccaactcctgggctcaagtgatcctcctgcctcagcctcccaaagctctggaattacaggtgtgagccacggtacctgcccccaaacactcctgactcttcttatcctaaccggggtcatcttactctcctcaccgaaatctgatgtcacctgtatggaggaaagggtgggcctcatggaggggcaggccagggacaaggggactcctgggccccagctgagcccagcccgtttcccctcaagggctgtctccaggaggacacgttctgtaagtgtagtgttcagcagagggtgagtttctgggtcgccgaatccaggcacccttaggaatgggggcctaagagggccttctgacgtgggttctctgctgtgattgtgggcaggtctctcagtactgaagggccccacggtgtggagctcagcaggaaggctgaggttccctgcggtttcctcatggcttaggactcaaatgcaaatgtatctaaagaaaaaggtggttgatagtcacaatgaaacttttatttacctctggttgtcttaaatgcctagtattgtaaaatatggcagaagaattcactttcatgcctgtaatcccaacactttgggaggccaaggtgggcagatcccttgagttcatgagtttgagaccagcctggaaaacatggcaagaccccgtctctacaaaaaatacaaaaaaatccaacctgacccacatggcaagaccccatctgcacaaaaaatacagaaagttccagcctggagcctccacctgcagtcctgcagctccaccctggctcttcatgaaatcggctaagtccaggtgtgggtgcgttcagtgcagcacccacgtgcaggtgacacgcccatgcaccgccacaaccacgctcacaccagaacattccatcatccggaaggcccgtgtctccgctccagtctgcttttcgtggatgcaaactcatttccttgagtcgtgtgtgggtgacagcagatgggaggtttcttttgtgcctggcgtctgtagcgtgtttttctttttctttttttatcttttgagacgggatctcacgatgttcatgatgttgccccggctggtcttgagctcctggcccaaaacagtcctcctgcctgggcctcccaaggggcgtgtctttgagatctatccacgttgaggtcgttgccagcagcacattcctctgagtgctgagccatgctccgctggtcggagggaccacagtgtttcctccactgatagagttttggtttgtttcccgttttaggttattatacctgaaacatctgcatgtaagtctttgactggacctgtgttttcatctgtctcaggcccacgtttgggagtgtgtctttgactggacctgtgttttcatctgtctcaggcccacgtttgggagtatgtggctggctggatagcagacgtagcataggcctcacttttctgtgccgttttgcagtcccacctgcagtgcgtgagcatcttgctccgagacctcaccagcactctgcattgtgatgttcttaatttcagccgttccagcagatgtgcactgatgctgtgtcgtggcttggatttgtgatgcttttaatttcagccgttccagcggatgtgtactgatgtgtcctggcttggatttgctttcacggtgaccagtgctgctcctcgtttgttcatgtgcttattggccatttgtatgttttccttgtgaagtgtctgttcaattttttgcctattttttcattaaattgtttattgagctgtatgagttctttataaattctggataaaaagtattttttttcttttttttttttgagattgagtctcgctctgtcgcccaggctggagtgcagtggcgcgatctcggctcactgcaggctccgcctcccgggttcacgccattctcctgcctcagcctcccgagtagctgggactacaggcgcccacccaccacacccggctaattttttgtatttttagtagagatggggtttcaccgtgttagccaggatggtctcgatctcctgacctcgtgatccgcccgcctcggcctcccaaagtgctgggattataggcgtgagccaccgcgcctggcctgatttttttttttttttttttttttgagacagatcttgctctgtctcccaggctagagtgcagtggcacaatcatcctagcgcactgcagcctcaacctgggcttaagcgaatctgccacctcccgagtagctgggactacaggtgcctgccaccacgcctggctaattttttatagagatggggtctcactgtgttacccagtctggtcctgaacgcctgggctcaagcaatcctcttgtctcagcctcccaaagcgttgggactacagacgcgtgcagcctacaaagttttatcagatatatgtattgtgaatattttctcccagtttgtgacttgccttttcatttctttagggcacaaatagtttacatttcatggaggcaagtcctgggcaacatgctttaagtgcattgttcacttaattttcatgatgtccttggaagtcagaagcttccccatttagatatgaggaaactgaggcacggaggggtgcatcatctctccaaggacacactccagtggatgtaggacctgggttagacgtgaggacacactccggtgaatgtaggacctgggttagacgtgaggggacactccggtggatgtcggacctgggttagacgtgaggacacactccggtggatgtcggacctgggttagacgtgaggacacactccggtggatgtcggacctgggttagacgtgaggacacactccggtggatgtcggacctgggttagacgtgaggacacactccggtggatgtcggacctgggttagacgtgaggacacactccggtggatgtcggacctgggttagacgtgaggacacactccggtggatgtaggacctgggttagacgtgaggacacactctggtggatgtaggacctgggttagacatgaggaaactgaggcacagaggggtgcatcatctctccgaggacacactccgatggatgtaggaactaggtctctgcctccatttgcagatggtcatgcagagggggtctcaggcgagtgtctggcacaggcagtggctggggtctggtggcccccagttctgatactaggctggttgtgggcttttccaccagcgatgggacaggacaagactgcaaagggagcgccctgcctcctcctcccacgtctgggctctgacaggc

SEQ ID NO: 5372 - DNA, 6000 bp, Homo sapiens
catctgacctggggtgcttgctggcagcactgcctggacagcagggcctccttagggccacctcccaacccagctaggagcgtcttaaggcctgccctccctgctgggcttgggtgggacgctcagggacaggcagcagtgggcagaggccagcaggtactggcagccctgaccacagcagagactgggccccagaaaatctgtttctctcttctttttcatagttgtgttgagacagagtcttactctgttgcccaggctggagtgcagtggtgcaaacacagttcactgcagtggcaacctcccaggttccagtgatcctcctgcctcagccccgagtggccgggactacaggtgtgaacactgtgcccagctaatttattaaattttgttgtagagatggggtctcattatgatgcccaggcgggtcttgaatttctggactcaagtgatcctcctgccttggcctcccaaagtcctgggattataggggtgagcccctttgcccggcctaaatctggctcttcagattccgagagagagggtacaggagcctctctgctcagcctgaagaacacccagaaggagggaacctcaaagagccccgagatggaaggctctcctggcagcgcctcctgcaggggtgcctgtggaacaggctggccccagggctaggagagttcatggcccagtctgcttcactgggctgccacagtgtgaaagctgggcctagacctggctcctgacatcctagtgagggctgggaccttagtggttctgaaagacctttactggatggttccttccagagtggggtatcggatacacacacactgcggccaggcattacgccagctcccggatgcctcagcctcgtgaattcggggcaggacgctcagggcccatggtcagcacagcgggtgggtgggttccagcgtggtcacttctccaggggtgcataattgagcagcttctcgatcaggtccacgtgggccagcagcatccggcggcagcagtagcgcttcaggcccagggcatccagcgcatccctgtgtcgaggggaggagcagaggccaactgagttctctacggtctgcaaaggcctggagcccacatccaacctgcctctcactgcctgctggcctcaccccccccgccaccggcaaggcgaacagattcacccggctcagaagctgagatctagcagtatgatcctggctggagtaacctggaaatgcccagaaccctgggtggagcgtgaggagcctcctctcccacctactctggctgtacgtgtgtgtgtataacgtatgtaagaaatgtaaatgaaatgaaaacgaagtaattgcggggagcttagaaaaccaagaccaccaaggtgctgatgtgcagccacctcatccagcactggccacggcagggtagctctccaggggcctgcccttagctggttcacccccaccccagccagagcaagccctgctctgccgctgtggggtctttcctcacctctgcttccttccatcagagagagactgcttctccacggagccacctctcccacttcccaagccaattagaagctttcatttccctgggacctagctccagtcaccctcaagacctccagaaaactcccacaccgatggctccaatgtgcagagacacagaagcttgggaaaggggaggccacatgggaggcccctgccgttcctatccggggaaagggtctggacaggccgccagccactcagtctagcagcccactcgctttcctcgtttgtccagcaagctgcaccaagtgccgatggcaggctggcgcacacaagcccagggcttcacatgtgacgaagactcagtgggcgagggtcagactccagcgggggcaccaagactcaggcaccgtggtgacagcagcaccaagggacaagcacaggagaaagacgcctcccctacaaagcctgatgagggtggtcagcaagtctaccctgcatttctttttctgtgtgtgtgtgtgcgtgagacggagtttcactctctcttccaggctggagtgcagtggcgtgatcttggctcactgcaacctccacctgcctcccagactcaagcgattttctcgtctcagcctcccaagtagctgggaccacaggtgtgcaccgccatgtccggcgaattaaaaagatagagccaggcgcggtggctcacgcctgtaacctcagcactttgggaggtcgaggcgggtggatcacctgaggtcaggagttccagaccagcctggccaacatggcgaaatcccatctctactgaaaatacaaaaattagccgggcgtggtggcacacgcctgtagtcccagctactcgggaggctgagacaggagaattgctggagcccaggaggcgggggttgcagtgagccgagatcgcgccactgcactccaacctgggcgacggagcgagactccgtctcaaaaaagaaaaataaaataaaataaatttctggagatcagggtctccccaggttgtccaggctggtctcgacctcctgggctcaagcaagcctctcgcctcggcctcccaaactgctgggattacagatgtcagccgccgcgcccgcccgtcctgcagcgaggtttgcaggacatggggtgggcctgggggcagagatgggaatagggcggaggccaagggctttactgcgggtgacaagacgcctgcgacccgccaggccacctagaatccccaggacaccactggtttgaagcccaactccgttctcttccccagacttcaggggataaggttctcccgaaagcagatcacagagcggggctggagaagccgggcctgaagctgctcatggggcgctggcctcaggcagcgctgcgcctcccgccccggcgcgcaccccagggcggactcagcccccagccccggcccgcgccccacggcggactcagcccctagccccggcccgcgcctcacccctcggtgtactcggcctgcagcagccccaggtaagcctcccacttgttgccgacgatcttgccacaagtgaagcagcgtacagggatgatcatggcggcggcgcgtcccagactgcccggcccggcccggccgcacgcgaagaacccccccaggccccgccccgggcgcgtccactgttgcgggagaatcggctccgctcgttctccgctgttccggccgtccctccaccggccccgccaccgctggccgcagtttccgccgcgataggggcttcccgtgcgtcccggggctcctgggcctgtgcgtcccggggctcccgggcccgcgcggccgcggcagcagcagaccgcacacccccgcccaccgtcttggtgcatcccggcgctacggcgtctgagcagggccgtaaagctgcggcggcggttcgcgtttctcgtgtccgcttgactgacagctgcgcggcgggagcgggcggcgcgagcgggaggcggcggcgcaggtactgcgcctgggggttgtgggggcgtgcggccagggtcccgtggccggaggtgtccgaccgggagcggctggagccggacgcgagcggggcgcgcgagttcgagcccagagccgacacgcagcaacaagtggggtccggcgcgggggctcggggagagggcgggcgggggccggggcgggtcttcctgccgcccctcctggccgcgccgagtagtgggttcctccgcctcggcctctgcccgcggggtgtccggggctctcggcgctgagttcgggggtcccattctggacgcggcccagcccctaggggcgccgccctggcctcagctgcgcaattacagcccccgccggcagctccccgccccgggctcctgtccgcgttctttccgctctttcccgggaatggggtcggggtgcgccctcccgggtcccggctctgctggctgctcgccgtcccgagctcccgacgctcagacgcgcctctgagcacggggagaggggacccgggagggaggtcggggagggagtcgtggaagaggtgctttttgagctgaacctggaagaccccggcacaggggatccctgggcagactcccggaggctgcactggcaggaccccctgaaggcctcagctctggcttgccctggagctcagggcctacggacgacgagggacgaggagcccgtgtctctcggatggagtgcgggggggctggcaccagcacccttcttgctgtgcccctggggtgggggtgaggaaatggggggtcggtgtgcagtgagaggcaaagaaggctccttggaggtgcgaggtgggctgtgggggtgggtgggccgcaaagcggcacccatggggggctctgggctggtttgccggcctggggcttctggctggggtgggacctgtgttgggttccaggcatcagctgccgctttctcagggcaatgctgcgtctgccttagttgcagaggaggaggacgaagggttttctgggtccggagtggtgctagccagatccactgcacgcttggggtttccgctcccaccctggccagggccctgggcagcttccccagtggcatttgccataccccacccagccacgtgcggagccacgagccgaggccacttcccttccctgaccccctccccccaggatgagtggacgcacatcctgctctgggcagaagggcaggacaggggccctgagtaacggtggcctggggtcagagccaggttcagctgcgaggctgctggtggctgtggaggtgaggggggcaggggggtcccggatgttagcagggtgggccctggggagtgggtgggggcctggaggcttcttggaggagggtccagggcctgtcccgcccctgttcctgcctgcaggagttgtttactcagagcaaggggtggtggggagtgagctgctctccaaatcctggcttgggccaagctgacattcttggaattccgagtgtgtgcgcttcctatccctccatttcccagcagagcccctgagatctggagactgccccagcctcaggctctgtgcatctcccccgagcccccaccacatatgtgcggaggcccctgggggcccaggcctgtcctcagtcccgactgggctctacctgaggaccctggggagcctgggcctggccctcctcaggcaagcgggggtgggagggagcctggtggcggggcagggcactgtgcccgccagcaggggcgggtgggggcccctctctcctgggtgtggagtgttggcgcagactcggcctggcttctgggggggggggtctgggatggggccaggagggtgaggcgctggttttatagaagggggcgttgtggagcctcctgtggtcagggcagggcacagggagcagagggtgggctcccccggctgcttcctgctagaggagggatcacttcagggcaaaggaccaggggaaacccatgattgaagttttagctgctgacccctcccaccctgggtgttgccctggaaacaggccagccacgggaccaggagggctgggagggggagcacgggctgagccctggctgggattcagctgaacttgcactctggtctgggatcccagcccacgtttccctgtctgtaaagctcaggtgggatcagaaactgcccgcccggagggctgcatccctcctgccgctgaggctgggcatgaccttgactgggagagggtgttgaaggtgtctgtccccagcctcgcccccacacctgtgctctctggccctgtccatgcctgggacagatgtgtgctcacccccagggtgctgtgggatggggtgggtgcacacggcgccacgagcacacgtgcccgacacctcagcggtgcacacagccaaggccactgcccaccgtacccacgccgtccgtgtcctctctacggtcctgggagactggcgttgtgagcagtggggcctgtagatggggccgggtcctctctacggtcctgggagaccggcgctgtgagcggtgg

SEQ ID NO: 5373 - DNA, 6000 bp, Homo sapiens
gtgccagcagtatgagggtttgcattggcttttggccaaaccctggaatgtgcctgctggctgcacggcagctgttcttggaacagggcgacaatgcacagactgtctctgagacgtgggcggatggggtgcagactgcccggagctgcgcatgaacccaggccccgagacaagggtgaatgggctcacacaggccgagacaccggtgaatggtgtccaaagatgcagcaggacctggaaccggcactgggggccctcagcctgggactcggcctgtgtgaggtgcggggcacaggtggctgacggcacacactgctaagaacccctgatgaatggggagcagagcaccccaatactcagactcacggggacacgtggtccagatgctcaggaggggtgtatgagcgacggcaccctgattccagatgggcatctacagtcacaggcaaagggcatgtcgctggctgtgcagggtcgtggggggacaaggcacccaattttagggtcagtggggttcatgtctctcagatgcttctgggattgtgaggacttcaggcctctgaggaaggggcacaaacccctggaggcttaggtgatgaagctgagaattcgtgaatagggcacaggggtgtctggacagggatgaatgtagctcccacggccgagacagccgctgatgaaagggcagcaggcgtccaaagaaacaggggaacttggaactggcactggggccctcgacctgggatatgcatctgcgttcgaggcaggcagtgggggttaggctgctgaagaccctgacggacagggtacaaggcatcaaagccctcaagcagctagagaagaggggggctcgagggcttggaatgtgggtgcacagctcccgacgctgcagggggcgaggtaagccgtcgcacagagggttggggtggagcgtcccgagacccgaaaacccagggcagagtgcccgtcagggtgatggttgaagtcctcactactcagatggtcggaggagggggtaggacacccagtcagctgccggacactcaggtaaggaggtactggagccaaactgtctgagtgactgggtctgcaggacctgaaccttcacaataagagggccccctgcagtgggaccagaagggagggtgtgtgtccagacacgtgggtgaataagggctatgctttctgtcctcaggggactgggggcacctttgcagatgtgtgcaatatcacccacactctcagaggattccagacacacaccactcagaaatgtgggctaggagcacccgctgcacctgcgctgagagagctgcagaaagggttaccagcccctcgggtggaaggagacagccggagctctcagggtaagataacctcacttctgacatatagggcaccacgacattcagagtcctgggatccacgctgcccagatactcagacaagtggggtatcagggcccgtttctctgtcatccaggtattcgagtgattagcgttccggctccagaactgtcaagagggcggatggacagaaacttgcccaagcctccaagcaatggggtccagagacccagacgctcaggctgatgagtgcaggaacccacacactgacagtaatggggtccagagacccagatgctcaggctgatggggacaggaacccacacactgacaccaatggagtacagggctctaggtatttagaataatggggtacacgtgtctagatgtcagtgaattgaggtggaagctcagctcctcagaggcacattacagagccatgggaatgagcagctctcagacagggcagacacgagggcagaggaggtgcacccagcagtgagatgcctggagcacaggacgtccaaaaccacaggaatgaggcaccaggctcccggccctgggctgacacccaggcttaagtaccatgtgtcatgggggattcagagggttcaacaggtggggggcacgctgtcgtggcaccctggtgacaacaggagaccaaggaggggcaggtcacctggccctgggcatgagggagggggctgcacaggcactcaggtccccaagctgtgtctcccaggcactctcaggcgtggggtgtaaagatgctgatgccagggttccccatgaacacagacccccctaaacaaggtaaatggggtccacacaaaagttgtgggggatcaggcccctgccatgaggtccccaaggcccttgggagatgaggtcaatgcggggaggaccgggagaacccccgtcctctgacatggtggctgcagtaccagccatttgaggagtgggttacatgcccccagacttccaggtgacgggggtggccacccagacacttcaagacatggggttttcatcaccaaaatccagatgcagattctcagaggataggaactgagcccatggaatcagcaccagccatgttcagagggtgcagacccccatgcccaagacggagcagagcctcccagaggctcggtgatggggtgcagcctccacggaggctcgatgatggggtgcagcctctctggaggctcaggtcatggggtacagcctccccggaggctcaggtcatgggatgcagcctcccagaggctcggtgatggggtgcagcctccccagaggctcaggtcatggggtgcagcctcctcccagaggctcggtgatggggtgcagcctccccagaggctcaggtcatggggtgcagcctccccagatgcctggttgatggggtacagcctcccgggatgaagaggcacagacagtatgcatgaaaggtgagtgtggcacacacaagctaagacacagagaatgggcatagggcatcccaaagcacagagaactgtggcaagctgagttcccccatccccggccatcccgggccccagctgatgagggtgccccagccctgcagggctcagcagctggggtcagagtgggtggggcaaacacgcgctcacccagcacacttttctttgtgtgccagtgactcctggctccccagagccagcgcttgctttgcagtccaacctcaagcattccccaggcgacctcagaggaagcgtccccatccaggagccccaccagggtctccatgaggctgctggctgccaagccaccgtctcggggcctcgggactggcctcgggctccagctctgtttggttttctccttcctgccctggaacctcagacgccagtctggctgtgaaggcgcccatatactggggaaagtacaaagcccctacacagctggctgcagagaaccgcgcgcagggcacgtagctcagctgtaccctggggccagcgtcgagccaccccctgcatgtgtccccttgcttgcctaaaagccccactagggcagcctctggcccttctcatcccagattgagtcagactaggagacagacccataccctgtgcaaacaccagaaggacgtacaagtccccacacgcccagggccgcgtgtgaccggacgggcccagacgtgcacatgcatgcccacacgtcctcctgctgtggcccgaaagcatcctcggagcctgggctatgtcctccacacttgctgcctgaccagccccgtggggccggccccgctgggacaggttttcccgttaagcattaaccaccagcagataagggctctgagggaacgccctgacctgggatggctgctcctcggtaggcccaagtcatggatctgactagagtgaccagaccagactaactggcagagcagagggagaggagcttaggctataggctctgctcgggggtccaactgaagcaagaggcactgaggttagaccagagtgaggacttccagccactcacccgggggccagctgataagaggatcactcattaggaaaccaagaactcaagggattgggtcagcccagcaggagacaaaggcacagaggggaatggcccgaaggtgcctggggctggaagcagaggcagtggcggagccaagccggcccacctggctctctgtgagccccctgccccacactgcccagggcagcccccgcccggcccctaccctcctcacacttggttccccccagcccacagcacctgaggatgccctcttccaagccaggcagccctgcacctcaggacccctccccgtcgtgcagaacctgctcaaaccaggttcagccaggccacctcctgctgcccctcaccaaggccagcctgacgggcccatcgccccctcctgcaaagctaggtagggctcagggtgcccccagccccaagggacccttggaaataggctggagcccagatgctcagcctctgcgtcttggggagaccttcctcccaaagggagttgcccagctatcacgggccagcagttccggccacaaggtggggttcctgcagccctggcccccgcaccccctcctaccccaggagagagttccccgtcaccagaggcagtgctgtccgagagctggacccgccttcgggtgtctgagaggaaggcctggtggctggccggccacaggaagtggtgggcgtcaggtgagagcatttacacctggggggctgccagccccagcactcggggaaacgttgcttttccagaggaagggctcacggaaaggtgttcccacggaagcagaaaccattccgtatagactcaccctggagggaagcattagcaagcctgaaatggtgcccgccttgggctaacatgaagtctaaaggaggggctcacccccgttctgcctggtgggggctgggggccctaacggggtggaattcagcacaaaacgtcatggcaggtctgggggtcctggggtgaccagggagggttccctggaagaggtgggctcacgctggccttggagggtgagtcggatggggatgcggagaggccttctaagcagcttggcagctgcaggagcagagcagccgccttcgtggggagagaggagccggtttccagagccttaaggagcccgctggagcggtggccaggggggagccggggaggagggaccgtctccctttcctgggaaaacatggcgtgaactcccagagaaggttttcccagcagggccacaggagacagacagccaaagctagacaacggggagagcagccccgggaggctcaggcagggagggcgggggattcccagatctgggaggggagacccgagagcccccagcgcccaagggtctccagggcactgtccccgggagccatgagggaggccgggtcccgaggggcggacggcgccacctggtggccatgcgcccgctgcacctgcacctccctggggtcccggcggtccggagggaccccgcacctccccaggctttgggacccccagcatcggcagccagcgcccccagggtcctggggttctccggagcagcttctgggtggcccctgtgctcctctggggacaaggtcaccaggctggcccgggagtgccgctggccggccgcggcaaatcactgcaggggagctctccccgcccggccctgactgttcttagactaaaggaggggggacgccagcaaagcgggggcacaggggaggggcgcacgcacacgcacacgcacacatgcccgcactcacagatggagattctgtattggcaacttatccggaatctcaaccataaaaatctggagtgaagctactttaatctcagcatgtatacaggctctgacatttcaaaaagagaagttgccttgaaactccacgtagggaggaggcagtggcctgtttgaatctggccggcacagtcccgctccagggaccctgcggacccagcccattccatcagccaccaccagtaggagcgctccgccagccacgtgtgggacgccggacccacctgggagtgtcccccaggagctgaggggctgccgaggcccgtgagcttcactgcacacccacactgcatctgcaggggactcacccaaagggtcccccgaactcgacaagctccgtcatt

SEQ ID NO: 5374 - DNA, 6000 bp, Homo sapiens
ggctggaagtccaatatcaaggtgctgctgattccagtcttggtgagggctctcttcctggcttacagatggctgccttctctctgtgtcttcatacagctgtccttcagtgcatgtaaggagagagagagagaagagggagctcctaaatgtctcttggtataagggcactaatcctatgggaccagggaccttcatgtcctcatctgtccctaattacctcccagagatccacttcctaacactatctcattgcggggcagggcttcaacctatgaattttgcaggaacacgattctgtccatagcgaacactgacactgaacccgcctcctaaagccttctctcaccatattcctcatgctgctcaaagatcctctgcaaccttgtgcccctcccaagggtccctgcacctgtcccagagagagggcagcctggcaatgggcctgggccctgacgcttgagcatcggggtctggcctgaaaggggatgggcgttcacttctaggttcctgagagaggcaacactgcacctttaaaggtgtcaggagctcactgccccagctggtcatgaaacagtctcttcatcaagggctaaataaagcacgctgaccaccaggaatggggcaggaagcttctgccctgcagcctgccttgtctgcacagggagtgtggggaccattagggggagggtccgatgtgcatttttctgccagcgggaccttcccctgcccccagtcctgcccaggcccggggggtcactctgaaggcatctggctcttaccccaggcatctcctgcctctgccccactcctccacccccacggggtgccgagtctcagcccaggctggggtggcccaggcaggacagcaggcttggtggtgcccggccccacatactagtgggtggcacagcgtggatgtggatagagacgcctcccctacagtctgtccctggtatctgtgacgcaggtgtggggtccctttagactcccctgggagacagctgtgtctatgaaggggcagccatccctgggtcccctctgccctcactgagggcagagcctaggctccttggggggggaagcagggtgcccctcagtgcccactggagttggccagcggaggcagcagcccacggcactgagagggaaggcccgggcagccatgccccagaaactcccttggttgggagcagagcagtgcccagagcccagaacccagtttgagtatggtcttggctctcaagggacaggccagggtgcctccaggggaagggggctgcccaggcagtaggggttcaaaggtcccctggggcccacccagctgacccaggcctagggtaatccagaaggggagctgccctcctcctccctgggctcaggagaggctgcaaaggcagctcctgggacgtggatttcagaatcagggcaaaggacagacatgagccagattcaggtgcccgcgtggcccccacaggtctcttcaagctccaggccccactcgctgtgacgcaggtgggaagctcttgagtgcctccccggtgggaggggccgcgctcacagacagcacaggggcccccaggctccagcctcagagcccggctgctcacctctgatggacagaaaagggtccctgtctcaggaaggtagaggctgccacctcctggcccgaggacacagctttccagaggaggggcctgcttctaagtccaagtcccatcccagccggatagccaggggcaactgcccaggtaaactgagacagcagcagcaggcaagccagtgcagagctgggtgatccacaggttcatgagcggtggcaggtggaacaagggcaccatgggcggagggttgggcagctgcaggtggcatcattgagccaggggcctcctggtgggtaaggacattgtagagtgagcgggcgcacctgggacccaggaattcacaggaaggagagaggaaaaaggaagtccctggcgggtaaacacatatgcatgcacacacatccacgtctgcacacgcatccacgcctgcacacgcatccatgcctgcacatgcatccacgcccaatctcttccctggaaataaagccaggggcccttaggccagcttgcagtggggcccagcccttaggacaggctccttggtggggtaggggtgggggcagctgtcctcctgggccagctccttggggctgaacccgctgctcgaggggtcttccaggctcccagcggccggcaccacctctagagcaggtgggcaggggtgtgtggggtgggcaggggtttgtgagggtgggcaggggtgtgtggggtgggcaggggtgtgtggggtgggcaggggcatgtggggtgggcaggggtgtgtgaggttgggcaggggcgtgtggggtgggcaggggtgtgtgagggtgggcaggggtgtgtggggtgggcaggggtgtgtaaggttgggtaggggtgtgtggggtgggcagggatgtgtggggtgggcagcggtgtgcggggtgggcaggggtgtgcggggtgggcaggagggtgtggggtgggcagcagcctgcacagtggcttcccctcaacaagccacttcctcttgcagagggaatgttggggtgggagggtgtggctcagcaaagggcgtgggggttccaccggctccctgcccccgctggtggggcacagtgaggggggctgtggtcagacctggtctctggagggccagccgggggttcccgtccacctgtcagggggttcgacgccactttgagatgacaagtgaggccacctgggcacagcgctggtgtgagaaggaggccatcaggacaggtcaagaacccaggcccgccctgctccgaaattcttcagacctgatgaagaggtgtcccagaagcgggtggtgctccaggcccgcctcaccagctccagggaggtcaaggttggagagagacaattctaggggcgaaccagacatagccaagagcagctcatcttccctggagaggacgggctgcccacttgcacagcccgggggcctcctgcccctagacctggtaccttcactcttgttgccacccctacattcatacctgcgccccagtctgagccacacctaggcccccagctgaagtgacactgtgggtgccaggcatctgaggtctccacaagcccccacagactcagggtgggaattcctgggggccagagctgcagagggtgctgcctgggggtgctgggctggacgggggtcctggttgtccctcctggttctcctggttctccctccgcagagggagggaggcggtggcctcagcagttcctccagcagcgttcctgagcgggcggcagctgggccctcttcccacagccacgctggggttgccatgcctgcaggtcttggggccccctcccccttgatgaggtcctgaccaaatgcaggaggagcaattccagcaccgaggggcgagcagagccgcctgttagcactcctgggagggcccggagtggtccctgaatgatggattcacctggaacattttcaccctcttcaggcccaccctgccccagaggcccacggaaaccctgcctgtactggggccgcagcgctgcccccacccatacgtaattacacggctcggtgtaattgcaaattcgaggtttacaaagcctccccctggaggccccacgtgagtgtgagcgaggccccagcccacccctgtggccccaagaaggctctgcgacaaaatatccatgagtgccgcccacgaaggcattaaaaccaacgaccttctcaaaacttaagctgtcacaggacatttcaaagggtgtttcctaagaacacctcaataatgatgttccaaggagaccccatccaaattcctccaaggattacgcccccaaggcccagtccacacttgctcactcccaggacggggagctcacctcctcctccccgggcgccgtctcctccacatcccacaccaggtcctgcccatgactttccccctctcagcgccgtcctcagtggccacaccaagaacgaggccatgtcttcctgggaagggcctcagatgtcagcaaatgccctggtgtcttgggctgggctgggggcaccagggtgaggtggtggggggagccaacctcactgcccctccccttcctgcctgcccttcttccggggcacccagcagctcggtcctagggcgatgttgacagacagacagaggggcggatgcagcctacctcctgggcagtgagctgcggtctgaggcccctgcccagctggaaaccacagggaggggaagggaggggaggagaggagaggagaggaaccgtcatggggccttggagtcgagtcagggttgccaaatgccagatgctggtcacctgcttctttatcttggtaacaggcaggtcgggcaggagtgggtggtgggtgggggtgagcaggggtgaggggtggcagggcctcagcacagggattatccctcccctgacacacacaccagccctactgtccctgtcctgcccttgcagacatgtgtcctgcccttgcagacagccgcaggcaggcagggaccaccatgagcaaccccgtctctcctcctgaggggcagcacagagcctggaggaggcctgagtggggctgaggcctggggcgagctggggtggaggggcactggctgccgggctccagggatcttctccccttcctgccccggagggtgctggcacaggggtggggctcactcccactccgtagacacaatgatcagaggtcctgggtgtctggggaagctgggctgtgcgtgtatgcgtctaccatgtgggggtgcctgtgagtgtgctggggcgtctgcagtgaaggcctcctgagaccactccacggaaacaccgggaatccctgcagctgagcctgtctctcacgggaccgggaagctggagagagccccaaccctgcccgctggggccgagctccctgctcctgcagcagtcccatgccccacactctgagtctgccctatccacagctgctgggcctctctgtggccaccatggtgactcttacctacttcggggcccactttgctgtcatccgccgagcgtccctggagaagaacccgtaccaggctgtgcaccaatggggtaagtgaggtccaggcctggctgcatcgggaggggcctcgggtgcaagggtggctggcacgagcccagctggacgcctcacagccagaatggtgccaggccctaggcaggagccagaggtggtcaggggcagggaggggctgccctggagtcctagctcccctgggcagggcctcgggtctgggtgacagccagtgttcctgcctggttctcgtgccccacaggagcgtgggcacagtgtgggtatatgtcgggcagggtcaggaagtggctctgtgcggtcaggacctggctctgtgcagtcagggctcagtcccaggcaggcctgggactggcctggggctgggcacagcaggtccatgagggctccacatggctgatgttccactcaggacctgggatgtgggtggggagggggtgggggctgctctagccagacgcctccctgcagggactcagcagcgacttatccaacatccagagagcgggagcgagggccagagcctgctggggccactcaggggtaaggctgaggaaggcccctttaatgaggggatgtcagagccagatctgcaggggactctcaggcaggagctcagggggcccaggaaggctgcagcccggtgggcagatgtagggaaactgaggcccaggaggtcagggatactgccttagaacccaatgcttttccccaagtcctaggaccagggcctccctggaggaggacgcctggggcccaggtccaggtccggactgataagattacagctccagtccggccacttgtcactaggacatggcaggaggatgcctggggcccaggtccaggtccagactgataagattacagctccagtcc

SEQ ID NO: 5375 - DNA, 6000 bp, Homo sapiens
tcaagggatggaacccagtgaggggtggagacggggcaggggaggggtggagaggggtggagacgccccagaggcggtgtgactcagctgcccctgcaggcagctgcaccttgctgccttattaggctgcgtgtgggggactgggctgccctccctgcccccaggagcaggagcaggagtgatggaggaggaggaggggaggggcaaggccaggaggaggaggagggccatctcactgtgcagagagcagcacccttcctcctggtgcccctggcagggctggtgctggtggggctctgggagcatttgttgagatgcttctggccttgaaaggaggcccctgggatggctctgttgccctcacaggctgaggggtgggtgaggtgggcagcctgtgtgtccccagtcctcagggcttccctcagccggcaggtgcccccaggcctggagctgcagggccaggccccctgccagttacggaggctgcttggcttggttgctgaaccagggccccaggaggccgaaatagccccacacctgcgccgtcccacctctttgtccagtcaccccagggccaggtgagggccctggccacacagcgtgcccgttccttcttccccatgccccgctcatgggtcagagggccggtgctggggtccagatggtgtcaacagggatggtccctgtcctccccagagacagaagcctgtggcccacggagggtttctgggcccagccgatcctagggagggtcccatggccctgcccataggttcctggcctctctcggggccgtggtgccctcacaggtggtgtcaggaaggacgggaaaggctgcttgtcccaggggctcatgtggagaccaccccctgcacgcagctggggcgctcctgcctgtgtcctcagaagcactcggcttagctttgcccatgtgcctgggctgtgggtggcagagcccggccagcatcctccgatctccaagggtgcatctctactggaggcccctcctgggcctcttgctccccgcttcccagatcattaggatatttggggtccagaagggcctcccagccatcctgggccttgtcctccggggccaccagtccagccagtgacaaccacagcatccccggcctggaacgaggctgcccccagcacgttcctcgtactcctgtccagggacaggaggggctgcccctgccaccgagtccccttctccaggacctggggcctgtgggtgtgaggcaggtgttcttggaaggggtcactctccaggcacccggcggccaaggcttgtggctggagcagctcccgctgtggggtcggcgtcgggccccgtgtggccggagaggagctgaagggtcacttagcttcgggctggggcgaggacaggggacaccccagagaggtatgccaggcctccttcctgcgccccactctcggcagaagcagaggtcacaggctgtgctgaggccccatggtgctgcccccatgatgccagggtgaggctggcgttggaagcaggtgtctgacctgcatggtgtcaccgtggccacatcagagctccagccccagagccgcccaccctcggtccttggctgtggtttccctgggctggaggagcctgccgttgtgttggccacacgaccacaggacctgccacccccgacgtgggctctgcctgggcccccactggacagggaccccttggagctcctctggccaccaagtcctcgcccattccagaatcggccttctggagcctcttgctgtccctgatgcgggctgggccttgccaagggctttttttcctgcgccgggaacagggtggatttgctgggctcactcccctcagagacgctgcgggtgcggtgggttaggcccaagggcgttaagagaggaggctggggtggggctggggcctggcagggggtctggcagccctgggcctcccacctcctgtcaggaccaaaaaaggcaacgcgcctctcctgacctgtaccccggagtgaacccaaccttgcaacccaggagtgtcagggcctgaggggagggagacctggctcctgggtgccgtgcccgtaaggaggtggccacctgcagggcattcctggcagaggcttcatctggccaggtaggaggctgggtggccgagccccaaatctgggtgtgttctctgcctggcggtgggtcctgccccaggcaccttctcctctgggctggctgggcagggacaatgggcctggctgcgaggagggggcctgggctgccttctgcattgcctcggtgacgggagatggcccctgcctgctgagggataggggagtgggcaggcagtgagagacactgacagctgtcccgcgggtacagggccctgtctgggtggccaggcccatgtctcgggcccacagtgcgccccccacccttggacggcgccttctccctccccaggtgcatgctgcccagccagggagcgtgggggagttcgggagggctggcctacacgccctggtccagctgtcccaggtggggtgctgggcttcagccctcagcccagggcctaggaatccaacttgatcctccccacacagcagccaggttcaaatgcaggtcccgtaacggaagtgctgctgtgcagcccagattggggggcaggagccagcagggcccccccaccctcttctcgcaccacactggggaggcagcattggttccagttccggttcctgggctgccctctcaaccccggcctacagtggggcccaccctgtgccttctgatgccactcccaccccacgccaagtcccagaggctttgggagcgggtgaaggcggtgggtggcgggtggcaggtgcaggcggtgggtggtgggtgtggcaggtggcgggccccaccgcaggtgtcatccctgcgaagcacctgtcgccagcactcagagcgctcatgaggtgcccagtccccatgtggcctccttagtctccgtcctgtgtcatggaagaggtaactgaggcacagaaaactcaccaggccaggctgggatgtgaggtcccttgctgctcatccctggcagtcagcaaccctacatcttcccagctgggcggcccgtggtgggttcggcacccaggaccctccggggtcttgggctgtggcgagtgtgtaggcacccacctggtgtctctctccccgcaaggcatctacatcctcatcgctgtgggcgctgtcatgatgttcgttggcttcctgggctgctacggggccatccaggaatcccagtgcctgctggggacggtaaggcagggaggcgggcctgtgcctgggccggggaggggctgggggctgcgtctggccctgaggagggggcagagctggtgctcagggcggagcctagaattctgggggaggtggctcctgtgccctgcttttcccgtttggtttttaaattaaatcccaccgtgcttggtctccatcgtggccagttcctacgtgaccgcttttctttgtcaaaaaatagccacaaatataacagggagcaagcctcagctctgaggccagcctcggcgtcccgggcacaccgccccctgtgggaagcccaggcctggctgtgccatccagggcctggccagtccaggaagagggagcctatgcccgtgtctccagtgggggaaactgaggcagatcccatggctcccccttccgtggggagcaggaacaagggggtggggaagatcagtcaggggtcatgctgctgcacacgcctccctgggggctgcagacatcctggactcaccagcctgtgaccccaaaccacacgccccgccccatccaccccgtcctgtggagcctggtgccgcgtggggacatcctgggctttgacggctcctccctgcgctgagttttagcctctgtgccccagggctccacacaagccgctcactcctggtcaggtcgtgggctggtggctcccactagcccctcacagacacgcctgctgggcacctgggtgtgtgtccttgggccccgcctacagcctgccctctttcctccctctggccactgcccggctccagttcttcacctgcctggtcatcctgtttgcctgtgaggtggccgccggcatctggggctttgtcaacaaggaccaggtgagcctgggtgtgcagggacagggtggggtgggtgacgggggcaccctcctctcctgtcgcgggtgggggttgggctgactcatggcttgtgggagctctttgggctcttcctgggtcccacttgccaggaggatctccaggggctttatggaggaggcagcattggggctgagcaccaggccagcctcccgtgtcccagcactcccggggcagctgagagtgcagagtccttgtcctctggggtctagcctcgaagccaccctgcccagggagagcctgggaaaagtgcgtccgcctggggcggggcggggtgggggcaaggagggggaggttccccctgtgcatgtgaccgcacccctcccccagatcgccaaggatgtgaagcagttctatgaccaggccctacagcaggccgtggtggatgatgacgccaacaacgccaaggctgtggtgaagaccttccacgagacggtgcggccccggggggcgagggcggggagcagggccccgggaacccggcggggtgtgtctcgtcctggatgaatcctgcctacgcccagacctcaggagcaggaggtgcccttgggacctccaggacccctggtctcaactggtcctcgggtgggaacctagtgggccagggtggcccagggtgcggaaagctctgagcagcgcagctgaggaggaagaaggctggcccctggatgcattctgcagtggggagcgctgcgtacccctggccacctccccatgggttccctagagccaccgtccccctgggcacatccagggctgaccttgcacccctgctctctgcagcttgactgctgtggctccagcacactgactgctttgaccacctcagtgctcaagaacaatttgtgtccctcgggcagcaacatcatcagcaacctcttcaaggtgcgcgaggccggtggggccgcgcctgaccccccgcatgtcccgcccctgggtggggtcctaggggtgggcaggtcacacggcagccccacagggagcgaccacactgggtggcatggcccctgtcagggctgctctgctgggagggttggggtgggaccgcatctggcccacgaggaaggcaggcgccctgtgctgcgcattccgggtgaagaaggtggaggctctggggggtgggaactcacctgcacccccagctccacgtgtgcactcgtgggtgtggacgcccctgacagcctgtagctggcagggcctgcaggccatatagtgccctgtggaagtttcctgctgaggcctcagtggaagtcgtcatcagtgatgctttaggggtctagtgacaccaatgaccgtgatctcagtggaaaagggcacagtgtgtcccaggcatttcgcgtttatgttaaaacgggtggaagatagcaagccggcagaggccgggccgctgcacccgcctgttccgaggtgggtagggggtggggggctgttcccaggattcccctctacgctttctgtggtgaccacggattactgcgtgacaacgggaagccgggagccgaggcccggtccctgaccacgcgtgcctggccacccctgcaggaggactgccaccagaagatcgatgacctcttctccgggaagctgtacctcatcggcattgctgccatcgtggtcgctgtgatcatggtgagcgggcgggggcggagggcctgctctctgggctgccccttccgcggggccttgtgctgactgcgccccccaccaccctcctgcagatcttcgagatgatcctgagcatggtgctgtgctgtggcatccggaacagctccgtgtactgaggccccgcagctctggccacagggacctctgcagtgcc

SEQ ID NO: 5376 - DNA, 6000 bp, Homo sapiens
agtgggacctaattaaagagctgctgcacagcaagagagactgccaagggaataaacagataacctacagaatgggagaaaatattagcaaactttgaactgacaaaggcctaatattcaaagtctacaaagaattaacaaatcaacaagcaaaaaaacaaccccattaaaaagtgggcaaaagggccgggcgcggtggctcacgcctgtaatcccagcacgttgggaggccaaggtgggcagatcaccaggtcaggagatcgagaccatcctggctaacatggtgaaaccctgtctctactaaaaatccaaaaaaaaaaaaaaaaaaaaaaaattagccgggcgtgggggtgggcgcctgtagtcccagctactcgggaggctgaggcaggagaatggcgtgaacccaggagacggagcttgcagtaagccgagatcacgccactgcactccagcctgggtgacagagcaagactcggtctcaaaaaaaaaaaaaaaaaaaaaaaaaaacccaaaaaaacaaaaagtgggcaaaagatatggtagacagttcttaaaaagaagacatacaaacagtcaaacacatgaaaaaatgctcatcactgatcatcagagaaatgcaaatcaaagtcacaatgagataccatctcacgccagtcagaatggcctttgtttaaaaagtctcaaaacaacagatgctggagaggcagtagagaaaggggaacacttacaccctgttgacgggagtgtaaatgagtccagccaccatggaaggcagtttggagatttcccaaagaaccaagagttgaactaccattcgatccagcagtcccgtgtgctgagtttatacccaaagaaaaattagtcgttctaccaaaaagacatatgcacctaaacattcatggcagaaagacatgagtcaactcaggtgcctgtcaatggtagatcgaataaagcaaatgtgatatatatacaccatggaatactatgcagacgtgaaaatcatgtcctttgcagcaacatggatgcagctggaggtcgttatcctaagtgaattaatgcagaaactgaaaaccaaatactgcgtggtctcatggattataagtgagggctaaacatcaaatccatgtggacataatgatgagaacaagagacactggggaatacaagagtggggaggggggaaggggagcaaggtttgaaaagttacctgtgggtgctgtgcgcactacgtgggagaccggatcgtttgtactccaaacctcagcatcatgcaatatacctttgtgacaaacctgcacttgtacctcctgaacctattaaaaaagttgaataaaatggaaacttttggcatgggagaaaaaaaaaaaaaacagatgtaagttagaagaggttacgcaaaaatcctccatccctgcatttgaatgaggactatcagtatgcatccaggatgacgtttacttaaatatctctgtttcctggaaaggcccaggaccaaggaccactcagcagctaagagcatctctagaccccagactgtggcctctaggtaccatttccccctgaaagaaaccagggcccctggcggattccaggtctgtggcagaagatgtgcaagctaagcctggagtattcatcacagcagaaggcagggaagttatcagaggccccctagggccatgtcactggaacttgaaggggtccttgtcttcccccttctccccaagctgaagatgcagtgggtaagcctcactgaaaataacagaggaagtggatgagctgcattgatggggttcagatcccaagttcatcctgatactgaggggcaaaaccagtggactttgatttgcatttctctaaagatctgtggaggtcaatagggagaccgctcatgatgttgaatcctggcaagcaaacggagagaatctgacatgtgtcccagtcgtgattaacctgtgaactgtaactcggggaaacccagtagctgatggggttgcgtccttctttgggactcccgcagatgcctgaggcggcagtgctgctgaagtcctgccaggctccagctcctggtgaggtcagggattccgcatgcagcgtcacagctgccaacctctccaaagcagtaaaggccttcggacagtgcacagaaagtgctcccatccacaatgcttccttgcctggatggatggatggatggatggatggatggatggatggatggatggatggatcgatcgatctcaccaagcctcgtgctctaagtacaagtttactggaaatactcgggccagaggaacgcgctaaatgatactacaggaggccacttgcagaatcccagtggtgggggatggctctgtaggacacatgacctgatttcctcagtaagtcaatgaccaagaaataacggagagaaggaggaaagaatcacctatccaccaattgtgacatatggccttagttaggtcctcaataaatgatgacaaatattggattaaattacttctggtttgctgcatgttccatttttgcccatgccgcacctgccatggtgcatttctgattcccgtgcccagttgggaggctttggggttgttgggatgcttttgtgaatggcttccttccttcccaggcacaggggctttatggggctctggagcagacagaccagagtttgcacccagctcccagctggccatgttacctcaactgcaaaacgagagacggacttccttgggacgcggtggtggggacactgtggtctgtctcctctgggcgccccgtggcgcccggtggtgtgaggttaggatgtggggcgtggtgtccagggactgtgtggcctgcctggagctgggcagagacaaagcatgcatgtgacactccctgacttcaggccataacaggggcaggggtggggggcaatcagggttcctagaggacaaccccatgtagttcctcactgcagggcttggagggagcaggtgaaggcttacctgtcttaggtaatgaggagctgtgcgggtctgagacagctctggttcctttaagggtatgtaggggtcactgccagtctgtagctccctctgtgggggcaggctgtggcactgtggcgactggcagtactgacttcctctaagccaaccgggcagggacaagtcagcttgttgttccgtccacagtagagggcggccctgggggtgaacggctgaccgtgagggcgtggtccctccccccagaccaccccggaggccccctccgccctcctgcctacaaagagttccccctttgtgttgagaggcctgggtctcagaggtagatgaatggagtcgtgaaatcaggcagggattcccttctgcttaaaacccactctccttcccatgcagcacaggtggccaaaacctgcggctgggtcagaggactggtttagtaagaatttttttttttttaaatgtggttatctgctagccagaaaaggtgtgtggtttcgcagtctttcagacaaactgaatttaatagtagctgacgtgaacccctgtttctcctctaggctccagagccgcaccccagtgcaggtgtggaagctcagttcctccaaaacccagacaggccttggtgtcctgactgccacccccagggggcccctcactcgagtccttgcttgcagtgcccatgggcagcagaggtgtccggagatgcaacagggcccagacccctaccagcctgtggcccagctgggggcaggactccggggcagggtgagtccctgcgtgacctgattctctgtgggcaggccgggcagggtggctgcagggcggcggagcctgtgctgctggcctgcatttctctggctggacagatactgcgcccatatccctggtctttcaaagggctctgtggctggtggagggcagcaatgccccaagggaggagcaggtgcccaagcccccaggtggccctgcgggtacaggtacttgtttactctgtggcatcagtcctgcttcccagctcaaggccctggcctccacaggcctcctccctccctccctccctccctccttcccttttttcctgtggctccaaggcccacagtagaaaggctccagtctgtgtccatgtgttttggaggcctctcaggtacagggactgtcagcccagctgtaagtggaccttggaccgcaaatttgcatgggcccctttgccaaagccctgtgcccactgctggggaacgctggggactccgctcttgtggggcagtggggctgggtgggagcaaccccccatccgggtggctgtggccgaggcccttatgagagggtggtaggtgtgtctccacagtgggggaccagatctctctctggccccaaagactgcttcaagcctctggaggagcactttgccccaggctggggcgtgactgcttctggttgagggttgctgcctgtgcaggtggccctcttgtcggtcttgtctgctgcatgggggtgtggcctcctgtggatggcccctgtcctgggtggtactgctgcaggacctgggtttccgggggtgtccgggagtcggatgggcctcactctcctggcctccactgggtccaggagtggcgatctgtgagccaatggccgtggctgggggcagcctggggtgttgagaggccctgggcagccaccttgcctctctgagtttgtcctcatgtgtctctggggctggaactcggtgtccgacctggtgatgggtcaggtgtgatcaggtgtgtggggctcggtctgcatgtgcagggctgtttgaaggcctgtggggccatctgatgccccccttttcttcagccttggagaggatggcttctcaggccgcctcgcagcagatttgtagtctggttgctgtcgttcctgaaatagcctctgaagctctgtccgggaagggaaccttgagtgtggaggagataagcctgctgactgggtgagccggccggggcgggggtggcccctcttcccttcctcccctgcagcttccatggcctggggctgtgagaggcccgggaaggcactgtctttgcgcctgcacatgtgtgtgtctggagtgtaggatggcactggtgccgggcctggatttactcagcccagatcacggctgcttttgtttacgtggcccctgctctcacccacaactccaggtttctggctctcgggaatttgaggcctgtggctgctgtggaccctgggaaagagcctgtgcttcctgagccagtgcggggcctggcatggagtaggtaccccgggggtggacagataggcagaggaagggatgggcaggtggatggggggctgaattgtggtcagttatgggtggcgggtagatgggtggacagctggatagatgaagtactgggtgggtggagagagaaaggggtgggtggacggagggatgggcagggagagaaatggatggggcatgctgcttccagcacccactgggtgcagctgtctgctgtctgctgtcctgggggaaggtctggagagggcctctcggtgagtgtggactcagccagcctagtcccaatacagctgggatgcattgctgctccttccgccatcccagcagctgtccagagatgagacccagccccactgtgtctttctgggattcacaagaatccttccctgggctgagggggcgttgctgtgggtgtatctcatggagagccccaaggagccagggaggagccttctggtggtttgggttctggattggtgggtgctgggtgggtcttcatggctgttcttggggctgccaggcctgcaaggtagacaggcctctggacttgagtgtggctgtggacgagggcagcgtcgccatcagaggcgatgtctagggccaccccctctgacttgcctcctcctccttctgacttgcctcctctctctgacgggcctgctcctgagcttgacacctgcctgggggctcccggcgaaggccgctggtttctagaatgcaccatctcttcct

SEQ ID NO: 5377 - DNA, 6000 bp, Homo sapiens; identical to SEQ ID NO: 1627

SEQ ID NO: 5378 - DNA, 6000 bp, Homo sapiens
aggaacagaccttgaataacactccctacctgactgaagctgtagagcccttcattcccctcctccccggggaggacacagccagcaaaactggaacaaccaaggactgcctccagcaaggctctcttagccggaaagttagtgggatcaccctggggatacctggggtaggaatgtgggtggtgggcattcttgggtaagttcacaagactggaacagtctgagagctagtgtggcaagcaggggaggggctctgattaggctgagcacgaaggcattctccccagtgcagagaggggttatttgtgaggcacctagtgtgccccctcccccaccccctccaacttctggacctctgtacaaacccttaggctgcctccacaggtgagtgctgctgggggtagggctgggcccaccctgaaggggttctccctgtgggctgcaggagggagggaggatgaggaatgactgcctgggagggcccatgcccagttcccccaccctctttggtctgggtgaggcacctgaagctctggggacttctggctgaggtcagcaaaggcatcacccagtgcatgctgggtctgcagcaggctgtagaggtgggctgtcagtgcccggcccagctgcaggacactctcatacttgcgcttcgtctcacgcagcaactcaatctgcagctctagctccaggtccacagtccgtgagcctcgaccaaatcgttctgataacagttgctttgtgcactgattgggaaatgggggaataaatcagagaccctaacagcctccccacacaacaggtatctaccccagcaccccccaggctcctactctcagccacagatgggatattacgatcacgaagaaaagggaaaaaggtacccataaggagttttggggaagggagaggtgcttaaatcctaccttataggtgttgatgccccatttcttgacgatgtcaaacttttctccagcaatgccccgagccacctcatctccagggccagaaggagtggtgctgtgagatggatggcggccagaccctaaaggatcaagttctctgacaccagcctctctcagatacaccagacacctctgtggccccacccatacttctcttcgagcacatgaaattgacttccctgaaggagatgctagagacaactggatgctcctgcttactaggaggaactcggactttgcgcggtgagaaccaaatcctgatatacatatggcctccttgggggttagaggaggggtttgcagggagttgttggtgtacaggggcagaggaaacagaagaaaatacactgagtttgggggcagcaggagtcaaggatggtgggtcatgataacaagaaacctggttgcattcccatgtggaatcttagtgtgagattcagggctgtttgttcctctaaactttagaatctaaaaattctgagaagcttcacaaagttccaactcagcctcaagctgtagagggggggcattcctgtgaagcaggtcttaacttgactcaggtggtggcagggaaaggacaaatgagccatttcaggggctaagtggcaaaagggaaatggatggacaacgctgggagttgcttttgggctgaggagagtccatgaggttcctacaagcagaagttcccaagatctccagacataattcaagctttcctagacatatcctatgcttccccaaaccattcctgtcccctcctccacccaagattcctgtttctgaacattcatacctgtggggatgagtccatcaccagagcccccatagccaccagacacaatgctggtttcattgaggttgggtcctgacaccatcacctgctggaggtcctataggccagagaagaggggttgcttcaggaacataggggctgcagaagcattttggaggtgggaacaagtttggattcaagcatcataaagatagtacacaagggaagtctgcacagaatcaaaatgatacgtaaaaagaatgaagggagtcagataagtcaggggaaggctactggaatggagggtgagaacctaggatttataaattggattcctaaattgaaacaattagaagaatcaaacagaagcacctgctccagcccatcatcttcaggaagctgcctggcttcgccgttcccgtggatagggatctccattgtggctgccttccctaggatcccgtccgtcatggctaggaaaggtattggagtaaaactctccaccccagcaccctgcaaagcccaacacagaagttctggacactggccagcactctagaagaaggaggcctcctctgtcatttctttaaaggctgtcccagggtttgagtgtcccagcgtttggccatcattcctttcttcagatatatgtatttctcccctccaaaacgcacatttgaaacaggcacaccaaagcacggtgtcttctcacaagcccccaacctcaccaggactctggtgattatttctacactcattcagcagacatttagtgagtgcctactatgtgtcaggcactatttgtgacaatgaaaatacaacagtgaagagggaaagtctgctctcttagaacttatctccatgcaggcgtgtttatgctgaggagatgaaccctttccagggctcaggtcttcacccccctattcaggtttgttctccattgcttggcctttcacattcctttagcgtttcttcccccttccttcagggggtctcccctcctccgtctcatacacctcgtcttcctcgggccctccccaccaggccttagttagatcagtgggtgtatgttcccagtctctggtaaaagcctctctctcccaggatatcggtgacccttccacagtcagttatgtctcccaggtgtgtgagtccccgcccccacccccatacacctggacatcaggtgtgtcctcatccttccccggggctcggggcatcttgccctctggacaggtttgtgcgttcaacttcccgtcgcccaagcatgttcctctcacctcgggccgggccgctcttcccctcagggcgccaggcccgggccgcgcggggacctcgggctccagttcccgtcgcgatcctagcagcaggtcagggactcggcggaaatgacgtcctctccgggcagaagaagccggccacgtcgcagattataagggcggagctgacgtcgcagccagggcagggcgatactcgagctagctctcgagatcagcgagaggttacttccggggcggcaccgagaagctgaaacggaagtggcgtacggcatgcgccggtggcgtgatggagcggcagcagcagcagcaacagcaactgcgaaacgtaagtgagaactaagtcgtttcgaggccagacgttcagctcgcattcctgcacacatcgcgggaaccccacagggccagggatttgagggctggaaacttcgggctatggcgcgcgggcctgggaaactttgggcggcgcgaccttgactagaagtgtggggcccttatcgctgagtttgtggtcccccttttctctcagctgcgtgacttcctgttggtctacaatcggatgacagaactctgcttccagcgctgtgtgcccagcttgcaccaccgagctctggacgctgaggaggtggggaactgtgtagggaggttacgctgcaagaagagtttagcggtagactgcttccctcctcaccccacttcccgtacctctggccctggccttcccacgaccctcacccctaggctgggcatggggaagaaaggaggcggacccgacagggcacctttatcctccacttaaaccctatcttccttctaggaggcctgtctgcacagctgtgctgggaagctgatccattccaaccaccgcctcatggccgcttacgtgcagctcatgcctgccctggtacagcgccgcatcgcagactacgaggctgcctcggctgtgccaggcgttgctgctgaacagcctggggtctctccatcaggcagctagccatacccaaccccaggaaggaaggccttggatggaccctcagattgaaggacccggtggaccttggggttggtgaatcctaaacagagagaattcgaggttgcctgaaagctgggtgtccttgctccttttcctggagccaatatacccagtttttactcagtttgatttatattctgggcaaggaagctttgcctactttattggcacaatccgttgttctgtcgtttagtgcatatctgctggcttcagccctggcagctgagaaattgttttctatatgtagaaggaaaacctgagcatttgcaggcatctggttaaagcagggtctgtgtgtacaattttaaaacgggtaatatgtcatgctcttagttcatcttcacaacaaaactatgagtaagcggtattagcctcacttaacagatgaggaagcaagattccagaaagtaccagaaggtcattttatacaacaggagattggttcctgcccagatgacagaaaatgggagctctgtctagttgtccttaagtctgactgacttcagtggctcataaccgtgagccaagtatttgttggttcataactgttgttttgtgaactatgtcttacatgtctagagttctgctggatctagggaaaggaggagctatcgaagtacaacggatcaaaaaaccacagggcttttgggcactgcctccttgggaagttagtggccacagaagagagatgaaacctgtaagaagtctggagtcttttggaacttcagccatttccccaggttgttactttcttagtatgtacagtcttctcaggatgagcagtaaaacctttgaacaaaggtctgtgtggttgtcttcacgggcaatcaggaagggagagagctggggaccatattctgcaatgcagccaaatccgaggaagagaaactgaagggagaagtagatggcaatggttatgataaaaagggataaaactaaatcttcgggacttctttaatgctacgttaatgtttcactgctcgtctagaaactcctaaatccagctttctatcatctgccccacattggtcccattgagtacattctgtgatttctaattccagcctctccattcttttctcattattgcctcccccgccccccaactttgtgtaatttacttctgtattcagcagcctggatagcatatcattccatcaccccattttcttgccaccattggccatctttttgtatcattccacttattctgtcttttccattccttcattcaaactgctagagaaaaacagttgtgtaatgaatgccactaaatattcaaggcctccaacctcagccaagtcctcacaccaacacgcagtcacaccaacacacacctttatgggttcctggtccatttccttctctaattaccatggcagttattttacacctctactgctgtccttaatcccataccccaccctcatcaggtgaccctgtttccttttttagagaaattgaagctcttagacattggtttccacagtaataattttaaaacttcttacaactacctacaaagcagatgttctatcctatctacagagcagaaaattgaaattctcaagtagcagacccggtattaaagtgcagatctgactttaaagtccatgttcattttacacagcaggctgcctcttaagatagtatttattgagcacacactttgtgtaggttctgattttggtagatgtcatgctttatattaatctttacaacaactataagtaagaggtattaacctcacttaacagatgaggaagcaagaatccagaatgtgccagaaggcacattctgcagatttcgtgcaaacatttatacacagcttcttttttttttttttgagacagagtctcgctctgtcacccaggctggagtgcagtggagcgatctaggctcactgcaacctccgccacccgggttcaagcagttctcctgcctcagcctctc

SEQ ID NO: 5379 - DNA, 6000 bp, Homo sapiens
tgggttggttccaagtctttgctattgtgaatagtgccgcaataaacatacgtgtgcatgtgtctttatagcagcatgatttatagtcctttgggtatatacccagtaatgggatggctgggtcaaatggtatttctagttctagatccctgaggaatcgccacactgacttccacaatggttgaactagtttacagtcccaccaacagtgtaaaagtgttcctatttctccacatcctctccagcacctgttgtttcctgactttttaatgattgccattctaactggtgtgagatgatatctcatagtggttttgatttgcatttctctgatggccagtgatgatgagcatttcttcatgtgttttttggctgcataaatgtcttctttgtcaccaccaggcctgccctaaaagagctcctgaaggtagatttcaagtaaaatcactaacaaaggatgctacgcggtccagggctttcacctaccagaggatacagaggagtcactctcccctccaaccacacaaaacagactacagaggtctttttatgtatgcttttaaggaattccattcctgggattcaacatagctgaggcatatatggacagatggtggagcattgtatccagagatatcaagatgagaggataaaagaagagaaatcgttgaagtttccttgctcttattagtacatttaaaaaaatcatagtccatgggctgttacaacaagttctcaatgttttccatttttatatttgccttgttataatccttaaaattaattaatcttaaaatacataattgccaaagttttgttctatttaaaactgtgattttatttaatattgacattacaagtccatttctggaatctgcctgccacagaggtttggtccatcagatagtgtggtttcacagttaatagagtctctaggcagactgcctgggtttgaaacctggctctcctaattattggctgtttcaccttgggtaagtgcttccatgcttcagtttccttactggtaagatggatgtagtaatagcacctaccttatagaattattttgaggaatcaatgagttattatttgtaaagtgcttagaacagcaacagctccacaaatggtctccttcccactaattctgtaataaaacagcaagtgctgggggaaggtgggggtgatggggggcaagaaaaggaacctgaagcttctccagtgcatagaagtttcttttgcctcaggagtcatcctgacccagaaacggtgttagtggtgtaacattgggctactttgtgttcgctggaaatcccagactaatattaatattcatgggatagtctctggaagcctagacttggacccacttataccttagtgcttaaattgtacagacactcagacaggtatgaattaaacttgggtggggggcagcttattcggccatcaatttttattttatagttctatgtgtgtgtgtgttttgaaaaacaaatggttcattttcttgctcctgtgggagcaaagcaagtcataaacttaaagcaagtgtctgcaaaaaactttccaggcaccagtctttctgacagacagaacatcatctattcagtagaaaaagtcaaacttgcttgctatcttttaatactcaaaaacaaaaacaaaaacaaaacccaacaacactgagactggtagcttttccatggttatctccatctaaaccttcatgaatagattccttcctccaggaataaggaatgaagacctaggactgacaagcaagaaacatgagctccatccatgtttgttctctggcgtaaactctgtaacttggaggaaggcttttggtttctgaggttgggctgggaattctgcagggcatagacaacttgctctcaatggagaaaacacacaagcacacactcagagagactcagacaacttgcatgcatacacacacaaaattctcacatgtagacacaccttcaagatacacatttacattaatgttcacaggtctaaggtgttaagactcagggaggatcatggaggggtgaggggcttagatcagttcagaagaggaaacttttcagatagatttctgtcaaagtaaaattgaggtgcagagccctcttcgagcccttcatcaagattcacaaaaataaggcattaggctagaaatagctctctgcaggcatttatatatacctttaaactccattgtttgaagcctatcaatttggagtgctgaattctactagattctaagatattagagtaagatagaaagatgaattttagtcaaccaatcaatgtgcactcaatggatgcctactacagtcacaggcagtgccctctgggccctgggatagagagatgattgagatattatccctacccgatgatagtctagtagggaagatgagactaatacatatgaaaccagctaatctaacttcaacgttagactattagagcccaaaaagtgtcctgccttgtcaaacatgctattttgccattgaaatactgctatccagacatagtaagtaaatttcttatggccacatgatcaaataatagaccagttcttctagagagaattactctctccatccctttgcattgttttataattttataaaaaacttttacatggctctgtgctttaactaggcatctgcctgtctgtccttccttcagggatgtgatgccccacaggtaagaacctgaccttatacatttaaggagcgcacagtgactgataaggccatatttagccaggaggtgctcaactcatcagccttaagtgatcggaaaggatcaaagacaacagtccagggaattcctcttggccaaggtcgccattcattacaccagatagcacaggtagtaaagacctaaatcttggatacaaattcgaggtaagatattttaaacttggcgtaaaattatagacctgtttctaagcccttctgtcttcttctccattttaaactcagttgctttataattttacataaaagggtaatgcattttcatttcagccagcaggaaaaggttaggctcctcaggtgcttttgaatcttcatgtttgcagacaaaatcattgaaaggttttgatatatttctcctaagggtttttcttgaaattacaccaggtcactcaatcatcagacaagcatttttaaaaacaaaacaaaacaaaactgctctttgtcaaatactgggcaagttgttgtctacaaacttgcttggctgaattactgagcaactactttatgcccagagaaaagaaaagagcagcatggttcttacatgtttgctaagctcttgacccatgctctcatgagtaccctatcccatctggatctgagtgttgcccttcactatccaccttctttcatttaacagttattcactggacacctcctatgtgtcaggcactgtcttagatgctggattcttggtgatgaacatggcagacaaggtccctagcctcagggagtgaacatactagttgtcagagggaatgggggatgggagtaagcaaaaacaaaaacaaaaacaaataaacaaaaaaaaccaataagcaaacagatactcagaaccctgaactgtttctgacatatagcaggtgttcaataaatatttgtgatttaatggaatgagcaagatagtttctgatagtgataagggatatgaaggatattgatgtgaaatagagcatttagacagggtcaacatggaaggctctgtgaaaaggtgatgtataggccaatatgcaaaggaaaggaaggagcctgcagaaaaggtgtccctaaagttgaggaagaagcaagtgaaacatcagggagttagtaacaaactgattgcatttgaggacagagagagaacaatgtgactgagacaaactgagcaagagggagagtagcacaaactgatgtcagaaaggtagagggagctcagctatgctggcactatggatcaaacaaaggagtttgggcttaatttccagtgttattggaagcatttggggttgaagcagtaagtcaatgtgattaaactcatgaattgaaagatcgccatggctgctctgaggggaaagaattggtaggaggcaatattggaagaaggaagtgcgtcagttaggatgttttagcacatcaacaggttataggtgtgaaagatattgttcccctctgcccttggtgtaaccaggagagaatgagtttggccaaagctgtggggcggttctggccataggaggattcatcctttaaccagagaatgctgaaaaattagcaccatcttccgtgtctgtcacaatgtaaaaaatattggaaagccctgcttcaatacatatttttcatgctttctggccatcgggcttctttaatacactctttctatgtttggagaaatttcccacttgaaaaccagcctccaagataactgctagtgatccccacgtcctagcatttgctcccttgagtggttccctcccacacagcaccagggttagtgtgtgtaaccaatagaacacagcagaagtgatggcatatcacttctaagattaggttataaaagacagtggcttatgtcttgagcttcctctcttgcttttttctttttttctctctctcatcactcactctggaatagtcagctatttcttaagaataccccagtatccttgtggagagggctgcatgatgagaaactgagacttccagccagtagccaagcagtaggcattattgaaagcagccccagtcaagacttcagatgatgcagctctggccagcaagttgactagaatctcatggcagaccctgaaccagaaccacccacctaaactgcttctggatttctgacacttagatattgtgaaatgataaatgtgtgctgttttaagttgttcattgtgggggtaatttgttacataataatagatgatgagtgcatcccctttgtgaaccctgctaccacactcagcctctcttgcagtcctgagctttgtcaacatgatcctcctgcctgagacttcaatttgggaaagaatgatatgaagaagccagtaatgcagagaacaaatgctggcgaaggtggtggagggagatttagctttcaaaggaggcagaggtaaagttgctagtggggaatcttgtgcccatctctgtccctgtggatggctgtgcctgcacccagaagtggtgggagtggtagagtcagcattggagctgtctgctgacagaacatggatattgtttctggctacctgacacccaagcctgatttactccaggatattctttcatacattttgtttaaactatctagtgagctctcttattggcaactaggaacccagactgacataaaaacctttgaaggcaagtaacagaaaacactgcctcaaagtagcttaaataatatggaatgaagtagctcccctaacaggaagtgcagaagaaggggactgcaggggtgaaccgccaagattctggctccactgttctagagcactcaagcctgggtctttccctgggtgtttcatcatcctttctggctggtggcagtttgactacagcagtctttttgtaacagtgaggcaccttattcagtagccctctatagactttccttcatgtctcattagccctaattatgtcagatgctccatcccaaacctaacactggaaagaagaatggttttaccacaactgccttggactaattagttttgacctccaggatccgggaaaaaagtcatactccctcaaagcacctggaagaaggtggctacattaaaaaatatagggcttttctgtagactaatagatactgagtaagcaaccaatacagtctgctttagacagttattacagggtccaggcagagggtgatggtggttcgtattagggtaatggagtaggggcggagagaaggacacacctaaaagcaacaagatttgctggtggattggattaggagggagaaggg

SEQ ID NO: 5380 - DNA, 6000 bp, Homo sapiens
aaacatttttatttttaggctgggcgcagtggctcaggcctgtaatcccagctctttgggaggccaaggcaggtgggttgcctgaactcaggaatttgaggccagcctggccaacatggtgaaatcctgtctctaccaaaaatacaaaaattagtcgggcatgatggcatgcacctgtaatcccagctactcgggaggctgaggcaggagaaccacttgaacccaggaggtagagattgcaatgagctgagatcttgccactgcactccagcctgggcgacagaatgatactccatctcaaaaaaataaataaataaaataaaataaaaataaaatttttattttttagatgctgggttttactctgttgtccacgctggagtgtagtgacatgatattgcatcctcgaactactgggctcaactaatgctctcatttcagcctcccgagtagctgggatttcaagcacataccactgtgtttacttttacattgagtaaagtgtgtagcttctaagagtgttcaataacaaacaacagtatttcgtgaaatctgaaataactattctgaacatattgtacctctacaaaacatgaagtcctgtttctaagcataatattacacgcaagaaaaggtggacataggaaaatataagcggaaaaggatgttatctcagctgatgaccaaaatgtaagaattcagagacagtatggaccaatagtaataataatattaaaaccgtactgatatgttaatacagtaggcaatacttagtgacaaaatagttgtgccaggcatgctattgcttatgaggatccagagatggaaaaacaaaacgactgctctttttctttgaaaagcttagagtttagtggtggttcatggacacatagacaatcattgattgaattacaataaaaaagactgtactggaaaaattatgatagaaatgtctactcctgacttgtagtaaaatgatggaaaaacaaatttaagaaactttaagagccttagctatgtgaacagtgtagttcacactttggtcaggtttctgtcaacctgaaacaaagaggcagttcatataattcagatgaagattcctctcttttgctacaaataagcattagcttattgggtgactcaagttcaagcagttgaattattttgctaaaatgatcaggataaatagtttaattattcactttgtggaaacttcaaagtgctgtggtctaatgaattgaacaagcaaatgtcagcttgaaagatttgttattgaaatatattattttgcatattgttgtatttgctttatgttaatatatttaatattggcatatattaaagtataccaaggtttttaaatttataaaccatttataaacatattctgctcctccagtgtgttttctgggaaccctttatttcttcaatgatgcaatgactgcaagttactgcatagctctgtactagaaaaaagggtttaaaaaatgagtatttaaaattcacataaacatagcttcagtcaagtaggaaatacacaaatttgaatgactgagaccttggcattgatctgggcaggaagtgagctttaggacacagctttgccttaaatttattggtctttctggacttgctgacctgaacagacaaacgcagaatgtcagaacaccaatgaaatgggattgggatgatataggaagtgaaagcgtgacagcttcatatattcaccaaatatttctggctcatctgcttcctacccggcatctgatagaataccatctcttgactcccttatagttggatagggtcatgtgactctttttggccaatgaatttaagcagatgtgatgcatatctacttgtctaaagcatttaattgactgagatattcctgagttctcttgtggtacagtgatcagcaacacttgagatatggcatcagcatgaatctactgagtgactactacgaacagggccctctgttgaactgtgatggatgtgtaccatttgcagttgttttttgttttttgagacagtctcactctgttgcttaggctggaatgcagtggcacaatcttggctcactgcagcctctgcctcccgggttctcgtgcctcaacctcctgagcagctgtaattacaggcatgcgccaccacacccagcaaatttttttgtatttttagtagagacaggatttgccatattggccaggctggtctcgaactcctgacctcaagtgatctgccagccttggcttcccaaagtgttggaattacaggcatgagccccttcacctggcccctttgtagttttaaaccagggattggcaaacactttttttgtaaaagaagagatagtattctaggttttgcacaccctactgtctgttgcacacccaagtactcaactctgctgtgctatggcagagaggcagtcatagaatggatgtgcatagatggattggatgtctcccaataaaactttagacattggtcaattccgaggaacaaaacagtgatttctgaaactttaatgtacacacaaatctcctgaagatcttgttaaaatgtagattcagttaagtctgctatgcagtccaagatagtagtgatagtggtagtgagagaggttgggctgaataaactttgagttgcaaggagctaaaggattatcatctccgtttctagcctctaggcctggcataattgctcagcgtagtgctaaggatggtttaggtgactaaattttgaaactatgactccccatctaatgcagcaaaagccaaagtccttaccgtggtctttcaggccctacaagaccagccccctttaatatgtttgacctcatctcctactctctgctcttgccactatggtttccgtgctgttccttgaacccaaaaagcacactccgtctcagatcttagtacttggtgtttcctctacctggaaaattcctcctccaaggtagctgcttagccttcttcctcacttccttcagtactagctcaaatgtcagtaaggctttccctgaccaccgttttttcttttctctaccatttcactatctgacatgtatttacttgtcttccccttacttagattgtaagctccatgtaaatatgttttgttcataatccctagcacttaagagttcccagcacacagtaaggtgcttaataaatatttgaatgaatatataacagactttgcagctaaccaggatatcttgaggtcggaggctgctgttgtttctccaggctccctcaggatgcactgttgccagtcagcgttactcattttattccctagggaacagtgggtttggtagaactctcttctaaatctctttttcatagaatttaaattataaattggtcatttactgttgtcacacaatattgcgttgctgaattttccactgattatattcattttatttcctcccagaacttggtttcttgtttttctgctcactgtccacacccactccaccccaaggctggaataattctcttggagcaaaaaaatcatctttttctttgtatttcattgaacgttctctttacagtgttaggtaaacctaaaaaaaaaggaaacaaaagtctaataattcgtaatactcaggcctactggatgtataacatcatagggtagctgaagactctttgtgaggccagagctttaggatttaaaaagccaccaaccatgaccgtgtccgacacgttctacagagaactcctaggttactgggtgattgtttggtggggaagcggcgagttgtctttttttcaaaagacgttttggggtatggagtttgctcgctctgcatacagaaggaattctagaagctgggatcgcaccacccaccccacgcaccccttacttgcagaaacctttgccccccaacccccacccccaccccaaataagggctcttcaaggggcagttgccagctccagagccagctgcttgacacctattgtccccgtttgggcgtcaaacgatttcgcctgaaggaccctagcgtcgattgctctcaaaactcaaggggcctttccttcggccttgccggggccatccccacctgcgtccaggaggcgccccacagcgccggggccgggggacggcggagaagctagcgggcggcctcttccgggcaggcgttcgcgccgggcagcccgagcggccgcgaaggcccccgctctccgcttctcccgcccctcgcgacccagagggctgctggctggctaagtccctcccgctcccggctctcgcctcactaggagcggctctcggtgcagcgggacagggcgaagcggcctgcgcccacggagcgcgcgacactgcccggaagggaccaccacccttgccccctcagctgcccactcgtgatttccagcggcctccgcgcgcgcacggtgagcgccacccgggaccgagccgctgcaggggaagagggccgctgcgcccgggtgtcctttatctccggacccgctggagcttccgaggggcttgcccccaagtccccccaccccaccccggtcatttcccatgcccttctctgcccccaagccccgacctctctctttcctcccttctccggaagccggcaaaagccggccctccccggtagggaccgttgcagtggccgttggcggccggcgcggcgatgccccgcctccggcgcgagcctcggagcccccgggctggtaggccgagccggcggctccgcgggggaggggcgggtcggggggcggtgcgaggcccagccgggcgccccgctggcgggtcgcgcgcgcgcccgcgcactcttcctgccctcgaggcgcgccgcgccccctcccccacccgctcgcgtaggctaccgctcgctgcgcgttttgtcccgcgtctcgccccgtccgtctcctgactggccgctcttgtccttcctcccgctttttcttctctctccttgcggtctgaagatgccctcggccaccagccacagcgggagcggcagcaagtcgtccggaccgccaccgccgtcgggttcctccgggagtgaggcggccgcgggagccggggccgccgcgccggcttctcagcaccccgcaaccggcaccggcgctgtccagaccgaggccatgaagcagattctcggggtgatcgacaagaaacttcggaacctggagaagaaaaaggtgccaggagttggcggggaagggaggggtggctgcggccgggctctgcggcccctccgaccctggtcgctggagccttcgcttcttttcgtctcgggagcgttactaggtcccctcctcccaccccctggcccacacgccccgtctccacgttcagcgggagcttcgtgcccagaaaacgggctcttggaagaggcacttgtcacctgactcggacgcggcactgtaccccaggcctctttattactcttccgctgtgggtccggctttttggcctttaggagtgggacatgtgagggtgggggcctgtcgtcaggacttcactgtatggtgcccttctttccgtctctgaggcccgatttctctgacgagggcccaaaatgaagaggtccctgcgcggggggctccgggttcaaccgaccgcctcgtggagttggggcggcctgcgtcctgcagccttggggtctgtccgctcggttaccatgcactcgagacctgtcgagcgtcccctcttcttccgtaggagagaagtgtgtttagaatcttaaggtagaactgcctttccggcaggcccattttgaatgggtcttcgatttgctacccccgcgcccatgcgatgggctcccctgcgtttccctctttgtttcaattgtttaggtgtccccccgagcctcaggctcagctcaatcgcgagatgattttctgcagcgactttttgttcctaggggactgtgaaggggcgggggactgccacgatttagattcgttgggggctgggtcctggggagactggagaggatggctgggactcggg

SEQ ID NO: 5381 - DNA, 6000 bp, Homo sapiens
gctagatgatctctgaagccccttaaggtctagtgctccttcttaaattcttataactaggaataacttaaaaattagaatttgtctcttaaaagcacttattagacgcctagagcactgaatattggaatgagttatttatgagaatcatcctaccctcctgaaactactcagacagatagaaacacataaatccaaagggaaatgcaggccaaccaaaaaccaagcacaatattcctgtgtcctataggtcaaatgttatccactgtcaagatcagcttcgtttagattaacaacattaatccccacccactcccatgcacagacatattttttatgctcataaatcactttcccacaatatttcattccatccctcaaccacccattggttagggaaatgggaattactttaactagacaactttcctccaaagaacacaggggccagggaattggaagtaacacaagcagtattctaccttgagccttttaaatcctcttcatagtaaataataacgaggtaggtggaggcagccaggagaaacaagcaaaattcatttcatatggcttttgttatattaacaattatagatagcacttgaaagcttactgtgctccagatactgttctaagtgttaacccaaaccttagtttccttaccccgcataagagcaagaataacaattatttccttacccctcataagagcaagaataataacaatagactcatttatttagtgacagtctctgtttcaagggcttttcacaatcctatgatattgctactcttagtaacctggtattattgatgcaaaactgaggctcagagaggttaagtgagttgccccaggtcacatagcagtaagttctcaaaaccaggccttccgagccccttttcttctttcttttttccttttttttttttttttttttttgagacggagtcttactgtgtcacccaggctggagtgcggtgatgcaatctcagcttactgcaacctccacctcccaggttcaagcaattctcctgcttcagtctcctgagtagttgggattcagccacgcaccaccatgcccccatgaccggctaatttttgtatttttggtagagatggggtttcaccatgttggccagctggtctcgaactcctgacctcaagtgatccttctgcctcagcctcccaagtgttgggattacaggcatgagccattgtgcctggtctctttttcttttttgaaacagggtctcactctgtcacccaggctggaatgcagtggcacaaacacagctcactgcagcctcgacttcctgggctcaagtaattctcccacctcagcccccaaagtaactaagactacaggcacatgccaccacagccggcttatctttgtattttgaatacagactgggttttaccatgttgcccaggctggtcacaatctcctgggctcaagtgatccacccgccttggcctcccaaagtgctgggattacaggagtgaaccactgcacctggcctccaaggcccttttcttgaccatgcatcctgctggactccatctgtattcctggtccccatgaatctgtttcacagttcaagcatccttcccccaacccctcatcaagccttatgctagaggagacaggatctacctcctgttgaggaggtataatttttatttccccaaacaagagcttaaagtttatggccttggcagtcctacagggaatggtccatgatcatgaataatagaggctttgtcactattactccaaatatccagaggcaaagtgaacaattctgacttcatactgtttccaaatctccagagggctggcagcattgacagagccaggcagagcccaggctttggtcataaaggcctggatttgaatattggctctgtcattcttactttctgtgtgacctcgagcaagttattaaacctcttttggcctcagtttccattgctgtattatgggaacaatagctgctttgaaagagtgttgtaagaattacagaaaattacatgtaaaatgtctggtattcaggaggtaatctgcttccctgaatccccatcttgcttgtagttgtgaagctatgcaactttccttcctctaagcatagtctgactcgtatatgtgtagtagtgatatgttacaggaaagaggaagcattgcattaggctgggtggggtgaagcaatggacagtaaccagggaaaagatcaaggtcgtactcttccatagcaactttcttttgcgtttgggtcttaagtaatgtttgagaaaccttaaattaacgagaataatttgtcttatgttattaaacttcctatatcagggttgtatgagttagccaatgttaggaaaacatcactatggccttatacctctagaaaaatgttgttttattcttctcgatacattcagtaataatgctgacaaggccgacaaagtgttgactgggagaggaagttatgggactttctggaatatacaaatcagaatgatttacaatcatcatgttgatggtttatctaaatctgcagaaactgctaaaatgcttaaaagaggcaaacatttccattgtgaagtaagatagaaagagaatcagaacttgagagtcagacagaccagggtttgaatcctctttcttacttgctgagttacttgggggaagttactgaattttctgatccccaaggtttcttcacttggaatatagagaatataataataacaccggcttcctggagtcttagttgctggtttgcaaacttgactgtgcagagaagcccctgaggggttgcaaatttgactgtgcagagaagccacagatcctgggctccaactctagagttttctgattcagcaggtttggggtggggctgagaatttgtatttctaacaggttccaagatgatgcttttgctgctggtccagggacctcactttgaggagtgctggttgttatgagtctggttgttaagtgctggttgttagttgttaaagtagagaaaacccctagcacagtgcttggcacacactaaagccatcataaaccatagtgatcatcaatgatggtgctcagtaaggatgatgatctgatgcctgagtcactgcaatctttctgatatggtacattttttaaattattaggtgtgggcagaagaaaaagctagtgatcaacagtggcaatggagctgtggaggacagaaagccaagtggactcaacggagaggccagcaagtctcaggaaatggtgcatttggtgaacaaggagtcgtcagaaactccagaccagtttatgacagctgatgagacaaggaacctgcagaatgtggacatgaagattggggtgtaacacctacaccattatcttggaaagaaacaaccgttggaaacataaccattacagggagctgggacacttaacagatgcaatgtgctactgattgtttcattgcgaatcttttttagcataaaattttctactctttttgttttttgtgttttgttctttaaagtcaggtccaatttgtaaaaacagcattgctttctgaaattagggcccaattaataatcagcaagaatttgatcgttccagttcccacttggaggcctttcatccctcgggtgtgctatggatggcttctaacaaaaactacacatatgtattcctgatcgccaacctttcccccaccagctaaggacatttcccagggttaatagggcctggtccctgggaggaaatttgaatgggtccattttgcccttccatagcctaatccctgggcattgctttccactgaggttgggggttggggtgtactagttacacatcttcaacagaccccctctagaaatttttcagatgcttctgggagacacccaaagggtgaagctatttatctgtagtaaactatttatctgtgtttttgaaatattaaaccctggatcagtcctttgatcagtataattttttaaagttactttgtcagaggcacaaaagggtttaaactgattcataataaatatctgtacttcttcgatcttcaccttttgtgctgtgattcttcagtttctaaaccagcactgtctgggtccctacaatgtatcaggaagagctgagaatggtaaggagactcttctaagtcttcatctcagagaccctgagttcccactcagacccactcagccaaatctcatggaagaccaaggagggcagcactgtttttgttttttgttttttgttttttttttttgacactgtccaaaggttttccatcctgtcctggaatcagagttggaagctgaggagcttcagcctcttttatggtttaatggccacctgttctctcctgtgaaaggctttgcaaagtcacattaagtttgcatgacctgttatccctggggccctatttcatagaggctggccctattagtgatttccaaaaacaatatggaagtgccttttgatgtcttacaataagagaagaagccaatggaaatgaaagagattggcaaaggggaaggatgatgccatgtagatcctgtttgacatttttatggctgtatttgtaaacttaaacacaccagtgtctgttcttgatgcagttgctatttaggatgagttaagtgcctggggagtccctcaaaaggttaaagggattcccatcattggaatcttatcaccagataggcaagtttatgaccaaacaagagagtactggctttatcctctaacctcatattttctcccacttggcaagtcctttgtggcatttattcatcagtcagggtgtccgattggtcctagaacttccaaaggctgcttgtcatagaagccattgcatctataaagcaacggctcctgttaaatggtatctcctttctgaggctcctactaaaagtcatttgttacctaaacttatgtgcttaacaggcaatgcttctcagaccacaaagcagaaagaagaagaaaagctcctgactaaatcagggctgggcttagacagagttgatctgtagaatatctttaaaggagagatgtcaactttctgcactattcccagcctctgctcctccctgtctaccctctcccctccctctctccctccacttcaccccacaatcttgaaaaacttcctttctcttctgtgaacatcattggccagatccattttcagtggtctggatttctttttattttcttttcaacttgaaagaaactggacattaggccactatgtgttgttactgccactagtgttcaagtgcctcttgttttcccagagatttcctgggtctgccagaggcccagacaggctcactcaagctctttaactgaaaagcaacaagccactccaggacaaggttcaaaatggttacaacagcctctacctgtcgccccagggagaaaggggtagtgatacaagtctcatagccagagatggttttccactccttctagatattcccaaaaagaggctgagacaggaggttattttcaattttattttggaattaaatacttttttccctttattactgttgtagtccctcacttggatatacctctgttttcacgatagaaataagggaggtctagagcttctattccttggccattgtcaacggagagctggccaagtcttcacaaacccttgcaacattgcctgaagtttatggaataagatgtattctcactcccttgatctcaagggcgtaactctggaagcacagcttgactacacgtcatttttaccaatgattttcaggtgacctgggctaagtcatttaaactgggtctttataaaagtaaaaggccaacatttaattattttgcaaagcaacctaagagctaaagatgtaatttttcttgcaattgtaaatcttttgtgtctcctgaagacttcccttaaaattagctctgagtgaaaaatcaaaagagacaaaagacatcttcgaatccatatttcaagcctggtaga

SEQ ID NO: 5382 - DNA, 6000 bp, Homo sapiens; identical to SEQ ID NO: 1657

SEQ ID NO: 5383 - DNA, 6000 bp, Homo sapiens
ggtgggcagagggagggatggcagagcctggcctcctgcacaggactactcagcctctcgctgttgtggctgctctgcctccaaaggcccattcatccaagtcagggcctggcagaggaaacagtcaggccatcagattcctgctctgccatttgacacaagaaggcactgaggccagagacagaaagtgatttgcccaaggtcacacaacagtgacttacagagcagaagcctgggctccagactcctaggccagtgctccttgtgcccaactctctgcttgaacatctgctcctggatcaggtagagcacaggatgtggagttgggtgagtggtgtttttgaagcccagtctgtgcatacaagctgtgtgatactggccaggttacttgacccctctgagcttcagtgtcctcttctgtaaaatgggcatagtacgtcctgctttaggggcttgttgagagattaaaggcagtcagttctgcggagttggcatgtgactggccatgagtcagtgctcaataaatgttctttcctatcctcttttccctttccaaagggcacagggtgactgaagatgcacggagctgaagtcagccaagagctgaaaggagagatgggtcagaatagaaagctccggggtgcaaggcattgtcctgggtttatggtctaacagggaacagcaggcctatgagtaacctatgaaggcagagttaggtgtagacgtgataagagctgtccatcctgctctgtgcaggtacagcggggagccctttacactggatgtttttataggtgaagaaactgaagttccaagaggctaagtcacttgcccaaagacacagaggtagaaaaggtgatgggctgggattcgaacccagttgtgtctgacttcagagcccatgcttaggaccatgctggttggatgcaggttagatgttccttctagaaagtcagggatgatgtgagggatgtagctggcaagctggcctggaaatggtatcctgggggaccgttctgtaggaagagagcctgggcttggtgacgaaggaagagccaaaggccccacagtcagtgatgatggttgagatgcttaacagccagtatgcactggcatgaaccaaccagaagagatgctggccagacagcaggacagccatccctatgggtccccactgaatctcagccctgcccactgccctctgggagggcagggcctggagaaaaggaagggataggttgtcctggtgcctcccatcccaggcaggcaccaaagcaggcagctctaggctttcaggcctcaggaagacctgaggagagaagggtgagcaagcggggcattaggggggcctgtcctgggctgtcctcacccaggagagggtacaacagagagaggaaacggagcacaggagaacacgactgtgggtttgaatccttgttgctccactttctagctgttggaggcgaggaggatacgaatgactggaagcatgccttagcccagcaccaggcttccttcacactgctgaattaacactccctatgtggagggttttactcagtccaaaccaagtgcaaccctactgtgtcccaggagggcacagccacgactctgctcctctgggattcaccaggaacgctggctgatgatgttatggtatatattttggtgggggcagtggtagatgtcagcagaagccgtgggatattatactaggggaaggcactgagcttggcttgatgggggcaggaggggggaatcagggaaggcttcctggcggaggtgatgcctgtgacgagtcttaaaggatgaataggaattaagtgggactggcatagttggaaaggcaatccaaacagaagggatcagcatgagcagaggcaccaagtaagcgtcagggacatacctctgggggactctcctttgatggtggtgataggaaagtcagggcaggaataacaagaggtggcgatggtgagtcttggaggtcctgtggtctgtaggaggcagcttggtctcctgtagaggttgggttccagcaagagagggctgtggtgacatgtgctttctggaaagctccttctggcagcagggaagcactggattgaaggggaggtagggaggccagtcccagcccagaggctgcagccatgtctggatgagagagaaggccaggagcagggctgaggctggagatgtttcagagacccctgtgatagagaggatgatgtcatccgattttacctccaaaggcagatggcatgtcttgaattcaggccatgctcactgaagtaaagacaaatccgccccccaccccatcacacacacaccatcctttgtccttccaagctggattgcctgggttccaatcttggcttcaccactcactagctgtgacctcagacaagtcacctcgcctctgtctgactcagtttccacctctggaaaataaggataataagagtattaatctcatgggttgttatgagttagtaaatgtaaagtatcaggacggagctggcacatagtaaatgctcaataaatagtattatttgtaggggtggagacttgggtggatgatctcaggaaaaccctgatttcccattaccccaacacaatttaagagaaacccttggggcactgttggaaggacaaaggcttggagcctggagtccctgggtcaggttcaccccatgattttttcccttgcattcctcaccaggtaacttggtgcctcagtttccccttcctagtaagagaagaaggaggatgtcccaggtgggctctgagtgtcttcccctcctgactttgatgctgagtggccccgcctgtgcctcccctgctcagcatttttccaagttgcaatagggaccagtagagcagcaaggaggaggtgtccctttagggaggaaagccctccggccccagggccagtgccaaatccaaagccgatgtgcctgtcagaccttcctcttgggctccaggcaccttagccatgtctgcctggccaagctcagctggtggacagacatctggcaccttggcagaaacaacgagaggagggacgcaaggcaccacccctgagaccaggaacctttcctgtgtcgactccccaccagctggctctgtctgtgctcctctctccatggattcaaatgcacttaaaaacaaacaaacaaacaaacaaaaacacctctagctcagaccaaaatgcagcctggagtggtgctgtcatcactgattaggagaggggtggagtggcccagcaggtgagaggcaggcaccgctctgctccatctgttccttatgatacgagggtgctggtctggctgctgaggagagtgttggattgtggttttgggcgagggcgaggaggggacagagttgctgaggcctattatgtgccatgggccttgtcagtgcttcctacaagctgtgtggccttggacaaatcccttaacccttctgagggctgggctgatggaaggatgtgtggtcatcagagtacatacctccttggtggttacaaggattaaacgagataatatgcgcaaaaccctgggcacagtgctggatccccaaacagtggctacgattattactgttttcctgacttcattttaaattgatgaataataattgtatatgtttatggagtccaatgtgatgctttgatacacattttactattattaatattaataataagcctcccagaaaccctttgagtcagacttagcaaccttattttgtggaagaagaagatagagtacagccatgtcctgtgggaggaagcgggagctgcagaaagtaatcagacaccatctcccctacatccatccacaccccaacacatattcccagaaccctttgcactgagtcctgtcatggaggtacaaaccccctgctggaagcacctgcagtgccggcagctcaggactggcttgagttctggcccttccccttactagctgtgggacatcggacatgtcgttttcattctgagtctcggtttccccacctgtctcatggatctctaatccctgccctgagtctctcctcagagccgttatgaagaaaatgtgaaaataacgaatatggaatgtaaacatgtcttgtgcaccttgaggtctgactcatgagagcagatgctgtcagtttcccctgggggatgggggacatttgcatctcagtgcagccccggctgtgcctggcaagcagcggatgctcaatcaatgttggctgaatggaattgtgttcaatgacttgctgccatgggtatacttttaggtgaagacaggaagggctcccagggaggtgggatgctagaggtctcagagtagaggtagccaaggctcagggaggctttggccccagaagcaggttttagatccccaggtaggctgctctccttttccctgcaacaccccatctcgctggcaccaagcaaccgccctggtctgttctgtggctggagggtgtgtgggttggtgggaagtttgtcaggcctggcttctggtccaggctctgggccttggttttctcatctatgaaatggccagctcacacctgcagtagagcaacaacgtgaagcgggactgctgagcacttaccacgtgcccgacgatgtgctaagcatgttactgtgggatttcagttcatcttcacaacactgctaggaggaaggttctgttcctaatctccgctttaaagtcagagagagcaagactcagagaggtagagtaatttgcccaaggtcacatagcgaatgaaagctagagccaaggctgaaacccaggcaggctggctccagcatgctcatctctatcatcggcctccatcttcttccagcctttgcaagggtggggctggctgcggggaacccctggggaggggctggggttcttcctgggtggggtcccccatcgggaagactgaggtggccttgtatttctaggtggagcaccatggaaggcgactgtctgagctgcatgaagtatctgatgtttgtattcaatttcttcatatttgtaagtattcctgggtcttcccaggcctctgctgggtgggcagaactggctgctgctttgaaatagtcacactgggctgagtccctggggcgagcacaggggccggcgctagaggcaggggtacctgccagccaggctttcatggaagggggcccccagcagtgcccaccccactctgaagagcccaccttcttaggagagacattttacacaggccctggggtgggtcagcccctctcaaaaaggtggaggggacctaggtccggccactgtcttgggatctgacccctcgtggagagtgggaaaggaggggatgggggtgatcagagggcagcaagagggagccccacccaaccttatctccctgagcagttgacggacttcagacctggaggggccgagtccatgtagccaccggatataatcagaaacctctctgggaatgcaagacctgcattcaaattccagtgctgcatcttagcagcttgtgatttgagacacatttcacctctctgaacctcagtatcttcatctcttaatgaccttcctcaacaggctttttgaaaattaagcaagattagtttacaaagtaccctggatgtgggcagtcctcaatagcttagctccatttccatctagcctatggattctgtatatgaagggacagccccggacattcaggtggccggcccacctgctggcggcccacccacatgctgagcccacccacctgctggtgacccactgaaggctctgctcagactcatggcccctcccaggagtagagctgtggccctggattcttgggcccccacaggctttcctggtccagcctcaggctttgatcttagtacagccaagacctgggtgaataaacctccactcatgtccttcagggcaggctcttgaaagaggggtcctctttctggccaggactgaccgtctgtctctctcagtgtctatctttccc

SEQ ID NO: 5384 - DNA, 6000 bp, Homo sapiens
tcccagctgtcctgccatccttagttctgccatccttagttttcctcttcgtagcttttgcctcatggccacaagatggctgccgcctttccagacatcagttccacattataggcagaacaaaggaggggaaaaaaaaaaaaaaaaaaaaaaacagcaaataagtctatacctatcgcaaaaagcaaaaactttcccagaaatcctcagcttactactcattggccaaaattatgtcacatggtcacctctagctgcaagtaaccagtttgaggtgaaacatgttgacatgttgacttacaaacaaaatatgggtaatgttagtaagaaagaagaatttatttatttatttatttatttatttatttatttattttgagacagagtctcactctgttgcccaagctggagtacagtggcacaatctcagctcactacaacctctgcctcctaggctcaagcaattctcatatgtcagccccccgagtagctaggactacagacatgcaccaccacgctgagctaatttttgtatttttaatagagactggatttcaccatgttggccaggcaggtctcaaactcctggcctcaagtgatccgcccacctcagcctcccaaagtgctgggattacaggcgtgagccaccatgcccggccaagaagaataatttaatatagagtaaaccagaggtctgcaaactacaaccagtgaaccaaatctggtccactacttgtttaatgtttaaaaaattattgatatatcataattgtattttttgagtacatgtgatattttgatacatgtatataatgtataatgattaaatcagggtaattgggatacccattacctcaaacatttatcttttgtgttaggagcattacagttcttctcttctagctattttgaaatatacaataagttattgttaactataattcttctactgtactatcaaatactagaacttagtccttctatctaaaactgtattttcgtacccattaaccaacttctgtccattcctccatttttataaataaagttttattgaaatgcagctgtatccatttgtttacaatactacaatagcagtgttgagtactttcgacagagactatatggcccacagaatctgaaacacttactctctggccttttacaaaaaaaatttgccaactcctgaaatagatgattggtagcatctgccacaagtactagaaaaggaagacataatttttttctggaaatagcttattattttcaaaagagcattccagtaataatgaggaaaaaaaagatttttgctctgcttacatgtattttgtagtttagtgttaatttttactttgaattatatgtgggatgaatgagaagccttataaacttcagggattagggtcaatacggttcttaaattggccctgatttccaggcattcctacccatggtctgacttccattcattccacaacgaggcactaggcacctactgtggcaggcattgtgctaggtcctggataaggacaggatggacagacggatggatggatggttggatggatgaacagttggatggatggatggatggatggatggatggatggatggatggatgggaaactgtgagagataaagcaaaagagagagagaggaacagagaaattagactaagcaatttcatgccttctcaattttgcctagaaaatatgtgtgtgaggaggaaatgccattccagtaggcatgtgggtaaaggccttgttgctgtagcaaagagacccctttagaactgtgtaggtatgcaggaacataagttgatttcccacagtccacagtggcaggtatctctgctccacagaatcagggacctcggctttttccatcacattcctccacagcctctaagacgttgtccttgtcctcatggtcaagactggcttatagatgcatttggtttccaggttatgggaagaggaagaaaaagcatggaggaacacactcctaaagttttaaagacctagaaagtagcatatctcacgtgttgctatagactggaggtatccctccaaaatttatatactccaatggacccctaagccccaatatgatggtatttggggatgggtctttggaaggtaattaggtcatgagagtggagccctcatggtgggattagtgctcttataagaaaagacatgagatcctccccccactccacccccatctatgtgccaggtgaagacagaaggagaaagcagccttctacaagctggaagcagccccttgccagacaccagatccacctgggccttgatcttggacctcccagcctccagactgtgagaaataaatgcttactgtttaagctgctcaatctatggtatttttgttatagcaggctgaactcaccaagacacttcccttcaccatccactaagtcacatggttcatctacttagaaggaaggctgggaaatgtagtctttggctgggcaaccataagactagctacaatccaattattttggatgaatgggggagtgaattttggtagacaactaggagtgtctatcacatagggtaggctcatgagtccttgttgaactcagagtgagacagtcaacatctgtgtgttcccagaagttctcaagccgcacaggtacagatccactgacccctgaacctgggaagttagttctgttcactgtgactggcagaaataatttcctgctgacattattagtggctcccagccaaggcaagaaaatgagactacacccataaaggaactattacagcccttcagctgccacgttgatgatcttatgctctacctcacaccaaattcacaccctggataatcactgttggcaagacctaaaatttcaccctttgtggatggtttaaacaattaacattccttaaagaaaattcaaaagcaaaccatttatgcaaggtacacaattcccaggggccttagaccccctaagaaacatccccacccctcctttccctcataagggataaaatgattagaatccaggaaacttgctgtactggcctgttaacaaccttaatccaagggagtgacactaatgacagaatttcaggtatgatgtgagagattggagacaggggtatactttggcctccatagagagcccacactgtcccccacacacgcagcactgactgcccctgggcctctctcagcgaagtgcatctggcctatatacaagatatatctcttccctccagttcaaggtggcagcagtcatcagacaagttcctgctaatgtgctaaggagaaggcccttccagatcaccagggcctctcagggacaagtttgccctgtctgtcactaaattgtttgtcatggtgaactctcgggcataagagaggagagactggaacagatacgaattgctcttaatgaaccaaaacccacagcttcaaaggaaaatcccagaggtagactctccaggtggggttgaggagaccagctcagtccctcttgagtctttctttccccaaagggatattttagttccaaaagtgacaaggtaaccagatggtatcctccaggtggagaacagcccacaactaggaagcagagtctcattccttgaggaggaagaggggagtgctagtacccggggctagtggaagagggtagggtgtgggcccggctcgttgtggggcagctgtttacttcactgcagcctgcagccctcccatttccctacagcccacccagggctgcgctcagctccagtgaaggtttgtgcagttaggatctgagagtttaagcgtactatataggttttacctttttattctggaaatttgcaaatgtacacaaaagtaaggaaactcttataatgggtccttgtgtatctacgcctagctacaactatcaatggcttatcttatttaatctatcaaccttttaaaaaaaatctttttgaggtcaggcacggtggctcacgcttgtaatcccagcactttgggaggccgaggccggcggatcacctgaggtcaggagttagagaacagcctggccaacacggcgaaacccggtctctactaaaaatacaaaaaataaccgggcgtggtggtggacgcctgtaattccagctattcgggaggctgaggcaggagaatcgcttgaacccgggagacggaggttgcagtgagctgaaatagcaccactgcactccagcctgggcgacggagcgagactccgtcccaaaaagaataaataaataaaaataaaaaatatttttggtaagtattcttagtattttaaaacaaatcccagccatgacatcatcttacccgttaattaaatggcactaattaaatggtgcttgaaatattacaaacatctatgttcgaccataccacctagagttctgggcaagaaggttgggacccacaggtcaagcctagccccttagttttaccatgaagataactcaggccgtcggagaaagtggcctgcccaacgcaggtgctagagcgcgaaccaagagaagtcgatcctcctggtctccccggctgcctggtgagtggcagaccacaggctagacttcccaggccccggccctggaaggggcggggaaccctccccctcactgccagctggaagaatccgagcggtccccgcacgcacttctggaagtgcaagccggtagcgcggcgggccagggatacagccaagtcccgggacgtgccagctgcggtaactgaagccgggtcccgggcgggcgggggtaccagggacaggagtagccttggaaagaggagagggcctcctcccacgaccgtccggatcaccgcctctccgccggcacccccggggcccatgccgcgaacaggccggcgaggctggcaaggtgcccgggcccggggcggaaagcaggaagtcgatcccgcgggcgcggcccagggtgcggcgctgcagatgcagcacggggtcgcggggcgggcgcccagtgcaccggaggaggtgagcgccaggtcgccttcgcggcccggggacacaggcagggacgcgggagctgatgcggctggaccggccggggaaacagtattttctggaaggggtaagagatgctgtcttgagcctttggaatctcggatccgggccgcccagaggacctcgacaggagcacagggaggacaaactgaagtccgagagaggcggcgtggcctccggcctcggggagcgctgccgggggtctcgggcttgggagagggcctgggggcggtgaaaatggggggaaaggaggggaccacaacattgttatggaagagtgagctcggattggcagagggacgcggggctgcaacgcgagtctccggaggtggaggggtccaggctgatgtagcgccgcccgggtcctgggtcggggttccgggaagtggacctgcgagccaagcctagccaagtcgggggacggaggctccggggcggacggagctgagggtgggcaggcgaggttgatggagcccttccaggaagcagggcgaggctcaagcacccagaaaaacctgtggctgccgaggtcccccgccagcagcgggcagcggagcgcaggggcggggctggggactggcgaactccgcctctctggggctgtcgctttaagggcaaggcggggcgtgcgggccctttaaggccacgtgggggcgtgtcaggaagtgagtccagggcccgcctcccggggagtcggcctcggatgtccggaggctcctgggctgagccggcgacagagcccgggaaggcagcgagacgtgggcgccggcccagccccctcccgcgtccttcagccccaagccccgagcccctctgacccttccgcagccctccctccagccgcgcccggcctccggcagctccctgtacgcctccctccccctgcccgcccctccctcccacagccgcccatgacgccctctcggcacctcttcccactctgccacgcgtccttt

SEQ ID NO: 5385 - DNA, 6000 bp, Homo sapiens
ttcactcttgttgcccaggctggagtgcaatggcacaatctcggctcactgcaacctctgcctcccaggttcaagcaattctcctgcctcagcctctcaagtagctgggactacaggcacctgctaccatgcccagctaatttttgtatttttagtagagatggggtttcaccatgttggccaggctggtctcgaactcctgacctcacgtgatccacctgcctctgcctcccaaagtgctgggattacaagtgtgagccactgcacctggcctcacctctgcttttcaaaacccagtgcattctttcaggactgtgacagcagtcactgggcaaacactcttgaggtagttacaatctgggaatcctggaatctgggagatctagacttgaatcttggttctgggaccatcagtgactgttctctaacctcactgagcttcttccttaaatggacagtgatgacaataagtaccacttaatatgactgtagggaggattaacaagtaaaggtaagaaaggcacttagtccagcgcctggccagtagtgaatactcagataaggtccccagacgtgtctcttgacttagggacatggagggcccaggacaatgaacaacagaccttgtgccgattcagtcatagcacaaggtgtctaacgggcagcccaggtcctcgggctggggtgctcaccctctctggggaactcaccaggggccaggcagccgatcccccatcccccacccccagagcccggctcacccagctctgacagctcgtgcgaatcggcgaatcgacctggggagagggtacagaaggaggtgtgagtgagcatctgcctcacatttcgtcttcgggtcccggaaatcccctccctacgccctttgggaacctggacgggtcttctcaagcacagcgatcactaccctgactccgcagggaagggggccactggggtcataggtcagggcccagaaggaactgatcaaaggtcagggtggcacctgccagcaggtaactgaagccccgcactgctgtctccagctgggccgtggcggccgggtgacgagtcacgtactcctggtagcggaggcccaggagccgcagcttctccatcctgccctcggcaccgacagacccacagaaggaccgtacgacaggctgcggcgccctgcttcctgcgccctccttcctgcttccggtcttaggcccgcctcttggttgcttaacttccgcgggccagaaggctgaggacttgaagaaccggtgaaccacccttcaccccatctcttgaaccgcttcccactcgggtagcccttagcaactgagggcccaaacccggccccctactccctcaagtcattggttagcacgctctccgcccctgacccgcccagcgccgtcagcacccagctcttccgtttaccgggttggctgcccttgcgcctgcgcagttaaagctccggtaaagccgggcggcagtcagagcagttcattctagagaagggagctggagccccgagtctttccaatggaacgccgagagactcgaacggcagggccggattttaaagggctgagagatagcgggtgcttgaaaaaaggagcctcgatcagatttggggaggtgcggggcgtctaaatacagttgcactgtgtctcagcaggcgcgcgttcggccagtatccccatctccgtttcctcaacaaaggtagtgctggggaaactgaggcagtaaggagtccagccctctagtgccgtctcgatcccctagacagcacagttagtgctccggcttcggcctcagctcccgtatggactgtgccccccaaagggctcgcgcctgcattcccacatacgcgaagaaagccctggcccgggcttctctcggctcggtggcccttgggcgggagtatcccttctctgggtctcggatttcccgatctgtaaaatggtttgagggcagacttgatccttgaactcagaatcgatctcagctttctggccctcggacgcacctcgcagtcctcagctgcgcccccaagggaaggggagacccctggggagtatcttcccaaaccaagcagcctccctggaacgggtggcaccgggagatctgcggcgagtggtggagggaacgggcgctctggggaggtagcgctgattggctgcggggaaaggggcgtgacatgggtggagccgtgggccagtggcctgagggagcgggccagcggatttatggtaccctgagaatagtaatacattattttacctaatcctctccaccagatatctccagatgaagaaagcatccttttaagaacgcccagccaaaatttgagtgttggtcttttctgacctcagagactaggcggttttttttaattcattttttttaactttaattttatttttagagaccaggtctaagcatcacacctcaccaggaaaccacaaccttccttccactccctcactccaccctactccacagcttagttttcttctctatcaggtgggggattaaagctgccctcttctcacatcaaagaacgaagacccagggaaaggtgaccaggggcctgaggagaggcaaaggtcttggagaacagaggaggtggtcatgggcatcgtcgacatcatttctggccacgctctgggttccaggcttgcttgccctcctcccagcagccccaagttgctatgaactgttcacagatgggaaattagggcccaataaggaggggaaaggatttgtcccacatggcacagcaaggcactggccaaagaggccacagcgcaggtctccagtggcagtgccctctctcctactgcccacagcccacaaaagctgtgacatgttgaggctccttggtcataaggccagttagcaactgggattaggacctaggctcagggccctcaaggtgaggctccttctcccttcctctgccccaccttgttttttgtttgtttgtttgtttgtttttgagacggagtctcactgtcgcccaggctggagtgcaatggtgcaatctcagctcactgcaaactttgcctcccaggttcaagcaattctcctgcctcagcctcccgattagctgggcctacaggcgcccgccaccacgcctgactaatttttgtatttttagtagagacgaggtttcgccatgttggccaggctggtctcgaacttctgacctcaggtgatccgcttacctcagcctcctaaagtgctgggattataggtgtgagccactgagccctgcagggccctgctgtgcaccaacaccttagtgaacttgttcctcaaacctccagtttggccactcctccagccctccctctgcagctgtggagagggtacagagagagaatttgaggttcttcagcactccttgggctggaggtcctgattctgagagcaaggtgtggaggggagaggggcagactccccaggacagaataggaaggggcttgggctggaaccagtttcttctccctccctgcagaactgggaaggggagcatgggtctagccagcttggcagcagcagggctgcctgaatttcctctctagatcccaggccggattagggcccagagacaaagagttgcggtgtgtgcaggaggcccctcccctgctccctggccccctgcctgggcttggccgtctttgttgggctggaaggacctttgggcagattgagccgtatcctctctccttcagtttgccccaagtcacaggggaagagaggtagaccagtccaacatttacctacgagagtaccagaggcccagagatggagcctcactcgtctaatagggtcacacagcaaagtcctgggcagagctgggtcaaaatgggtcttaggccaagaggaacagcacctgtttatatgcccatacgtgtccctctttctccctccacgcccccagaacaaccccttgggggcctagcaggtatctcagcacttcagtttccctgagtggtgaggttgagccagaagaagggccaacattgtgagtgactacagtgagatctgcagacccagcttcctgcactgactcccccagcccctttattgaagactcatcctgggccagcacccaactatggatcccatatggtgtttgtttgtttttagagacaaggtctcactctgtcacccaggctggagtgcagtggtgtgattacaactcacagcaggcttgacctcctgggttcaggtagtcctcctacctcagcctcccaagtactaggcacatgccaccacgcccagcaatttttgtattttttgcagtcatacagtttggccgcattgagcaggctagtctcaaattcctgggctcaagcaatccacctgccttggccttccaaagtgctgggattacaggcataagccactgttctggcctggtctcacatgtttaacccccacaaaccgtctctgttgagggtcctggagagggaatcacatttccccaccccagctttaggctacagatgaagatcagggaggctggaggctcaagctccagacgcctgagtggccagtgcatggcccttctcaatttctgggtgcacaaggagccaccatcagtctccatagcaaccattatccctgccctccagagacccaaagcctgaccttccccatctcccagagaaagggggtctcaggttgggctgctttccacagcttcttttgagtttgcctcactttttgcagccagaagttgggcaaatgacacagcctgagccccctttccaggtcatgggaggggagattctcattccaatccactttcaacaggtattgagcacttggtatgtgcaggccctggttgggcactggggactggacagacaaggttccagtccggtgagcagcttacattctgggagggagacctgcaataaacaagcaaacaacttcaactttccatgagtgctagccagccctgggaggctccgctgccagaaggaacgtcaagggcaagtcctggggcgggagacccttccggaggaggagcaagaaagctgcttctgcagcgcagagcctggggaacggagtggggccgcttgagacgggaggggccggagggtgttcttgtctaacaggtcacttaaactctccgggggagaattagcccgcatcatgggattaatcgagggtgattaaatccttagcacagggcctggcacgctgtgctggtttagggtccagagcgccccccacccattccctggcctgctatggggtgcgcgggggagagggaggaaagacgagctccaggccggtgcgcccgggcacaatcacgacgatctggacaagagtggggatccccggccctgcccaggcagcctaggccgcccgcgtctggggcccctcgccagctcccgggcgggaggcggccttcacaagggcgctttgtcctggcggcgccggcagggcccggccgggccacctggactgagagtgggggagtgaggcgaaggcttcaggtgctccgcggctctggcgcaggtgtcggccggctccgcccctgtccccagagcaggtgtcccagaccctgcggcctgcattccggccccctcctcctccctcgtgtcgagctcccgcagtgtctttgatcccgggcccggggacactggcccctccccttggggagtgaggggaggagacgcggccccagagcgggggcagggcagggggtcagggcaggtagcggggcccgggccttcgcgggtggctgctcccgctcccccagccctcccctcgtcctggtgggaaactcagcccagaagggggcttcgggggctcctcgcgggctggggaaccgtcggatgccggcccaaggggcggggccaggaccccgggggggtcaccccgccccttcgcgctcagccccgctgaggtgaaacctgagcccaggtcgggggcgggaccggcccgcgcctctcccctggttcccgcaccctggccggcggctgcgag

SEQ ID NO: 5386 - DNA, 6000 bp, Homo sapiens
cacagtgaaggtgacaaagaggtgaagggaagagccagggaggttctgtggactcactcggtgggtatgcccagagggaagggggatcttgggtggcacattgagagtagctgcgctgttagtaagtgagaactcggaagtccagactcatccagtctgtgccaataaacccctccttctacctggtctcctttccaaagccagctgttctccagacaatggggtgggcgggggcgggtgtcctcctccttctcagggaaaatccgacgctgagcccatctccagagatcttggcttcccgtggggctgcagatccacctagagccaccagagggcgggccagcactgcggccaaggcttgaagacccagcacaccaaagcccggccaagcctccagcccagtgtccaagagtccagccagaggccgagtcctcgatctcaaaatgtctaactgcagaagcccaactcatgttcaggcatgatgtgtctgattctactgggacaatcattgccaccaaagaattactgccaaaatagtaacgacattagctacctaccacccctccacacaccaacacacctcattttaccaagcactttctcatgcctggggtgcctggagacttaatgcagcctcgcgatgaccgggtagcctcaccgtacagatgaggaaactgaggcacaaggaaggggagtacattgtctagggtcacctggagaactctgatctccagactcaaatttccaattcgtcccccctccccccaaccctaaccggagctaggtggggtggggacagcaaatgtggatggggggaggtaagaggggtcagagtgctctacagagaagaccaaatgcattgtggcacctactgtaaaatgagaccagccagccacccacccaccagccagccacctaaaagtcttcagtgggcacctgctggaaacacgacaatggatgacacgagttccctgccctcaaaaagctggtagtctagttgggggtggagggggtgagtcagcagataattatgggaaaccgtgacacctgtataaggggcggggatgagcagaggggctgcgactgcctggagccagggattcccggacggggcttccctttcctcgcagctcgtcccaggaggaggagctcccccccagcttcggggttccgcctgccttgggggcccggggtcccctcccacccctccccgaagagcgcgggccccgggaaccgatgacagcacacctgagtcagcccgccgcccacccgcccctcagcgtctgtctccgcatcttgtgatatttcgctccccgggagccagccccactgcgctccggaggcagctcggcaaacaaacccagcgacagattgtgccgcggctcattccggggaaggacgccaaaccccaccctgctacccccaacactccctccccgccgccgcctccaggccctccccccaggcgcaggccctagtcggggtgggtcctggggaaacgcagggtcctgtcctgcctcctggaaatagggggagccctgggtgagggaagacgggagccccagagacttttctttctgtttctacctgatccgaaaacgagaggggcgggaaaggaaatttaggggcacagagaggagctggggggccgagaaggtccgaaaatggaaccagcagggggcacccgagagccgaggtgcccacgggccgggagcctgggaatgaaactggggaagagggggagagaaagggaggcagagacaccgagacacacagagacgagagacagagacgcagggagccccgcggggaggaggagagagacgaagacacagagagacagtgagaaagacagaagaccgggcagggaaacagacgagtagagacagaaaaggtccgagagagagtgagggagggagggaacagagagacagagaccacgaaatatgagtaagagtcgggggagaaaaccagagaaatcgaatgagaacgcgagaagaacgagagaccgtggagggagcagagaatgaatgggaagaataagaccaacatttatcaagagccgactgtatgccaggcactgcattggaccctggcacggataggaaaggaggagccgcggcgcgggcagcggggcgaggggcttctgtgctcgcgggagcggcagcccagggggctcagcagccccggcaccgccgcacctgaggctccagcagccccaaccccgccagcgctgcctggccaccgtacccgaagcggctcccccgagggccccgagcctatcctacgccggggcggctccgcggacgcgccgggccgagtcaagacctgggtcaaccgccctgcagcctttgtagggaagtgcctaggtgatgggtctgctgataccgcctgtgaccaggccatgaagggccagaggggctccagtgagaccataatccgcccctctttaaaagggggtagaggaagttcacgcgaagccaacagtcttctccccagctttgggtcctctcctgcacccccgcgggagataaggtctcccctcccggacacatcatacatacacaaaaaaacgcacacactcgcacgcgcgcccatctcgcacccgcttgtaaatgcactaaggggcatacacacaccgggcacatatttctttccacccatccccaagatcgcaagcgcaaaacctcgcacagcctcacgtttcccaccagctcagacatgcacgctggcggactttcagcggctcacccgtgtgcacactcacgtgcccccccccccgcttccccaagcccgtacaaagggtaacgggcaagcatcctgagtcacacctgcacaagcatccttgcgcgcacgtgcacgctcatatgcactcgatcttgcacgcacaaactcttgcatatactattcttatagtcgcacactgggcttgaggtctgggagtggaaggaaaagtggaatcttggagctgtcccaggggacagaaatgctggaggctgggacactggcgcgagggacgcggctgggggcgggggagggggtgacccagaagctcatcttctcctggaaagttgggaggggggaacaggacaagtccacggcgttcctctaaactaccgcattcccccaagaagggatttctctagaagagtggcgccgcgaggacgatcgaacacagtcctccgggtcgcttaagcgggggggaggggggcggggtggagggggttagaaagccgctcccgcctcctagtggtcgagaaagggttaagtcggcaagccagcaaacgagggaggagccagcgagtgcgggaaggagtgggggtggttgggaagagcttcctcgctgtccccactctccctcggctagcagcctgggcacacggacagacggactgacggactctcgagcggacagcgcagctagcggggcgcgggcgctgggcgtcgacggccagccccagccttccccgccccgtcgcgccccgccccgtcccgtcggggccgatggctcctcccgaggcccgcagcccgggcggcgcagggtagagcgccgcggcccggccacgcagcccggggactcccgggccctcccggagccccgcggggtccccgccgtgcatccggcgggctcagggagcgagtgggagcgccctccccccgctgccccctcccccgagcatcgagacaagatgctgcccgggctcaggcgcctgctgcaaggtaagaacgccagcggcgggagagcggagggcatcctggggagagaagcagggcgtcccctctttcagggattgagggtggggcagttggggaggtggggtaacctggggaaggggaaaagctcagcgctggggccgcgcccccgccgccagggctgttctcagcaggagggcacttggctgggagcccgcgggcgcgtgcgaggagctcgtgaccgaggtgggacgcagggggcaggtggacccggcccggagcggggagggaggctcaggttccgctgtccccgctccacctgctccgggggacgctgaggactcgggccggctggggaagcgccgactcagcaactcctcctgcccggtgcctcagcactttctggccacctgggaagacaggagatgtgggtagggggctgtctggggaggtaggaggcgcagagggaaatccaagtggccctctctggtaggagagatggagggcgctagaaagaggatagttctactgattgagtgacagataagggtgtgggccagagactgggggtggggtggggaggggtcagggggagagggataggaaggagaactcaaagatggagaaagtggtgagggaagctcaaaggaggagggagatggagcgggggagggggagaaggaataaaggttagatgggaaaagcgtggagggaagtgggacccaggtgaagaccaaggaagagggaaggagaggaaagaccagatcaggggagggatgggaagaagactatggacagggacccagaatcctgggatggaggtagcgggaaagagaatcaggactgggaccctggggactggaatggaaaaggagaatggaaagatcagaaaccagagaaggatggggatggtgactagagaaggggtatcaggaaccggcgaagagggttggagacagggaaccatggatgggagaggggctggagaggagggaagaggaggaggaagagaaaggctgagagagagggactggggattgggggtgctgcccagggatgagacaaagaggcttctggtaaccacttccacgtgggaagccctccattcccaaagcgcctgcctgccacatttcttctctcagggagtggctggtgggccagatggggggtgctttgagctcagggccctgggggtggctgtgagggacagagggtgaggactttggaaggggagtgacagcctccgagggtgggcaaacaggctggctcctgtgctgccatttatttatccggcctggacgttggattctgcagccgctgccgccaccacggtggctgcttattttggggtgttacattctggcagagtgagaagctgtttgcagcagctctaaacctccgtcacccgcgtcagtgcctccccaggcccctgcgtcactggcatcaccaccacctccatcccactcctcagctcccacctcctcagcccctgccccctcagcatctgcccgcaggccccagcccttccctgaagcagcccgttgggtgtggagcccttgcttctcgtctgggaccctgtgcccctccttccagagcgagaggcctctgctgcctttccagggagcatcctttcctgggaccactctgcaccagcgactctgccctgtgggtgggtagcctggatcctgccccctactttgggtccagttttcttctcctcaagttccttcttctacaggggcctccggcccaaagagtggcctgtgggctgagaactttgtttctgagccttggtactccaaggtttgatagccagagtcctggacagtggtccctcagtgaacagatacttttggctctggacacttcagccttccgggatcaataccatgttctggcctctcttggctccctcccctggtcagttctggccatatattctggacaggggtcatctcttcttgactcccacatgtaatcactactctagaacaaccgcaactggaagcctaggaggtgaaagttgcagagagagctggagtcccttccttgccttgaccctgaatagccaaacagactcagcattgtggctggcccagccctaggcacctgggtgcaatttctctcctgtctttacctcaagggcagtgtctcacacattcaggcgtggtttctgcggaggatgtggccacctcttaaagaaagatcagagtgtctctctgacatgggcttgatgtccctcttttccaatctgggttccaccttgtactagctgcatgacctgaggccactgtgtcatgtttctgg

SEQ ID NO: 5387 - DNA, 6000 bp, Homo sapiens
acggccgcgcgccggctccgagacgagcgacgcctggcgggagcgcgcggcagcggggcgggcgtggagcgtgcgggggccgcgcgctgcttctctgaggcaggacggcactgccgggaggcggcggtgacaacgacggcggtggtgacgggcaccgggctcgcgggtgagtgcggaggacaccggtccctgcggaaccggaagtgccgtaccagcgaggtgggaggggagggtgacctctagggaagggggaccgaagacggggagggtattaaggccctatttctcctccgggccgggtcttccaaccgcggcgggacccatgggccttggaaacggacgacgagtagaggccggggatccacgaccgccagggctcggaacgggttagagacggccactcagctcgagaccgcggtccccggtgcctggcgcccagccgccgccccttccgcccccggccctgcgccctcgggctctgcggtccccgcagcccgctctctcaacctcggtgggcctggccgccgtggattccttcttttcggtttcagcggtcgtcagccctgccccaacgggtgattctcctttccccagtcccgtggtggggaccgggtgctgtttcccttttaccgctctgcggttcgagtccctcgctccactctgctgatacttattttggctcaagcttcatcctgttacctgttctctctcacccgtccgcttcctcctcctaccgccaccagccgagtgctccatgcgtttagtactttgtactttttaaagtggagcccgaatgcgtttgtcaatattttacctatatttggggcaggcaggtggaaagtgttttacccacttggccaaatgaaacactgaaataagaagtaagaaagttgctaaaagttaggaaggcagttgtaggatcacatatacgttatacgctagactattttttgccttggattcttcacttcctggttaatgccatcttgaccaagttgatctaacatttgcatatcatccttctatctcagtatacctctgtcctggatcaaatatcttcagaatgctcattatcacccattgtataaacttaatgtttacaaaattatattgccatgtattttgctacctcggtatataatgataacacccacattaaacttcttggctctttctcccataccttgacatgtgaattattccatggtacctccattactgtgcatttagatttactctattgtactgttacaccgcttatttcaacaaaaaatagttgtgttgtccttggtactgctggtatccacctatttaaggaaatacctgtattaaaccttattaaagccttcaaaccacatatcctgtattgtttgttttacatatacatatttccatttcatagtttactctgtgcctcaatatggcatacatattactttttttctcatttttgagacggagtctggctctgtcgcccaggctggagtgcagtggctgctatcttggctcactgcaacttccacctcccgggttcaagcgattctcgtgtctcagcctccctagtagctgggatttcaggcatgccccatcacgccctgctcatttgtttgtatttttagtagagacagggttttggtatgttggccaggctggtctcgaactcctgacctcaaatgatccgcccgcctcggcctcccaaagtgctgggattacaggcgtgagcccccgtgcccagctggcatacatattcttgtatacttttttgatactagtatggattcaaactgttgactctgatgaaccatactcacccttgtggtttcatcctagtatctgcagcacattcttttgctaagaattggttcatctttatttatacccaataaattgttaggtttttgatttcccttctactgtgtagcccccaagcatctcagatgctgttctcttttgtgttcccagtattatactcccaaaattgcatggcctttcatgactctgtattactatgtcaatattagtccatgtgacttttttcctgtggaaaatatatgaaacaatatatagtatctaaatgatattctactctagataaaatttaagtagtataattttccatcttttctagtctttgggattttgagggaaaagtttgctttaatagtacatattggctgggcagagtgtctcacacctgtaatcccagcactttgggtgaggaggcagatcacctggaggtcaggagttcgagaccagcctgggcaacatggtgaaaccccatctctactaaaaatacaaaattagctgggtgtggtggtgccctcctgtaatcccagctgctcgggaggctgagacaggagaattgcttgaatccgggactcggaggttgcagtgagctgagatcacaccatgcacttcagcctgggtgacagagggaaactgtgtttcaaaaaaaaaaaaaaagtacatattgtctacaaatcaagagtttgcttttgttaacaaagttactgaggcctacattccaaatgttaggcttccattcctgtaggaaactgagagttaaataatcattaaatcagggactagagaggatttatgttttctaggactataacagtttcttagaatcttttggcgctcactgtattctaatactgctgtttggccctctgaaaccctaattttaaagagagaaatgaatcgtaagggaaggcacctttgccttccatgccataggtgagagaggaagtggtacattatagggcacatttatattttgttatctgaatcttctgatttttttttttttttttttgagacagagtcttgctctgttgcccaggctgtagtgcagtggctcactgcaacctccgcctcctgggttcaagtgattctcctgcctcagcctcctgagtagctgggactacaggcgcccgcccggctaatttttgtatttttagtagagaagggaataaaactactttcttttaaaattctaacttaaaatttttggcttgcagattccaagttatcatctctgggcaggtagtggatgaaaaggtagaaagggtttgtgtcaccagaggggcatgtgacctcttgagttctgaacctgaggtgattcagtggaatgtcctcgggcattctgtagccttcaattttaaagagtgggataagggactgcgtcaccagataatgtgagtaaagtgcttttagatcaccagatgaaaagcattttataaaatcccaaggtgctggtgttagtttgttattgtcatcaacagaaataattgttacttttaatcatattggggcaggtggggctcagttaccttaggccaatataggaataataaactgttgaattgggaaaaaagaaccaaccctatgctatgcttattcagtttctcatagagggcatcatggctttctctgcaagaacatttcttacccagtgttctaatgggtgattccaaaagaccaaaaattcagcttctacctcttcaggattgtaactaaaaagcatagaggagcaaaagaaacacacagagaaagaaaatgagacttgctttcctaattttgaggttaatttttttcttttttcactataacaataaacactcttcttgtccaaagagaaatctttgttctaggactgcccttcactgctgtgcccttgtttgtgattttgatattcttggtatttgttactaccatctatgtcaggtgagatgggccccttacaagagctagtcctttgatgtcctttggccaggtgaagccatgttctgcttccaatctgaacagagcaaaggattctcaagtcagttttcctctgaattcagagtcccttcttacccacatacatgtaagtgaaatggaaaacagtctttctttcagaaagtactttttaacagcagcctgtggaattttagccttggtgtctaagaaataccctgaaagaattctctgataaagatacttgtttttctccaggtgagacacagtaacctggttgaactctgcatctggaaagctgaagactgaagaaagataagagacattgactagtctggaaacagggacatctttggaacttcgttttcatccacagtaaacttttgaagtgtcatcaattggaattgatttcttcatcttattctgcctattgggaagaacatggcttcaaggattttaagtttccctttagttttacatgaactttgtaggaaacagagcccttaaagggcttgggaataacaagaagagattgaagacagagaagcttgccctgttttccttgccccttcaaagaaaaggatttacagctcaaacttagaacagctgttgtccagctttagccatcaagagagaaataaattaaaccaccattgccagactacaagccctggtgaagtcagggtgtgggagtggtggcattgagaagactacctaaaagagacaaagactgcagtaaacaaagctcctctttaaagttggaaggggcctcaggttccttcttggattgaaatagaaatagaaacacagggcacacctcttttaggtgcagctcacattttatggaactgtagtcgtggaggtactatagtatctcagaagaatttttctttgcccaaagtttttttgccataccctgatattctctccttcttttgaagacctgcctccatccatgagctgtatcttgatctgtctgactgtccatgttttccacctgcaaccatttgcatgtgtacagcctactgtttgtctccagtttttaaactgtacaagttgtgtttcttaatcttcccttctgccttgttctggggaggtggttattcatcatttggaatcacctttccccctcccatgtgctttccttcatttgagatcttttgacctttggctttatttgggagggggaagggtgataaagttttctgtttccctggttttcttttgtactcctctctgttgcttccctcctcccattttcttgtctgttctgccgctgtgtgggcctgggctatgcggcagggcagatttcccatcagagctccaacatgcccgcagagtctggaaagagattcaaacccagcaagtatgtcccggtctctgcagccgccatcttcctagtgggagctacgacactcttctttgcctttacgtgagttttctcccagcaggggtgtttgggtgggtggatactccatgggaagtgaggagataacgctttctcttgagttttgcaaagccaagtgactgagagggctcagcgtctggtacaggtaaatccaaatcccagagacatgtaagaaaaatgagaaaaagcctgtcctttcagtcgtgttatcagttttacttcgctgaatcttctacctaccctttcctcctttattttggaatcatagatgtcttcatatttttctacccagctccatcattagatgatcctaagctaggaaggaagtgggaggaaaccaccagagaggcttaaagcagtttaagcagtcaattctatgagaaagagaactagactagactaaaggcttttttttggaggcagcgtctcttgctctgtcactcaggctggagtgcaatgtcgcggtctcggctcactgcaacgtccgcctcccaagttcaagcgattctcctgcctcaggctccttagtagctaggattaaaagtgccaaccaccacacctggctaattttttttattttcagtagagatggggtttcaccatattggccaggctggtctcaaactcctgaactcaagtgatccatccaccttggcctcccaaagtgctgggattacaggtgtgagccaccatgctgggccgactaaagcctttttaaatgctaatggcttttttccaggatgtctgaaacttaggtttgagattgtggaaactgagagtattggaaaatttcagaattgatttataagatacaccaatgagagagttttggcttttagtgctacccagat

SEQ ID NO: 5388 - DNA, 6000 bp, Homo sapiens
gactccatctaaaaaaaaaaaaaaaaaaagggagatatggcagtaaatgtggttattgccatcttcatcatcatgtaaaatctgccctaccttggatttatctccagatgttgttctcaggttctcagcaggcccaaacagtgcacacgtggggctaagccaggaataggattcaaatgaaactgggaccactgagtttgtgcttttttttgaattaataatctttcatcctaatttctattccagggaaaggtgatggagaaaatatcggagtcttggagtttcggtagcttctctattcttgtttttttttttttagataagagtcttgctgtgttgcccagtctggagtgcagtggtgcaatcttggctcactgcagcctccaccccccgagttcaagcattctcccgtctcagcctcccaagtagctgggactacaggtgccacaccaccagacctggctaatttttgtatttttagtaaagacggggtttcaccatgttggccaggctggtctcgaactcctgacctcagttgatctgcccaccttgacctcccaaagtgctgggattacaggtgtgagccaccacacccgatctcttttcttacctttataccagagcttattggtctccatatgaatcactggctctgtatcagtctgcctccaaactgttctccccacgactattcattcccctcccctttctcccgcaaatgtgtggtcatgattccctaagctgagggatttattttgcgatgttttccaaactcttttttctttggaggacgtcttgaagtgggttgtgttgttgaacttatgttgataaatgcagcattatgttggagaatgctgaacttatgttggaaaatgctgactctgaataccaagatggttattattttatctgtgaatgaaatattccaggcatttctcagtttcccgtgctctctgaaaaagcagtgcagttataaagggttagcagactttttttcaagttattgaattacggaattaacaattctcgtatatattaactcacttatcttcacaaaaacccatgaaatgggtactattattattatttatcattattagttttttgaaacagagtattgctctgtcactgaggctatagtgcagtggtgcaatcttggctcactgcaacctcctccttccagattcaagcaattctcatgcctcagccgcctgagttgctgggattacaggcatgagccaccacccttggctaatttttgtatttttcttagagacagggtttcaccatgttggccaggctggtcttgagctcctggcctcaagtgatccacctgcctcagcctcccaaagtgctgggattacaggtgtgagccaccacgcccggctgagatgggtattattattatctttgcttacggataaggacattgaggcacaggggcattaaatcaattgccaaaggtcacacaaccattagtggtagaactgagatttgacctgggtagtttggctccacagcctgggcaggcaaccactgccttttgcagcatgtctatcagcatgctatgtgagcttgggaaaatcatcttatttctctgtacttaatttaatttataataaaatggggataataatatgtaccctaactccctccctgagtgattgtgagatatcaggacaaaacaaagttataaaagtgcagtaaaattcagtatggctattcaaacattcaaacgaggaaatacattagatggcttatttctttaattacaaggagtttaaagccacaattatccaattgccctttatctgtgcttcattataaatatcctgttcctctttttaaaggaatagatatacttttaattttttttttttttgagacatgtctctctctgtcacccagcctggagtgcagtgccgtgatcatagttcactgcagcctcaaaattctgggctcaagcaatcctgcaccgcagcctactgagtagctggggactgcatgtgagcaccactatacctggctaattttttttttttttttgagacggagtctcgctctgtcaccaggctggagtgcagtggcgcaatctcgcctcattgcaacctctgcctcccgggttcaagcaattctcactgcagcctccaccccctgggttcaagcaattctcctgcctcagcctcccaagtagctgggattacaagcacacaccaccacgcccagctaatttttgtatttttagtagagacgggatttcaccatgttggccaggatggtctcgatctcctgacctcatgatccacctgcctcagcctcccaaagtgctaggactacaggcgtgagtcactgcacctggctcgatttatgtatgttttgtagaaatggggtgtcactctgttgcccaagctgacaaagaattcttattattattatactttaagttttagcgtacatgtacataacgtgcaggtttgttacatatgtatacatgtgccatgttggtgtgctgcacccattaactcgtcacttagcattaggtatatctcctaatgctatccctccccgttcccccaccccacaacagtccccgacaaagaaattttaacacagttgaaactgtacaactatggaaggtgccaccttgggaatgtctggaaaaactaaaaaagttaaaatggcaaaaactccaaaaattattgggtgtcctgtggcatgctaggccttatctaaagcacctttctggattacctgattttttagtgatttttgccttataaaatcttgcagctattttccaacttggtaagttgtagaaaattcataggaatgccaatgattcttgtccatagagatgcctggtagaagtgcaattgctctcccagcaccccgaggccagttctgcatttattatttatttttattaaaaatataatttttaagacagagttttgctctgtggtccaggctggagtgcagtggtgtgatctcagttcactgcaacctctgcttcccaggttccagagattcttctgccgcagcctcccgagtagctgggatttgtaggcgtgcactatcacgcccggctaattttttgtatttttagtagagatgaggtttcaagatgttggccaggctggtcttgaactcctaacttcaagtgatctgcccgcctcagcctcccacagtgctgggattacaggcatgagccactgcacccggccagttgtgcatttattaacatgttcgtttcagcattcctgattgcctatatatgtgtgtacactttgtgttttcctctggacagggctagctttactggtctcctcattcattaatgaattaaagtctttgatgtgtgtgcattttatatttgtagaggagtcatgattttactcttttcaaaacaattatcctgtaacaggaaccctctgagcagaggcagacaggccacccttgattcctgctgtggaaagagaattttttactccagaccccaatggtccttttcagattcctaacgtgaagggttgttcatatctcggcctctcgcggaagactctattttcttgaagcgcggggaactacgtattcccactaacaaaaatctgttaaggggcagggcgcagtggcgcacgcctgtaatcccagcccttcgagaggccgaggcgggcggatggcttgaatacaggagttccagaccagcctgggcaacatggcgaaaccctatctctacgaaaaaaacacaaaaattagccgggcgtagtggcgcacgcctgtaatcccagctacttgggaggctgagatgggaggatgggttgggcccaggggatcgaggctgcagagagcggtgatcgcgccactgcactcaacttgcgcaacagaatgagactctgtctaaaaaacaaacaaacaaacaaacaaacaaacaaacaacccccaaactccccaaaaatgtgttaggggaaggaggtgggacagtgtgtatttctgatctactcgcctttcctagtatgaccaccagggggcgcggaagccctcctggtactaaggcggggacaacctgcccagcgagcacagcgggcagaaggaagtgtgccggacgcgagagagaactacggccgagacccgcggggccggctcaaagcccgacctctgccatacgcaccgtatctttatgggagccgatgaggtcagcagggagcacgcgttcagatggcagaagagggcaaagtactgctagaattacaaagatatttacagctttttaacctgaaagcacagagcagatcctattcttcagaattaaatcttcggctcgccagtcccgtttatggatctccactctgatgaatgtgccatttgttcccaagaagacaaatagggtagggagaagagggagaggcggggagaagactcgagataaagggacgatctgcttttcggaagcagaagccgcctgggaaccacctgcacaccaagcaggctgcgaggacggggagcgctccagtgcaaagttctgtattttaaagcccctcctcgctcacaggcttcacagcgaactacgaagtgggtaccatctctgatttacagacacgggaacggggtcctcttgagaaacgatgctttcccaaacgtctgcaaattgtgagtgccaagtgtctccactggcactaacaacatcgagctgcttacgtttctcggagcggtcccgatttccaacaagcaaaagatccaaattctctgaccaccctgaccgtcctgtatctccagatctccaggtctttcctctggacacctcctccatccccccactttcactgccagcagccctgaggctgcgcgggatcccgctactcggaatgccttcctcctggcgggatatttttagaacactcgactgccacccaatgtagcccacatcacattgtcttatttgttttcgggagcttgtccccgcctagcaaggagtcggctaagaactggatcctagcgaggagcccggcacagacagcgaatgaccgcagccagacagtcgctcttgctcttcctcggccctgcggcaggatccgccggtgcaggggcctctccccggactccacgcgtgtctggagggctctcgggttagggaagggggctttggagacgccccgggcggccgggcggtggcgggacgcgggccctttaagaaggagcgaggggcgcggccaggtaggggcgggtccagggcggatcagcgctgcgccggcgccggcccgggagccggatttggagcgcgaggcgccggtgggggcggagggggctgcgcggcggaggctcccgtggcctcggacgctcctcctagctagcggccgccgcccgccgccgcctgcgcctccagctccttcgccccggcgggcccggccgccgcttccggcagctcacctgggaagcgctcacctgggacgcgctcacctgggacgcgctacctgcctccgggcgcctgggcttcaggatgaaggaccgtctggagcagctgaaggccgtgagtttcgccgcaggcggggtgctgccaggaggggtgctgcatgggagaggggcttccctttgctccccaagtcgaggctggaggggggcccgagccggaggcttgccctccccaagcccccaccgcttcccgcgccggttccgcaccctcccctcccctcccctgcggggtcatgtgcccggtgattcatcgctaggcaatgattttcctgaacgcctctaactctcccaccccgcaagctggacagtgtctgtccagagctggttcccgaagcgggtgcttgggcccgggaggtcaggggtcccttcaccacctgcccactgctgcctggcactatgcccaggaccagcctccttctccctttcctgtttctctcctgaggtgctacaggcctggctgccccttcccccagggagcagctcagagctctctggtgacctctggagctgtgagccggtcacatgctgggatgg

SEQ ID NO: 5389 - DNA, 6000 bp, Homo sapiens
cataatgaattagccattaatgatttaaatactataaattgagttaactaaaaaatcgtgataaaactatatgggagaatgagggaaaaggaagtgttatggtgggaaggtgtgtccagggtaaaaatgaaggatataggggttagtctattgtcttcagtagtaggaggttagtgcataatatataaaaccaaaaattagaacagtatttaaaatcattcacttagaaatatggagtcaacacaaaaagaaacaattaaaatttaaatacttgcttctggagaaagaaaattgattgggaactggggaagggggcactaatgatttctttcaggctaaatccagtgaacattttactgttgttagcttgtctctctgaagtatttaataataattgaatgatttcttcctactgaaatatttctgtgctcaaaaaatgataagtaatttatttatattacctaatataaccctttcaacaacgctatgacatattactatctatattttacagatgagtaaactgaggtgcagaaagcctaagcaacttgctccagctcacatagggcataggattcaaaatccagctcaaggccgggtgcagtggctcacgcctgtaatcccagcactttgggaggctgaggagggtatattacttgagatctggagttcgagaacagcctggccaaaatggtgaaacccagtctctgttaatatataatataacatattatatagagatacattctattatatatataatatattctattataatataatatatattctattatataatatatattatatattatatctattatatataatatatctgtatatgatatataattatatataatatatagatattctattatatataataggatatatattctatatatatagaatatatatatttctctgtcaaatttcatgttattgttctcttgaaattgttatctgctaataataacctgatactgtctcatttcataccatatggagtgggaggagagactgatgcctgtccttagtccagaatttcaacctctcttaggaagtcatgaaactctgtacccttgtcttctgcaatgccacattttccgagtttgcctgctatcttccttaccctctttttcataatcctctgggaaatcttatttctgattatactgtctctatcctctagaaaaagggtttgacgttttctgcctccacccacaagcctgggtgacctcatccctctgggcgaagagctgttgggtttacctctatagccatgttctcattccctagctcctgccagttatccacttcttgtcaactttatttgaaggtccctacacaactctgatcaaatacgttcaaaattttactatttgttcctgcagttctgtcctggtccatgtctattgccttactgaatggctctatcactcattcagtttcctaacccagaatctgagtgtcatcctttcctgttttttctcctgatttacacatccattataccaacaagtactgtcatttcttgttcctaagcatctttcaaatccattcattctctccaacttcactagcatcacaggtagttcagtaaccatcatcccttccctagagaactgcctctaccttgagcctaattctctgattttattattatttattcctgttgtctgaaaccaggacaatatttctgaaatataatctattttaattttgagaatcgtaatttcagattatagaccacatagtttttggaattaagtaaaactggatttcaatctcatctataccagctatacgaatatctctgagtttcagtttcttcttctgaaaaatagaaataataatattaccttccttcattccctttccatttgtgtgtcttttgctcattcatcaggtctccaattagatgtccccttatctaggaagtctcctctgcctacccaatgttgggttcattgatcctcctatgagctctcttaggatatcctactttaccttgcagatcactgattacaatgggttgtaatgatgtatttactcatctgtattgccactttaccttgcagataactgatagtaatggattgtagtgatttatttactggtctgtttttccaagtagtctataaactctttgagtgaaaattattttttaccattttttcagaagcacacggcacactgcttggcttatagtagtttttctaaagaaaatgctgaatgaatgaaaactgcacaccactttgctttcctcctccatgtaaagtaggcattattttattttacaaatgaatcttaggttcaggagattaacagggccatgcaagaaatgtttgccattggtttgatcttagtcaaagaccagctcgttctatgataccagctgcttccttcacttagaaaggtgttgttttattgccatacaaccaacttgttgccattttatggccactcctgatgaatctctaaaggtggaatttcatgtaaataaaacatttaagttgtgtatattaaggttggtgcaaaagttaattgtgattttggccataaaataatggcaaaaactgcaattacttttgcaccaacctaataaaatagtaatagtagtgctccaggaagacaagagtactgtggaaatgtgtgaccctgtgaaagggggtatttacaaaataccatttacttgtttatataacgacttttgaagagagtctggcatacagtaaatcctctaccactgatatccacagtaattagcagtattattttcataggaaagactgtatcaggcagcccctgctttttcagcaaatttcaaaatagacatccacacccatattgggaacacaaaatcagttaatgcttccgatataaaagaggaactagctgtgcgtctcagaaattctcagcacagcctttaaggttccaaacatctgctagaagaggaatgcagatttaaactgagtgaggtgtggagtgggggaagttgattgggtctagaccaaagaactttgaggaacttgcccagagccctgcatgcatcagacctacagcagacattgcaggcctgaagaaaggtaggtccagggacttgccttcctaggctttcgggctgatggcttgtttcacttcctgggttaagaatttctgggaggggaatgagaagaataatgaggccacttcccatgacccaagctggtattcagggttggggtgggttgagtgcacctttaaatgtgcattcggtggggggatgaggaacagtttttgctacagtcgataggagttagaaaagcctcctaaaggctgacattggaggctggataaggttgtttagttacttttgtcccctgagtcttcaggatatcaaaacactgaaagcaacattttaaacctttgactagttacctcatctactgttaatgcccttcttctgtggtctttattctctgtgtctgactggttatttttataactcaggatttaagaacagatgtatcacatgcagaatttggtgtacatggagtagggcacaggcagggtccccagccttgtacatttagatgggctgtggcctgacctagttctccagtggtctttggcactattcatggggcacccaggcagtaaactgaggctgctcatgataaaatctgctaatgaaaaacaccttgtagacttttagcattcttaggataagaaagaagcttgtaagtggtcgtggccattgtaatctttccccagatgaagtaaaagaagccaataaaagggaaataatgtacccagaatcacacaagttaacaaaagggctgggagaaaaacaaaaacaaaaacaaaaacagaattcttggttcctagcccgggcctttcccccttttcccttcccatgccaccacttctgcatccccatcatccttctaaaaccatccagattcaggcctcattttgggtttctagtctatttgacaactttgccaagaaaaacggatggctgtttgtaccactctcctcatgctctctccttgcaattgtgacccatgaggaggatggtgacataaaaatgaggaaataagagactggtggtgctgctgatccacaaggtgactggggccaatagaagagggaagggtggtctgggtttccccacctctttatcaggggtgtgggggaaagacattgtatttcttaagagcctgatgcatataggtgatgtggcaaaaccaaggtttaaattcttctccaacctggaagaaatgtccctcatatgcatccaatattctcagcagttaaaaaaaaaattgaatatagagaagtcaagccctggatggtaaacacgtttttgttcttggggacttcatgtgccgtagataattaacacaaggatttctgtggtggaaaaagaggaggcagttatatgaatttatggccagagtttcttagaatgacaaagcaccagccttgaatgaccagaacctgacctatgttaccaaagaattatgggaaagcataggagtcagttacaagctttattttgatataattgctctgccctcgaggaagcttacagtcttaccagagaggcactaaacacagagagagaaccaccagtgcgtttgataagacagacccaacatgtcctaaattctcagtctgaaggtgtgcctgagagattgaggcagaggttcttttacattaaagaagaataaagtacacatttagatggactaagaagaatcatctttagtcactttccaaataactttgacttttgcaatgtagaaggaacataacacatttcttaaacccttatttaccgtcataggctgactaatccacatgtgggcaatggtggggaagtgggggaatagtgtctgagagaagatagagactataaaatgctgttcatgtgtgagaagattagatgatgtggtgggtttgtttttgttcttacaaggtggtcacaagaggggtggaacattcctgcaaatggtttcaatatatgcagatgtctcaatataggaatgaaattacgtctttggaacaacttaaataagtcaaatatacttggagctttaaaaattaaaaggagagagattcgaggtaagactacaatagatttgtgctgaagtagccgagcttttgttatcaacattaaaaattttaactttatgctaagggtggtgaaatataaaagaaggcttttaaaggggatggtgactcaattgtttttgtatttgatcattctggctacaacatcagtggtggattgaatatccaaagccacaaatggacacagggaacattcagaggctataatgaatacttctgataaaaatagaataatggcttgccttgagaagatgggagaaatacacagagttgaaaaatggttgtgtaggattagaatgagattgattgagcatagagggtaggcaatggaaggaaccaatgacaaactatcagatatttttgagacagggtctcactgtgttgcccaggctggagtaccctgatgccattgtggcttactgcagcctgggcctcagcctcctgagtagctgggattacaggcgcccaccaccacacccagctaatttttgcattttgtgtagagatggggtttcaccatgttccccagtctgatctcaaactcctgggctccagcggtcctcccaccttggcctcctatactgctgggattacaggattgagtcaaaatgcccagctttaaacttccagatttttaacatggatagtgtagttaattgctggaccttccaccaagaaaggacacttgtaatttcatagccctcttagggttcctgttccctttagctcttgccactcttgattagcaactacttacagggctctgaaataatctccacataggaagatttgcgccaccttacttttttgaaagggaaattttgaggaagactggatgtcttctatttaggtcttctaaggtttgaaataaaa

SEQ ID NO: 5390 - DNA, 6000 bp, Homo sapiens
tgtgtgtgtgtgtgtgtgttcctgtgcacacctgtgttggggtggaggatggtttggtcctcatcctccacctccagccaatggacttgcctccccggggctctctgggtggcatttctgctccttctacatcccctccttgccaagtcagcccatagatcactgagtcctgatacttcctggacagaagtccattcccccactttcctgtgagctgctggagggcagaaggaaagagctggagagagctgataccacctcaagcaggggtcagggtcggggcagcagggggagggtgatcttggcccagctgggtagcgggaatgccagcacacagccctgtgttcataaccggccagacactgggcctagggctttatagccattatttcccaaccctttaatcctcttggtagccaaatgggagaggtcttattataacccttacatcaagaaaggagctgaggctccgaggctgaagtcacagctagagattgctggccagaactgacaaccaaggctctgaattccagatccattcttggtctacccaccagctgcgtgtagcttggctggcatcagagcagactcccaggactcaactcccagctgtgcctcttgctagctgtgccctgttgggcaactcggaacctctctgagcctcagacacctcaattataaaatgggggtgataagcatatagtactttctcctagcattgctgtgaggctccagtgaattaatttttgtaaagcacttagaacagagcctcaaagacagtaagaactgtccgaaagtctgctgttgctatgagtatttagttcaggcattgagcccctttgcagtcctgggatacccacaggactcccttgctctgcctcctagctctctgtcatcttctctcagacacccagaagcagtgaacaggggtttggggagagggcacagaggccttagccatagatgacagcacagagaggaaatgaaatgtacaactgcacaggctgccgggcaagctcctgccaggccccgcaggcaacctgcacacgctttctcttcctgaggttggagtggggatccacgccatcctggaagggcaaagagtgaagcacaaagagagatccagggaccacaccccggcccttggtccatcagcccctccctcggccacggccctctgtacccacattcacgggtctccccatggccgcaacacccagcctcactctcacatctgcttcctgctgccagatccagctcccatcctggcccaaacttccccatttgcagacagagaggggagaggagaaaatgaagacggggagaggagaaaatgaagacagggagagggttctctcccaggggaagcagactctgcccccagcaaagaggtctggatgatctcatctccctccccgttgctgtcactactagtcatctagccctgtggtctgctcactccaggaaccctcctcactgacccctgtatccattcttgtgcttcacattcttttaagcagaggggaggctgagggagggggagggcaagaagtcacccctgagtggggctgcagaggtgggagaccctgaatcccagaccccactcccgtcctcatggaggggatgtctggtgggaaggaggggggactcaggcacagctcttctgatggtctgttcactgccagaggtggctcagagtcactgtctctgggaagtcagcgttggtcttccctcacagagaatgaagtgccttttgtagggcctcatgcccccagtgtcgctgttcaaacctccatcacagcgggtgcctcatcatactggactgggttacttattgatctctccgctagacaaagcccctcaaggcctgtgatactgttgtcttatgtgtagccccagggtctagggccaggcacacagcgggtactcaatagttgtctattgaacaaagactacatactgaagagctagcagacagatagatctctgcagcctggtggccagagttctatttcaggcagtaattcatttaatcaattgctcatgcattcaatatgcatttattgagcgcctaatatacaccacacacttaaaagcaatgagaaaattggaaaaaggaagcaaggaggaagataacataaaaagggaagcaggtcagctttacagagaatggaaaggcaagaagaagggtgagtgcccattcctctttcttcctgaattggaattcttgtttccagaatcttctgtgacagtgaaaatagagaacaaggaatctcgggagctaatgctcctcatcccctccatcgttctgggaattctcctccttggctccctcatcttcatagccttcatcctcttgagaattaaaggaaaatatggtaagtgcaaggttctgggagccatggccatcccagggggatgtgagccttggcagaaccccagcagcagtggcgtggtccagcaatgaccacccggccctggccctggggagatccccaaggtggaaaggattttcccagcatgcccagcagtcatggacgcaccagcggggagaaccagactgtgcatgtgtgtgtgtgcctgtgtttgtgtgtgtgtttgtgcgcgcgcacatgtgcctgcaagtgttgggggaatgaggagggtggtgtgtcgatgagaacagaacggaaccaggtagactgggagagggcaaaaaaatgacttgtagaatttctgcctcccctccctcagccctccccgtaatggtgaaccaccagcacctacccaccaccatcccggcagggagcaatagctatcaaccggtccccatcaccatccccaaagaaggtaggatgtcccccatcctgggtgtgggagggctggggaggacaagaagggtgagctttctggaaggtcagcaccacttaggtccaagacgtacacacagctggagatgagatctgggccagcccactcccggccctgggaccttgagcaggctcaagtcgtccctggacattgaagggcagatgaccttccagttcagtcatgctaggactctatagagttttgagttctggacaaatacaggcaaagcacgttttagatcttggttctcagaggaaagctctgttctgctttgctctgctagttggctagtaggcttgtgatatcatcatccctatcaatgtcctgcccaattggccttgcgaagccccatcaagattctcctagaatgtggttttatttcatagttcatattttctaaacaaaaaaacaaattggggctgggtacagtggctcacgcctgtaatcccagcactttgggaacctgaggtgggcagatcacttgaggtcaggagttggagaccagcctggccaacatggtgaaaccctgtctctacaaaaaatgcaaaaattagacaggtgtggtggcgtgcacctgtaatcccagctacttgggaagctgaggcaggagaatcgcttgaacctgggaggcggaggttgcagtgagccgagatcacgccactgcactccagcctgggcgacagagcaagactctgtctcaaaaaaaaaaaaaaagaaaaggttcagtcattcatcctttatgatatatggatttatacctcttgcagaggaatttgagcttaatcaccttgcattatgaatgtattcaatcacctttatcggaaagagttcaatgacataaaaaccaatacaaaactcagccaaatattataaatatcctttgcacagagagtccatatatatgaaaagagaatgtgaatacagcatctagcataaggcttagcataaggcagctgctcactgaatagcacagtctagaggtttagagccagactgccggctctgggccaggtaagaacctgtctgtgcctcagttccctccaaggcaaaatggggataataatgtacccacttcacagagttatcatgagggttaaatgaggtaatacttgtaagtgttagaatagtgcctcacatatagtaagtgctgtgttaagcgtttgctaaataaatgtttagttctccatattggaaatgaacgaaggcagcctagaaacttcagactgggtggcttgtacaagatgggctacccaggttgggcacactggtggatgcctgtagtccccgcattttgggaggccgagggggatggatcgcttgagcccaggagtttgagaacagcctgggcaacatggtgaaaacctgtctctacaaaaaattcaaaaattagctgggcgtgatggtgcatgcctgtggtcccagctactcgggaggctgaggtgggaggatcgcctgagcccaggaggtcaatgctgcagtgagctgtgatggcaccactgtactccagcctggacaacagagtgagaccctgtcccagaaaagaaagaaaaaaaaagggggctacttggtgctcccctgctactctgcctctcacctctgccgttcatactctaccatccctccctacacctttccgcccaccactttgccatgccctcgactctgttctctccccagttttcatgctgcccatccaggtccaggccccgccccctgaggactcagactctggctcggactcagactatgagcactatgacttcagcgcccagcctcctgtggccctgaccaccttctacagtgagtgcctggccgggctcccgagggcccacctacctgaatctgggagggggccccgaggggaccgtcaggtcagtagtcccacctagtaacccctgcatgatgcagacagaatccccctggttacccactggattgactgtaaatggtcctacactgacgtttgcaccgtgctttgtgaccctggggtcatctcgatgtctcaggacatctccactctgacctctgtctctcccatgtttgtctctggccacgtaaggtcttaagaccaggcctttgacattcacctgaagatggctctctgtgtgagagcgggggagtgcggatgagagacacagttggcaggggttctcgcatgccatatccctccgtgtcccatcctgccctgtctgaccccatcagccccactcacttcctcacctccacgctcttgccagcttgtgcctcatagccagctcttttcattgccttctggggataggaagaggaaagataacgctgaaggcagttccctggcaatgctgggaggttggaatagaccagagcgtcccacaccttattgtggaatcacttgggagcttgtcaaaaattcctgagcccctccccacacctaatgttatcagtcaggatgagaatttggctgtgtgtgacagaaagctccaaatgacagtgtcttgagaggttggcaggggcccaggccccttctttcttgctgctgtgcagtccctaagatgttgccttcatctacatggtccagaatggctcacctccatgtccacattccaggcaagggcaagggaacgatgggatgctggagatggccacagattcccgctcacaacccagcacccagaacgaaaacccactagctgcaagagaggcagggaaacgaaggctctgtcctgggcagctgtgtccagataaaagccagaatggatattggggaacagacagccgtccctgccccgcctgctaacccagggcttctgggggtgggacacggatgattccacttcttctggcctgtggaccagtgtttgggcgccacagggatgaagtgtctgtcgaacctgagattccgagcccaggcatataagatgcaagactgagagtccacagtgctataacattgaaattaaaagtcagtggtacccggttcaaaagagctgactccaagatcccagacactcatatcctcaagactctataaatctctgattctgaaacgtgaaggtgccacagagcctgtgatgcagtgattccagaccatctgggtttcactctaggaaggcttcttgaaggagcaaacatctgtccttctcctgcccagagctgccaggtcacaaggac

SEQ ID NO: 5391 - DNA, 6000 bp, Homo sapiens
ggcaggcggatcatgaggtcagatcgagaccatcctgttaacacggtgaaaccccatctgtactaaaaatacaaaaaagtagccgggtgtggtggcatgcggctgtagttccagctactcaggaggctgaggcagggagaatggcttgaacccaggtggtgaagttacagtgagccaagataatgccactgcattccagcctgggtgacaagaacgagattccacctcagaaaaaaaaaaaaggcacaggtttgggaggcaggcagatcacttgaggtcaggactaagcctggtcaacatagtgaaacctctactaaaatcccaataactaggcttgcttcgtgacaggtatctgcaatcccagctactcggggctgaggcaggacaatcactcaatccaggtggaggctgcagggaggcgagatggcactactgcactccagcttgactccattgtcccttgcttcccccaggaaaaaacagatttgggctgggtgtggtgtctgtagtcccagccccagctgctggttaaagtcaagtaggtttgcttaagcccaaaagcttgaagctgcagtgaggttgtgatcatgtcactgtactctaagactaggcaagagaaaaaaaaaaaagatggatgttctactcaggttactcatttaacacactgcctatcaggcaaactgtcagatgtcccttcaagttccaggtacttcagggagcatgagaggaaagccagtttcccatggaaatttacacactgatgctaagagacacatacacacaaaaaaagtaaacaggactatgtaatcaatcattttattattttcatcaacaaccaacacagcaacacaaattgacagccagtcctcaagggaaccttttttgaagtgaagagcaaggccctgaatgagctacctacatggaacatagtatttgcaatatgcaaatggagacctaaaggctcatgacgggaacagaaggtggctgtatacagaggaacagacacgaagtggagttatgggaagttcaatcaacaattggcaacaagctaggtcagtagtttacgaaagtggtcatctatacagtgcctgagtttgggttctgggcctggatcatgtaagaaaggcagcaaagtctgggtgccatgaatcacacctgcaatcccagcactttggaaatctgtggtgagaggatctcttaaagctatggccttgaaaccagcctgggtaacaaaaccaagcccttgtatctaaaaaacaaaagggcaggtagattccagataaataatgttgcaggaagggggtgataaaatacagaaatgtgatacacagcaaaccctcaactgctgtttcattggctcccagtgtcttaatctgtgtctgctaacactttaaggtacatctgaaataccccccaaacccagaaagcttttcaacagctaggttgtccaagaacttggaaaattcaccttctgatgtcctccaagacagattcctgcagaggtaaaaaaaaaagttcttattggattggaaaatacaaatgaacacaatatttaacactatgtaacctaggagcaaaaggttgctattataaaatcagttaaatatttaaacagatacctaccattttttatacaccttatttgctcagacctggaaaaaataaaaccaatgttttcaacaagtgatgattactccctttctctgtatagaaatctttatcatccctcagacagttccttctggaacaaatcttcctcttctcccccagccagtcccagtgggttcacctttacaggctctgggactaggacagagagtaagacatgtgaaagtttcttcattgggaatttttagcatagtccaccttacatttaggtttactcacctgtaacttcagcctggagtgaacacagacacctagttttcctgcaaaatcaagaaagaaaaatgtagtcttgagagactttcattctatgtcacattttacaatctctcaattgtatctattgcttggcagaaagaagtttcagggcacattttataggaaacactacttagcccaagaacttcctattggctgtaaagcctcctcaaataacttgcaatttttagaacatgtcactggaaggcaggctcacagctcagaaaatacctttcagtcacacattgatcagactggggcggtattcaactcatcactggtgagcagcaattcatcactggtggttcaggagatcaaagactttgggttaagccagttatgtctgtgtacattcacccagaccacagtgctatcacacacaaaaatcacagaaaattttatatagcagccattgatggtaactattgcaaagccatttacctcaaactcctcttgggctttagagagaaggtgctggccctgaaaggaggaagaccaagtcagtagtgcttctcatatcccgcattatgttgttcccacccatcattctcagaaaatcagatttcagagtctcaacagcaagtcatcagccgaacgagattccatgtaagtcatcacaaacacaggcctaaaaaggcactttttcctaccctatatactgagtgcattgaataccgtgaaattactcacctttgagccaagcaggttattggttagtagtacctagagaaaaacaaagctgtgggtgaaagattcctcagacatggttaccccccactccctgcgttctccagtttctcaggtgttcatgtattttcactgtcggtcatagtgagctagtttgattcatcatagaaactgcctacttggtggcataagctgtaaggaacaaaaaatatcaactaacctctcagctctgaaggcttttcaatggtatatagcaacaagctgctcctgaatcaaaaaatcattcaattagctaattatcccaaacagccaaaactattttagttacggttgctaatggacaaactaagaaaaggtaaccaaatgtctcagacaattccttatggaataagctctcatgccctcttcatgttaaccctggtgagttcacaattactggttcccaggctaaaacaggggtaaggcaggatgtttcctcctcattggagcagaatcctggaaagctacaactgacaagcattcgtctgaccctgggcagatcagtgggcatctatctgagaaaaaaggggcatatatcagtgggcatctatctagaaacatcactacagagaacaagaggaaccagaaaactttatgggttaagcaggctttggtaacaaatatcaaaatggctaagttatctattagataataggcccatagaattcgaaaaacaacttactgtaagatagaggcagactgtcatcaggaatacctggaaaggaaagcaaattagttattttaaggtattaggatggaatgaagcttattcataaacaacaactgccatcagaactctaacatgctattaacttttgtacctcacagaacatcagcttatcaattcaaatcatctgacagtaacgtgatcgatatatggatgagggtaacagcacacccttacaagaactgtagtaccgggttgcgatctccctccccagaaaatcatttcaagaggaacaagatggaaggcgccaaaaaacattgttccgccggccacttgttttcttgaacatttacaaagatgacatacaccaatttggataattacctgtattcaccctgggaggcagctgaattccccaggatagattatgagatgctgtagacaacagaggaaagcattttatgtacctaaaaatagtcattcaaagaccccttaagacctctctctcacttctcagtagtaagatgacatcacttgaaagttcagccatatgcttgtcattttgtgttcatcatggagtggttatctacaaggtctcctctgtaagagcataaaccatgtacacctacctggaacattactgtaacgctggctttgcataaagatgggtcttgtcccattccttcaccagtaagctcttgtgggctgaacatctgaaaaaataacacccttcactaacacctcagacaaatcaatagggccctgacatttgttgcgtacagtacagtgctactcagaattttctgttttctccactaatccatcagaaagagagagttcagttcgtaaaatcatccccgtagcaacttccacacactcaacgaaagagcagagattaagaaatggccgtaagaacttactgcaacaacagagctctcttcggttccaacgtgcgcgtaaatcctgcagacaggagcccaataagacattaggtcaactcagggcatttcgaaaacgctattttctgaacagacggctaagcaagaggcttgcagggcccatctcctcagagttatttatcctcacggagctcagtacaggtctgtgaaaaggtcctcatcataggaagggggacctacacggcccgccatcgccattttgtccttcacaaagccccactgctacttttaagcctcgaggccacgcacaagaccttatccgccagtcgccctggccaggcagctacaacacagaaggcatagtgcgtgctatgctatgttcgcacaatcgctcaaaagaaaataaaagaaaaagacaaagtacaaaagagtaacagctataaagaccacgaagccacttaccacgagcagtagaaaaatgagaacgaatctccccggggagacgattaaataccatgccgcagaggcccacgggatttgggggcggggctacggcgagcgcacgcgcatacgttgaccgcatgcgaccccggggagttgtgggtagagagttccagggaaggagggcgtagacaaagcgccacctgaacttgcggcgcgaaaaaggcgcgcatgcgtcctacgggagcgtgctggctcaccgaccgcattgcggcttggttttctcacccagtgcatgtggcaggagcggtgagatcactgcctcacggcgatcctggactgacggtcacgactgcctaccctctaaccctgttctgagctgccccttgcccacacaccccaaacctgtgtgcaggatccgcctccatggagctacagcctcctgaagcctcgatcgccgtcgtgtcgattccgcgccagttgcctggctcacattcggaggctggtgtccagggtctcagcgcgggggacgactcaggtactggatcccgggctaagctcgggaggaggtcccctttggtggggccatttcgggaaagtatgtcaggacgtaagtgcttcactgaagacaggatctgattttttcctaactggttccctatgtcctgccttctggtgcgttttctttagatcttggactactacgggccaacattagctaacatttatggagcaccgttttaagcacactatatgaatcgattaatccaccaaaatcccaagagctaggtaggatgacaacccccattttattgatggggaaccctaaagagctccggcggtgctgcctgctgcaactcctgcctgatcaatatggttgcagtcagctatagactgttttactgagaccggacaacattagttcagtcgtttgtggtaaacatctacgtgtacaagcacactttataaacatttttttctttctttttttttttttttgagacggagtttcgctcttgttgcccaggctggaatgcaatggcccgatctcagctcactgcattccacctcccgggttcaagcaattctcctgcctcagcctcctgagtagctgggattacaggcatgcgccactgtgaccggctaattttgtatttttagtagagacagggtttctccatgttggtcaggccggtcttgaactcctgacctcgggtgatccgcctgcctcggcctcccaaagtgctgggattacaggcgtgagccaccgcgcccggccaaacatttttttctttcaagacggaggcttgctctgtcgcccaggctggagtgcagtggcgggat

SEQ ID NO: 5392 - DNA, 6000 bp, Homo sapiens
cacggctcactgcagcctcagcctacctccctgggctcaggtgatccttccacctcagcctcccaagtagctgggattgcaggcacttgtcaccacaccccggctaatttttgtgtttttttgtagagcctgtgttttgccatgttgcccaggctggcctcgagttcctaggctcaagggatctgcctgtcttggcctcccaaagtgctggaatcagaggtgtaagccaccacgcccggccagattttctcatttaatcttcactctaattctgtgaaatgggtacagctagtatctttatgtcccaaatgaggaaacagatttggagaagttatgtcactttgctcatgttcagtcagctggtaagcaacagaggtgggcagagcgactatagtaagttttctgtatagtttacctcttttaagtttctggaaggcaggagccagatcgcactgagctttgcaactggagccagggctccagagtactgctcaacaaaggtttgctagggcaacagtagctggggatttagcgaccagaccccagcaagcagattctcagggatgaaagtagtcctggaagcctctaaagccctggttgctcagtagaatctagtttcaagaggagcccagcatttcaagtggctctgaagacagaggagatttggagagtgctctttgcattgtggcttccaggcctgaaggagagtgagctggaggttgctctctgttctcacctcttatgccatgtcaggtttttcccaggcaggcttgagtcctgggggagccccgcctcatggcccaggctgcagtgctgatctccctgccttgtggtgaggattgcagctcagagagctaaagggcagtaaaccaccttggttttggctttgtgcttaagttgcaggctcttctggttatcctttgtgaaggaggctcttaccctggctggaaagagggagcagcccctgcctcccatctacaatgggacagtaaaggaatatggctgtttctcaagtggaacagtcacagttaattttgggggtgggagcatccaggctttccactggtgagtgcctgccagttttacaagctctcctacactgaatgctcctctggtttattgactcttggcagttgatagcgatagttgctcatggcagttgatagcgatagttgctcagaatcaaaggatgaaaagacagtttctggatacagtgagggaggaagggttaaaaaacaaaggactccaactcccagttacaagatgtcccatatggccatgcgcagtggctcactcctgtgatcccagcactttaggaggccgaggtgagaggattgcttgagcccagggagttcgagaccagcctgggcaacatggagaaatcctgtctgtacaaaaaatacaaaaattagccgggcttggtggcccatgcctgtagccccaggtattcaagaggaagatcacttgagcccaggaggcgaagattgcagtgagccaagatcgtaccactgcactccagcccgggcaacagagcaagaccctgtttaaaaataaataaataaatagggacttgccacaggcacatgacctttcttaagagacaaagtcttgtgctgggaatggtagctcatgtctataatcccagcactttgggaggccaaggtgggcagttcacttgaattgttgagttcagtaccagcctggacaagcttgcaaaaccctatctctacaaaaaatacaaaaattagccgggcgtattgctgtgggcctatagttgcagctattcgggaggctgaggtgggaggatggattgagcccaggaggcagaggttgtagtgagccaagatcgtgctgctgcactctagcctgggtgatagagtcataccttgtcttgaaaaaaaaagagaggctgggcgtagtggcccatgtctgtaatcccagcactttgggaggctggggcgggtggattacttgaggccaggtgttcaagactagcctggccaaggtggtgaaaccccatcttactaaaaatacaaaaatgatctggacgtggtggcacgcacctgtaatcccagctatttgggaggctcaggcaggagaatcactggaacacaggaagcggaggttgcagtgagccgagatcgcaccactgcactccagcctgggtgacagagcaagactccatctcaaaaaaaaaaagaggccgggtgcagtggctcagacctgtaatcccagcactttgggaggccaaggtgagcagatcacaaggccaggagatcgagaccatcctggccaacatggtgaaacctcgtctctactaaaaatataaaaaaattagctgagtgtggtggcgggcgcctgtaatcccagctactcgggaggctgaggcaggagagttacttgaacccgggaagcagaggttgcggtgagccgagattgcgccactgcactccaacctgggcaacagagtgagactctatctcaaaaaaaaaaaaaaagagacgagagtctaattctgtcacccaagctggagtgcagtggcacgatcatagctcactgttacctccacctcctggactgaaacgattatcctgccttagcctcccgagtagctgagactacagacccatggcaccatgcctggctaatttttgaatttggagagagagggtctcactctgttgcccaggcttgtctcgaattcccaggcgcaagtcgtcttcccaccttggcctcccaaagtgctgggattaaggcatgagcaacagtgctcagccccgtgtggctttttttttttgagacagagtctcactctgttgcccaggctggagtgcagtggtgcaatctctgctcactgcaacctccacctcccaggctcaagcagttctcatgcctcagcctccgagtagctgggattacaggtgtacgccaccacgctcagcaaatttttgtatttttagtggagatggggtttcgccatgttgcttaggctggtctcgaactcctgacctcaagtgatccaccagcctcggcctctcaaagtgctgggattacatggtgggggccaccatgcttggcccccatgtggcttttaatctaaatcctaccctatctcttcccagcttttctgtttgtagtcagtgctttgtatttcctcagtttacaaaatcccttactgtctcccacaaataggattgaggaaacagtccttctgtcacattgcaaagccctagaaaaatgaagggactagaaaaatgaagctgtttgatcctgctctggttctcagtctaccagtgagtgaagggccggagggcccgggcaagcttgagcccaggatccagtgggcccactgaagtcagggcccacttttggggggctgggaaaaggaagggttgctgtgggaccactgggataggcctttaaacagcacttcaccattggcctgaatcaaacattgtcattcccagtgtcccgagcaccttccctgagtcttcataccttctgcctcctagcttatggaggaggagccaggggcttatcttttgggggaaatgagagcacgattaggcatcaagaagggttgatgagaaactggtaagggggactgtcaagaacagcagagtgctgaaatggtgacaaaagctctgggctccggccccagctctgtactgagaagctgtgagattttgggcaagtctcataacctctgaatgccaatttctcaatggaaaacagggagactacctaccctataggtctgtgtttggagaaaacaaagtgtaagcgctggacatacagtagcatcagaaatgctgaatccgttggccagggctcatgtgtaaggcaaacatttcttggccactcctgagtagcatggtcttgcaggaatatatgcttaagtgctgtgagagcacagaggaagctttgcccttccctagagggttaatggctaccaacgtgagaaggtcacggagttccttaatgagagggagcctagcctagaataggggatgaatgagaaattgttctgagaaccagaggcaaggctgcaaccagcacatagacaggggtcgttggtctagaaggggagtcttctccagatgagagacagccagcttgccctgtgctcaccatgtgcccagatagtgggggcttagcaggaggaaggtgtgaggaatcccaggcctttggaattccttgagaaagcagtgttgttttgaaggtaaggcaggggattggtgactggaaacttggaggtgagtgagaacctagggatgaacgttcagaagcagggctggaaggaacttaaaagggacatttggattgtttctagcttttgggcaaaatctaggattaaatatgattttttcattgatagaatgctctatcagtgataaaggctcttaatctagaaaacatacacctcatagggggctttacagagtccccaaactccctgaaattatgctcaaaatattttgtgtctaagtggaatgtgcatgtttccaaggttaagcactgcttttttaggaagtaggaggtccgtccgccactgtcagcttgctggtttctgcttaccctcctccccacttcgttcttgagggggtggtttgctggtctttggcagggccgccactctgggtcagcacatctgagtcacacatgttcctccccagccctattggaggctttgttaaagtcatctgcccctacccaggtcccacctgccacaggtgagctagggttttatgacagccgtggctgcagtgagtctcctcgacctctcgccagctgttacccagcaaagcaccttggggagggtggggctgcccacttccggggagggggggagggggaggggagaaggaagttgatctaaacccgcctctttctctgtctcccttcctgccctattcccctcctgccccttccctcccaccttgcttctggtgtgctgtcctggaattgcacgcgcttcctgaccaccaggctctggcccttgagaagccagcggggctttgtccctgttgctctccttgccaaacccagtctctctgctagtggtggtttcggttgcgacaccgtccaggttcccaggcaggaaccgctcggcctggctgcttagctacttttcactgaggaggtggtggaaggtgtcgcctgctctggctgagtaagggtggctggctgagccggcagcccccgccctaggcctggctcttcccggcctctgtactttgccctcgctgcctgacaggttctgctgtgggctctgctgaatggaagtcgctggtagtccttttccctttctccagtcgggtatgttgtccccctttttactctaggattgcctcctcctctttctttcctctcatctcaaacataggatctttagagagttgctaaggggcgccctgcctgagtccagcatagtaatattcatgggaagggtgtccagatgtggaagaggcattgactaggaaaggaagagggggcacataccagaagggtctcccctgagaacaagcagcttgacaagtgggcgaggaggggctggtgggaggcagaggcctgaggcctcagagaggatgctcccgtgctacagtgagggggagcctaggatctggggccattgcccaggactggtgcccaagggacacttttctcccccaactctatagtgcctggcttactctgcttctggccagggaatatcacccctcctggtttggctccttctcagccctcgggaagccaaaggacacttgaagccagccctgaatgcagagccccaaagcatgagcttctccatgggacaactgttggtaggagcctccagcattagggcaggggccctgcctacctgagtcagcgccaggcctctcggggtggaggctgtcttccgggcaagcctgacaacacacctaggccgagtctgagatcccaggcggaaggggcctgacaggcccagtggatgcaaaactatctttttattttctc

SEQ ID NO: 5393 - DNA, 6000 bp, Homo sapiens
accaaacacggttgaacctagtaacccctgagctaggccacttagggccccctgcctgggattcctgacagccggcgggggtttgcggggtgggtggggatcagagatttcttgccctgaaagcctatcagctgcaggcaaggctgggggacatgaatgcctcctgacccgaacactaaccacccaacttcttcagctgcgtagagagtgccctctggcccagttgatggacagtgagacggacatggtgcggcagatccgggctctagacagcgacatgcagaccctggtctatgagaactacaacaagttcatctcagccacaggtgatccccacggggacacaccctccaaagtctcacagcccccattctcccacctgtgttgggaaaaccagcaagggatttagaggggggagactcagattccagtcttgtcctgacattattccattctcacctcctttcctttgagccttcgttgtcagactactatagagataatagctactctcagagggttgtcttaagtaccaaaggagagaaaagacaaaaggagattagttgtttattttttagagacaatgtcttgttctgtctcccaggctggagggcagtagcatgatcatggctcactgcagcctcgacatcccaggctcatgtgatccttctggatcctaccaaagcactgggattacgggtgtgagtccctggcccagcccaaaatgaaattttaaaatgaaatgtatttatctgaagcacttaaaaggccaggcatggtggctcatgcctgtaatcccagcactttgggaggctgaagtgggaggatcacttgagcctaagagtttaagattgacctgggaaatatagtgggactccatctctacaaaaaaataaaaaataaaaattagctggacaagatggcgtatgcctgtagtcccagctactcaggagactgaggagggaggatcacatgagcctgggaggtcgaggctgcagtgagctgtgcttgtaccacttcacttcaacttgggcaacagagcaagaccctgtctcaaaaaaaagaaagtatctatctgaagaagcatcccagacactaggctgggcacagtggctcatgcctgtaatcccagcactttgggaggccgaggcaggtggatcacctgaggtcaggagttcgagaccagcctggccaatatggtgaaaccccatctctactaaaaataaaaaaattagctgggtgtggtggcaggcacctgtaatcccagctactcaggaggctgagtgggagaatcacttgaacctgggaggtggaggctgcggtgagccaagatcacgtcactgcactccagcctaggcagcagagcaagactctgtctgaaaaaaaaaataataagaagaagaatccctgacatcaaggaaacctcagtaaggtgtagtttctcttattattgatagctttcttttctgctccagggaagaataggtggtcttgtccctccctttctttctcccttccttccctccttaactaagcaaagagagaagatgtatgatattaggggacacaaagatcatgtcgaggctttttttttcttctgtcctctttattctctagtgccagacagtgttccactgttttccacactagcttctgtgctgttttgaggagatgtactactcagacttttgtagtaattgtacacccacgtgtagtaagtccaggagccagatccaaagggtttacctgcagcctgtggaatgttctgggagcatctgtggggttgcattctgatgtcttactctcgtgtcacagtggtgggtgtggtaacctatacacattgttcttttatctgatttgaagcagattccatgagtaggcacctttctgttagctaataccagcatcaaaatggcaagaaatcatagtttctgtgctgggatatttctcacaggaatttaataagattacattttccatttgttggaatgtgtataataatattttgagacttagctctttttgtacatcccacaaaaggaacaaacgtttggaaaagtgtgaggataaccaggagcattgatgtcttagaagcttaagtgaggggccgggcatggggttctcacccgtgatcccagcactttgggaggctgaggtgggtggatcacttgaggctaggagttcaagaccagcctggccaacatggtgaaaccctgtctctactaaaaatacaaaaattagctgggcaaggtggtgcatgcctgtagtccaagctactcatgaggctgaggcaggagaattgcttgaacccaggaggtggaggttgcgtgaggaaggtgtttcaagacatagatttgatagacttgggcgagacactcaggaaagtaatgtagcatggagtgtgtgttgattgggcaagagagagagaaaaatgagaaaggaactaggtcctcaggaaggaggggggtggaacagagcagggatggaggcatcggcctcagcaaagggccgggagctcatctatggtagcaggaggggaagcagaatgtgggcagagccaggcagatagtagatgtgcagtttaactagaaaccttccagaatgtattagggatttggcttttatccacagagagctaaaacaaatgagtgatgtgctcagatttctggtttgaatagattcctccagctgcactggcaggaatggatggggctgagcacagtggctcatgcctgtaatccctgcactttggaaggctgaggtgggaggatcacttgagcccaggagtttgagaccagcctgtgcaacatagtgagacccgatatctagaaaaaaaaaaatagctgggtatggtggcacacacttgttagaataaacccagctacttggggaggctaaggtgggtggatcacatgagcccaggagctggagattgcagtgagctataatctcaccattgcactctagcctgggtgacagagcaagacctagtctcaaaaaataaataaataaataaaaaggccaggtgcggtggcttatgcctataatcttagcactctgagaggccgagacgggtggatcatctgaggtcaggcatttgagaccaggctggccaatatggtgaaaccccatctctactaaaaatacaaaaattagtcaggcatggtggcaggcatctgtagtcccagctactcaggaggctgaggcaggagaatcgcttgaacccaggaggcggaggttgcagtgagtcgagatcgcgccactgcactccagcctgggcaacagagcgagactccgtctcaaaaataataataataataaataataataaaaggacagcccacagaatgggagaaaatatttgcaagttagttatctaataaaaatctagtgttcagaacataaaaagaacgttttttagctcagggctaaaaagacaaataaccctaatttaaaatgggcaaaggatttgaatagacacttctccagagaaaacatacaagtggccgaaaagcacatataaatatgctcagcatcattaggtcttagggaaatgcaaatccaaaccacaaaatgctgcacccagtgtggaagacagtttgaccattcttcaaaaccacacacaagattaccatatgatcggcaattttactcctaggaatataccaaagagaattgaaaacatgttcacataaaaacatgtacacaagtgttcatagcagtgtttttttttttttttttttttttgagatggagtctagctctgtcacccaggctagagtgcagtggtgccatcttggctcactgtaacctccgcctccccagttcaagcgattctcctgcctcagcctcctgagtagctgggattataggtgtgcaccatcacacccgcctaatttttttatttttattttttgtatatttactagagacgggattccaccttgttggccaggctggtcttgaactcctgacctcaagtgatccgcttgcctcggcttcccaaagtactgggattacaggcaagagccaccatgcctggccaatagcagcactttttataatagccacaaggtggaagcaatccaaatggccatcaattgaatgaatataaacaaatatccacacagtggaatattattcagccataaaaatagatataacatactgacacaggctacaacatagattaaccttggaaacatgctaatgtttcatatgcctatgattccatttctgttaaatgtattctgtagcgaatagacaaatccatagagacagaaactagattaatggttgccaagttctaggagtgggggaataaggaatgactgccaagggttacagggtttctttaggggatgatgaaatgttctggaattacgtagtgaggttggttgtacaaccttgtgaatatattaaacatattaaaaaccactgaattggtatgtcaattatatcccaattaaaaagaaaaccaggcattgagccagatttggcctgcaggctgtagtttgccaacctctcacctagacattgagtttcattatgtaataatgcatttacttgtgtcaaaattagaaagatctcaaacattatacagggaaaagcctctcctaattcttttctctaggcaaagacaaagcagtctttgacagtacatttcactgaaaattaacagagcccaggtgggattatggctcatacctataatcccaacactttgtgaggcagaggcaggcagattgcttgagctcaggagttcgagaccatcctggccaacaggttatacctgtctctacaaaaaatacaaaaattagctgggtgtggtgttgtgtccctgtagtccgagctgctcaggaagctgaggtggaaggcttgtacctgggaggcagaggttgcagtaagccaagattgtgtcactgcactccagcctgggtgacagagccagaccttgtctcaaaaaaaaaaaaaaaaaaaaaaaaaaaaagaaaattaacagacatacagaaaagtgcacataagtggacagctccatggatttcacaaagggagcacagtcacataatcagcatccaggtcgggaaacagcataaccagcaaagccccctgagcctcctaccagttaccacccagtcccctcccaaggtagccaacatcctcgcatccagatggctttcactctccctggttacaaactgcttttcttaacaagcttttttttttttttttttttgagacagagtcttgctctgtcatccaggctagagtgcagtggcccaatcggctcactgcaacctccgcctccggggttcaagtgattctcctgtcttaggcttccaagtacctgggattacaggcacctgccaccacacttggctaattattgtattttcagtagagacgggatttcaccatgttggtcaggcaggtgacctcaggtgatccacctgccttggcctcccaaagtgctggggttacaggcgtgagccactgtgcccagcctgcttttcttaacaagcttgaaatgcaaagataaacagtgtagtctttgtgactgaatggtgtggatgctttcactgttgtttttggatatggtacaacttttatctccagtgtaatggctccatggctgggaaggcagcgacaatgacagcacacagcactgttgggttttcttttactctattttcctaacaacttagtgtttggattttaccctttagaagttggattcaagcttccttcttgaggtagcccctaagtgtcatgggctcaaacacccactaccaaaagagtctgctcttttcatggtagcttttggcagacctggaaggagattgtgtcacatggcctgtaaacaaaaccagtaattcactgggtgaagaccaaatgcctcatcaactgccaagcctctgtctgtctcccttagatcagtagcccatgatccctttacgaacctcagcctcggctctgcttttattgtttttcactgcatag

SEQ ID NO: 5394 - DNA, 6000 bp, Homo sapiens
aaactattccactgtaccttctactacagcggcgtccttctgcaatttagtgggctgttgctgccactgtgggtcttcaaggcagcagcaggtcttccctccccaagatgttaggacaggactagaaatttgtattaaagtctgtgcagttacagatagctgcacatgatggggtgggggtaggtaatacgcagattcagggccctgaattttattttatttttatttttttgagacagagtctcacctctgtcgcccaggctggagtgcagtggcgccatctcggctcactgcaagctccgcctcccgggttcacaccattctcctgcctcagcctcccgagtagctgggaccacaggcgcccgccatcacgcccggctaaatttttgtatttttagtagagacggggtttcaccgtgttagccaggatggtctcgatctcctgaccttgtgatccgcctgccttggcctcccaaagtgctgggattacaggcgtgagccaccgcgcccggcctggcaccatgtcactcttaatgtgtgttatgggaaagtgtcagtgcgtgggttgtgattgcaattatactgaagtcttttctccatacatgtctcctgcagtgcttaaacagccttcccagcccacagcagcaggggtacagcagctctcacattcagtcactagcagagatgccaggtactattctgagcttttaaaatgtactaatgctcttagttctcaaaactatcctaggagctataggtactgttattaactctcattttgcatatgaggaaattgaggcccacagatatcaataaacttacccaaggctacacagccagtaaatgacagagcaagaattcaaacccaggcagcctagctctgctgtctctggaagagccgaattagcagggatgccctcctacagatcctgagtccttcagataaaacagtatctgggtcaagggaagctggggatcgtgacgtcagcacctatgcttggttggtaaatccctctttctagggtcacaaccacaacacatacgcgtttatgcttaggcctaagatgtgtccctgaaatcactgtcaactgaaccatgttttaaatgttgtgggggctgttgctactgaaaagaaccctgctgtgaacgcttgtacaaagcaaagaatctatttttataaatttagatctggagattttaaaaaatgcaaatatgatacatacaattcagtatttatgcagtcagaagagacaaaggaataagtatcttcccatacaaggaaaaaaattaacatttaattcagtaccttctgtggaccctggggagatgctggggtcttccacagccttatctcatttagtctttacagtgcccttctgggggcagggggaggcatggatcctaacaaactagaggacccaggctcaggtgaggcagaacgcttagcaggaggtaatgactttcagtttgccgcctccaaagcccatgttttctccagtgtgcaacatgagctttaaaatctaggtgtttataatctggtggaacccctggaggatggcttgggctgttctgtcctacagacctgtggctctcagcatccattctacgcctcacatgggcagccctgctgaagaaaatcaccaaactgtgtgttgatgccaccatccattggtggtccactcactcaggagcctttggtttgtcagtccttccccctgcctttctggcctttgtccctcagtggctactccattctttaaaaaatctacccagtctctgcctcctgcttcatacttacggatctcttttctcagtaaactcacccaacttgcaccctcccactgcagaacctcatcagtgtggggacccatttcctccaggctcacagtgggatcgtcccttctgctttcttgggacctgcttgcatcagttatcactgctgcaccttcagccttcccctgagttcctttccctcagcaggtcaagctctcatttcatcagaagaaaatctcccgtgaccttgaacttcctccacttatcctcaacctctctccctcacatctcagccaaggatctcaaaaccacaagctgcatgcaccctgtctccctttcttcctctcattctctccctcacttagggtacttgctttttctgtggcctctgaaacttctctcctcagggaaggcctcttaattaccaaattttgcatttaccttcattgtatctgaactatgtgcaaaatttggcactgtaaggctatgactcgcctggtttttccctccctgggcttttctcttcatctactttcctctggtcatgcctaaatagtgctcatcctgctctcccacccagctatcttccatcccaactgttgaccactgcctctgggctcaagactctcaaattggtatgaccagccaaggcctctgctgagtgccagctgggagattcatttgctcactaggcagctcctcgtggaggtcccattggtacctcagtttcctctctcctgactaaagagacttttagtctgtttcatgattaatccaatttatcacatctgaaatcttggattcattcaagaggcctctcattttttttttttttttttttttttgagacagagtctccctctgttgcccagactggagtgcagtggcgtgatctcggctcactgcaacctccctgcctcccaagttcaagtgattctcttgcctcagcctctgagtagttgggattacaggcgcccaccaccatgcccagctaatttttgtatttttagtagagacggggtttcaccatgttggccaagctggtctcaatctcctgacctcgtgatctgcccgcctcggccccccaaagtgctgggattacaggcatgagccaccgcgcccggccaagaggcctctcccacatccaggcgctcacaaaggcctatcacttaggcctgatgaacacttctgattcctggtgacgcctctatctccactgtctttacttgttattgggctcttaaggtcttcctgtctctagtttgatctaagccacacctttgaaagaacgatctttctgaagtacaaaattaccaatatatttcaccagtgcttaaaactctttattggcttcctgtcttctacagatgaaaatctgtttctagccaggcaaggtggtgtgtgcctttagtcccagttactcgagaggatgaggccgggagttcaaagctgcagtgagctacaatcacgccactgcactccagcctaggtgacaggcgagacctcatctttaaaaagtaaaaatttacataggaagttgttttatgcctttgcataaggtttgtgttaactttcagcaagaaattccctttctctcccttgtctggcatatcactcttcatccttcaaaacccagctctggggcaggagtggtgacttatgcctgtaataccgtcactttggggagctggggcgggaggacagcttgagactagcctgggcaacacggtgagacccctgtctctacaagtaaaaaaaattagccggtgtggtggcatgcgcctgtggttcctggtactctggaagctgaagctgaggcagtaggatcgcttgagcccaggaggtcgaggctgcagtgagccaggactgagccactgcactccagcctgggcaacagagcaagaccttgtctcaaaaaaacaaaaggtcagctcaggtatctcctcatggaaacccttcttcacatccagaggtggtcggcttccttctctattctaaccctgggctttgtacacaggtctgcatcccctcctagcatctgtgagcttctctcagggaaaagctcattgatctgcatccccaagacctgctggggaagaatctatccatctaaactcgctttaatttgacaaatgaatcagttaagagtaggaaagctgcctatgggcactgctcaatgcaacgtgagcaacaaagggagacagaactgaggccagaaaggtgaggggggacagaggctggcagggaggggagcttgtcagtgcagactccaggaagaatctatacagaaagttactgagcggcctgagtcccccaagtgagggctcgggacaatctcccgcctgggtgagagaatagggagaccctgaaacgtctctgcagcctcgggctgctccagaagcgcccacagctgcagggttttggtgtggatgggacctgctgacagggatgcggtgggaagagcccctcggcgcccgttctcccaggcttccccttggccaagggtgctcctagcacagggccatgaaagtaagatgaagaggcttgtttttctcctagataccagcgggcaagcagaaaacaagaggctcaagaggggcagcccccgcatagaggagatgcgagctctgcgctctgccagggccccgagcccgtcagaggccgccccgcgccgcccggaagccaccgcggcccccctcactcctagaggaagggagcaccgcgaggctcacggcagggccctggcgccgggcagggcgagcctcggaagccgcctggaggtaactgggcgagggccgcgcagggaagggctcagcaggaggtgcaggccacgggccgctgctgagaggtcctcaccccgggcccccttgttcccgcaggacgtgctgtggctgcaggaggtctccaacctgtcagagtggctgagtcccagccctgggccctgagccgggtccccttccgcaagcgcccaccgatccggaggctgcgggcagccgttatcccgtggtttaataaagctgccgcgcgctcaccaagtcctcttccgcgtctgcttccgcgtcgggcccgggcggggcggggcggggcgtggagccgcgccgcggcctgacgtcacccacacctccctgggactgcgtcactggtgcgcgccgcgggtcagggcgcaatggcggcgctgggcggggatgggctgcgactgctgtcggtgtcgcggccggagcggccgcccgagtcggcggcgctgggcggcctgggccccgggctgtgctgctgggtgtcagtgttctcctgcctcagcctcgcctgctcctacgtgggcagcctctacgtctggaagagcgaactgcccaggtgcgggggctgcgcgcgaccggaatccgcgccctgcgggcggagcttgggcgagccgggggcgggtccgtgctcatgggcagccgcgggccccctgaacttactgtcccctccgtagggaccatcccgcggtcatcaagcgacgcttcaccagcgtcctggtggtgtccagtctctcacccctgtgcgtgctgctctggagggaactcacaggcatccaggtgcgaaggaggcggggcaaagggcaacggcggtgagagctcaggggtctttaggggaggaagcaaaactgatgccccctttcctgtggctcagccaggcacatccctgctcaccctgatgggcttcaggctggagggcattttcccagcggcgctgctgcccctgttgctgaccatggtgagtgctcctgctgtattttttcttctggtctttgttatcagcctgatgggcagtgccgtggactcttgtttttggtttttggttgatgggagacaggacttttgagatggccccagggtcctccggtatgcatggtctggaaatcgtggctggagaggatttcaagcttggagtctcagggagcatgggcaaaggtctgggcaaaagcggtgggttatggtgaaagtgttttcttgccctcagattcttttcctgggcccactgatgcagctctctatggattgcccttgtgacctggcagatgggctgaaggttgtcctgggtgagtcttaaaggctgaagggaaaagtaggcacaggcagtccaggacattggggcagggagtcagcgggctcagggtgtgatctggacacgtgaaatgtcatctctctgggtgtgttttctcatcagtaaaatggaaacatagagctaggt

SEQ ID NO: 5395 - DNA, 6000 bp, Homo sapiens
gtggccagcagtgactggtgggcgtccctgaaggtcgtgtccatcagcagcagccccgggtggttccgcacagctcgagcaaagccctcaggcccctctcgcagcaggatgtctctgaaaccagccgggggcgggcctagggtagacaggggcattggtgcccatcctgcaggtggcaacctcctgtctcccccatgagttgacagaatggatctcacctacctatgggcactgcagggacaacggggtccgtggggctggggctggccttgacgggaatcggggtggttggaccgtttaccatgacatggcctggggagaaagcgggcagtgggtcagggtgggctgggcagaggctgagtcgagggcagcagtgagagtggctgggctcagggacagggacacatccctccaggatccccgggcttccagctggcccctgtcctctccaaagccagggcctcctgggtacaggcagtggggacgtcttgaggaccacgtggatggaaaggtggggtctctcagatcagaagcaaggagagcagtgaatggcagggtgcaggacaagaggacgcagggccagaatgagggcaggggtgaggggcagggggcactaaggagttctttggtcatggggagtggcaaggaggtaggagcaagagattggagagcggaggggaggggagggcagggcagggcagtctcgggccagaccgaggtagtgcaacagcttttgggcccggttctgtgcaggccgcagctggaacagctctgggttctcgtcgatgaactgggtgtccacagtgcctgccaggaactgctggttgttgagcacattctgcaggaaggcgatgttggtctgcaggacagaggcgggtgggagggggtcaccatgcagcacagacagggaaggcagaggagaaaaggctgaaagagaaaaggctgaagatgctgccctgggccagcacagcttctgggcctccctgcagaggggcacttccccgtccctcagccctctcctcactccagcagagccccctaagctgtcacgggctgggcctgctccctccatacttgtttacaccaaagcatgtgctgaaggccacccttcctgcctccccgcagcctagaacagggctcagcctttttctccagcagcgtggcccacagcagtcacccttgcccctcgtccacgcttctcgaaagagggccttgaccgcaacagaccacactctggcactctaagtcactcctcccagctgagtccagcgggcatgctcccgccttgctgctcgttccctgggcttccaagccatcttgctctcctgtcctcttcctccccagctcctcacacaccacatgctccccaggaggccccgtcccggggctgtggcgccagtgacaggctctgcctccagggcaagacccagaggtgcaactgcctcccgggcctttccttgttcacccctcgcataagttcagcaagtccacggccagcttcctgcctatgcacccagtcctcctgtgcccagtgggtgccccactgtccccccagttaccaaaacctgcatcccatcaccctcatcacccactcctcccatgccactggtcaagccagaggattcgaccacggccattttgggaccttgtgacctcttctccatctccaggccacaccctccaccgccttcctcattgtggccacctccagccacatcaaacttgccttgcgctccacacctttgcacctgcctgggaagctctccctgaacttctcaagggccttcgccctgtcctcacaccctcggcagagctgacactcacctttccagcagtcccctgaggaacccgctgtgggcaagcacacccatcggcttcatcctctgcttgtctgcctgggaacccttgggggcagggtgctgcctgaggcatgtgtcagtgcactttgtgcacaggggccctcggttccactcattaaatgcctgggtgacaacatgaggctgggccagggtgagtatgacttaaacggggacatgcgagccagcactgtgacaggtgctccaagacctgtgaaagcatggcctgtggctgtgtagcgacagccctggcttccaccgcgaagaaaacacctccacgcgtcacttattcatgatccctgtcggcaccttcaacagggactcaaggccacccagactcctctgagctctccgtctcttaggctcctattacctggaggcctggacaggaagggtgcctcccccaccagcctgtcaggtgctcaccacagagtgggaccccgccagcagtgctgtgcctgtctgcccctgagcctcgcccctgcctctcctgaagagatgctgacatttcagctgggccaaggcatggcactggagaagggaggcagctaatgaaaccatccaaagagccccgagcgcgcagagtgagaaggacccttggaggccttcgccctgtcctcacaccctcggcagagctgatgctcacctttccagcaggccgctgaggaacctgcacgggcagggctgagcgcagacccacactgttgctgggacccttgtgttcacagacacacgctgaaggtcataaccgttctgcatcaccgagtcatgtggagggtccccactgagtctcccctttgtgactgtcgggttgcccatcctctcctccatactgtaagctctatgggggcaggaaccaggcccatctggttcctgatgaacccggctcccagcactgggtggccatggtggatgctggtaaacatctatatttagagtgaatgaaaactttttttttgagacaaagtgtgtcgcccaggctggaattcagtggcacaatctcagctcactgcaacctgtggctccctggttaatgcgattctcgtgcctcatcccaacagacatgcggtaccacgcccggctaatttttgtatttttaatagagatggggtttcgccatgtttgccaggctggtctggaactcctggcctcaagtgatccacccgcctcggcctcccaaactgctgggattacaggcatgaaccactgcacccggtggaaaacatttttgatggggagaagaggaacaaagacatagctggtgccactgcacatcagagttgacctgcaccaggactgaatccccctcattttacaaacgccacagctgaggcccagtgagtggtgacagaatggcttctggctgcctgtaagcccctcacaagctgcagctgtcctcccctctcgcccctaggaaatgcttatgtatgtaccatccaactctcctggcctacaggaggaacttgttttcagtggtcaggtaacgtgcccaggactacactgctgtgctgacaggatcagaattccaatcttgggtttccccgagtttcctgccacctggcccatggggatcagggctggagggagaacgaggatggctgaggtttaggtggcttaaggaccaggagacacggggaggtggtgacttcctgtttcccaactgggcagaccactggtggtggcgggcacagctggaaggaaaccaggctcgccgagccaccgaagccccagctttctcaaccaggaagcaaagaacctcccccacctcacgccgggagccctttctctgagaggagctggttccgagccgctcttccagggaaatggcccggcggcgacagagcgggagggaggggccgcaggcgctgcgaggacgcacagcttcccaatgcgtgcccccggcggttgggaagccgcgccgcgcagaccaatccggcccgaggcggaggccggttggctccggaacgcctggcccgcggggcgggcggggcagctggggagggagggagaggcgagaggcagctggggacagggcggggcggcgggggcggggcgcctgcccggaggccaagccctctcggccccaccccgcagcagccctgccaggggcgccgccccagccccccccacggccgaaccccgtgccggttggggaccctccacgtgactcggtgatgcagaacggttatgaccttcagcgtgtgtctgtgaacgcaagggtcccagcaacagtgcgggtttgcgctcggccctgcccgtgggtgcagggacgtgtgggtgtgtgggcatgtgtgggtgtgttggggagggtgcccagcgacatgtgacaaagacgcccgtctccgggagatggtgaaggggcccgcgagcaggcgctttgtctggctgtctgcagagtgaggttcgcgccgcggcggcgggcgcccgtgcggtgcaggatgccggggcgccaggatggccgggggcgcgcgcgcctgtgccagggtgagtgcgctgcggcagcgccgggggacagcgcggagggcccgcgccggcccgggcctcgggcgtgactgggcgccacccgtgggcgctgcagcggccgcgtgtccccgtgacctcaggagccggcccgggcccgggtggatccccgcgcgcccctccccgtccgccctccacgtgcgtgtccgcggcgcgcgcgcccgccggcgcgcacccgctcgcctgtcgccgccgccaccgctaaccgcgccgggaaaaggtgccgggaaccgagcgagccggggccgcgggcccgagcgccatgggcccgagggtgggcggcgggcggccggtcatccccgggcctcgtccccgcgggagagcggccaggagtcggcgggggccggccgggctcgcagggaggccggcccgcgccccctgagcgacggacaccaggtgagggggccgccgggcgcagcgcgggggccggccagggaggggccacggactccacgggaggttcggggggcgccttctctggcgggggagggtatggcggggagtggggaggcggctggcgattcctggggacgcctgggaaaggaagttccgggaccctccctgctctcggtcctcctccgcttcctgcctcatgcctcaccttgtccccagcgcctggactcccccttaactgcttgggaaatgtgacctttgctctggggggcctggccctgcaggccccaaccttccctcatctctggcggccctcttgggcctctgacccagcccctccccgggccaggctcacagaagctggcttctgggactgtcctgggcccaagtgggcacctgcgccagccccacctgtgcctgggctgtggccccttcctacagggcgctcaccatggccccgccgctcctgctgctgctgctggccagtggagcggccgcctgcccgctgccctgcgtctgccagaacctgtccgagtcgctcagcaccctctgtgcccaccgaggcctgctgtttgtgccgcccaacgtggaccggcgcacagtggagctgcggctggctgacaacttcatccaggccctggggccccctgacttccgcaacatgacgggactggtggacctgacactgtctcgcaatgccatcacccgcattggggcccgcgcctttggggacctcgagagcctgcgttccctccaccttgacggcaacaggctggtggagctgggcaccgggagcctccggggccccgtcaatctgcagcacctcatcctcagcggcaaccagctgggccgcatcgcgccgggagccttcgacgacttcctagagagcctggaggacctggacctgtcctacaacaacctccggcaggtgccctgggccggcatcggcgccatgcctgccctgcacaccctcaacctggaccataaccttattgacgcactgcccccaggcgccttcgcccagctcggtcagctctcccgcctggacctcacctccaaccgcctggccacgctggctccggacccgcttttctctcgtgggcgtgatgcagaggcctctcccgcccccctggtgctgagctttagcgggaaccccctgcactgcaactgtgagctgctgtggctgcggcggctggcgcggccggacgacctggaaacgtgcgcctccccg

SEQ ID NO: 5396 - DNA, 6000 bp, Homo sapiens
catggtggtacacacctgtagtcgcagctacttggaagcccgaggcagaaggatctcttgagcctggaaggttgagaccagcctgggcaacatagcaagacactgtctctacaaaaaagaaaaaaaaattagccgagcatggtggcacatgcctgtagtcccagctacttgggaggctaaggagggaggatcctttgaacacaggagttcgaggctacagtgagctatcatcacgccactgcactccaaccagggtgatggagtgaggccctgtctcacaaaaataaaaataaaaaccacgaccaccaactatatacactctcacacacacacacacacacacacacacacacacacacgtactcacacacacgtacccacacaaatccgtgtgcatatgcttacatatatgcaaatacataaacaacacctgaaaggtctccacagcccagcaacctgataagcatcttacctttccagggcaaagcgggaggatgggggagtggataagactttgacggatctgcatgaacgagtattattttgattctgtggggtttttttgtgtttttcctttcattcctctcttccctgcagctgccccacccgcagcacagagacactggccactggaccagctctcccagcactacctcctgggagggcggatgcaggggaacaaagaagtcgttgctaagctatgcttttcaaattagactttttcaaagcccacagcaggaacaatggccttgagaacaagcctcccatgtaggagcctttcatggctgggctgttgagggagaagaggtttgttgagaaaagagctacaggctcacagccaaaggtgtacagcagccacataggaatagaagaagctgggggcaggtaggcacattttcctgtttctgaggtagcctgaggccttgccccaacccgacattctctccatgctcacctccccgggccctgcccccgggagtgctgagtgccttcaagcccctgggagaataacttagccatgcccgaaaaaccagaaataaaaaaataaaaccagaaaggtcaggaggctgagtctgggtcctcaggcctcaggaaactgcagggggacccctgccaccacccttgtatcccatggagacggaagggcttctaaatgtttctcgagcctcataaggatgggagagggttgcaggactagaggacctggcaccaggaagggaggccgctgcccgccctcatgtggcctgcctacctgttaacagaggtctcgtcagaccctggccagcagggacaaaggccaatgtccaggagctgagaggcaagaggccctcaggggaaggacagagaaaggtgtggggactaggtgcccccttcctaatgttaggaccaacttaaacctgcggtgcttggctctgccctggcacaagaggataaggggcagggagaaaaactggtttcatgaaattcagtgggttgacaaaatacaatagaatcaaatcaagtaacagagtattactttatgaaacttttgctacatgattattgattaaatgttgtgctggtttcaaagtgcactggatttcccactgttagtcaaggccaaaaatatgggaaaaattttctcaaagactacaaaaagtctctgtgtaggtcaggctggtgagatgagtttggttattagagagttagaaaaggttacgtttttcataccaattcttatctttaggatcttaaactacagccatttgtttgatttttggcacagtgaggatataagtgtattacttctgtaatttaaaaatgttactggccttgttcggtggctcacacctgtaatcccagcactttgggaggccaaagtggacagatcacctgaagtcaggagttcgagaccagcctgaccaacatggcgaaaccctgtctactaaaaatgcaaaaataattagccaggagtggtggcaggtgcctgtaatcccagctactccgggagccaaggcacagaactgcttgaattcgggaggcagaggttgcagtgagctgagatcacgccactgcactccagtctgaatgacagagcaagactgtctcaaaataaataaacgaataaataaataaataatgttactgaatgcccctgacatcaaaaatggactagtggttccaacaggcacaaggttggccattgtgataggggatggtaggagctctaattggttaagataaaggcatatataaaggactctgaacccagccatgggggcaacgggcagtgggtagaaatggcatgtgagatgaagaggggtctcagccgagttgagtatgagttaggcagatggggaaagcactatcgaggcagatgacaaagttctggagggcatgagatctccctgtccagtggagtacagtgtgtagccccatcctcctccaggctggccctaaaatgctgtgtcaaacaaggtccatgatagactgggtagggcaggcaagtgtccaaagcaaggtaaccagaggtcaaccccaaagggcagtgccaccagggagatccaaggcatgggcaccgggcgaggcatagggtgcaaggtcggtgttaggacttcatgtgtcccccaaaatccacgttaaagctctaccccaatgtgactatttttggaaataaggcttttcagaggtaattaaggttaaacaaggtcataagagtggggctctaatccaacaagactggtgtccttataagaggaagaggcggccgggcgcggtggctcacgcctgtaatcccagcactatgggaggccgaggcgggtggatcacaaggtcaggagatcgagatcatcctggccaacatggtgaaaccccgtttctactaaaaatacaaaaattagctgggcgtggtggctcgtgcctgtaatcccagctactcgagaagctgaggcaggagaatcacttgaaccagggaggcggaggttgcagtgagccgagatcgcaccactgcactccagcctggcaacagagcaagactctgtctcaaaaaaaaaaaaaaaagaaaagaaagaaagaaaagaaaagaaaagaaaaaaaaaaggaagaggctccacgaggcaaagagaaaaaggccaggtgaggacataggggagggcagccctctacaagctaggaagagggcagaaaccaaccctgatggcatcttgatcttagatttccagtctccagagctgtgagaaaatagatttttgctgtgtaagccatccagtccacgctgttttgttatggcagccccagcagactaatattgtcaggttgggaataatgactcaagatggctcaaggagaaaggcaggaccaggtatataatttgcagggcctcgtgccaaatgaaaacgctggactccctgttcaaaaattattgagaatttcaaggcactttgggaggctgaggcaggaggatcgcttgagcccaggagtttgagaccagcctgagtaacacagtgagatctcatctctacaaaaaattttttaattagctgggtgtggtgacacgcacctgttgtcccagctactcaggaggctgaggcaggaggatcccttgaacccagaaggttgagactgcaattgtcagaggtgtttgaaccagagcaactccatcttgagtaggggcttggtaaaataaggctgagacttactgggctgcattcgcaggaggttaaggcattcttagtcacaggatgagacaggaggtcggaacgagatacgggtcataaagaccttgttgataaaacaggttgcagtaaagaagtcggcaaaaacccaccaaaaccaagatggcgatgagagcggcctctggtcgtcctcactgctacattcccatcagcgccgtgacagtttacaaatgccatggcaatgccaggaagttaccctatgtggtctaaaaaggggaggcatgagtaatccacctcttgtttagcatataatcaagaactaatctcatgcctgtaatctcagcactttgggaggccgaggcagccagatcacttgagatcaggagctcgagaccagcctggccaacatggtgaaaccctgttgctactgaaaatacaaaaaattagccaggtatggtggtgcacacctgtaatccagctacgcaggaggctgagacaggagaattgcttgaacccgggaggcggaggttgcggtgagccgagatcgtgacactgcattctagcctggatgacatagtgggactccttctcaaaaaaaaaaaaaaaaaaaaggaccgtaaaaatgggcaaccagcagcccttggggctgctctgcatatgaagtagtcatgcttttgttgctttactttcttaataaacttgctttcactttatagactcgtcccaaattctttcttgtgcaagatccaagaacgttctcttggggtctggactaggacccatatccggtaacaccatgggcggtgattgcgccactcaactctagcctagagcaacagagctagaccctgtctcgacaaaaaaaaaaaaaaaaaaaaaaaaaaaaaaagagagagagagagagaattttaagacagcaacagcagagcattaaccatgtactgggccctgtgtgcaagctcaggttttacacctgtgaagccaatcctaaagagaggttcaggatggaggccttgaactagatacagaggtcaggggtccgtgtttaatgcaggctggagtcctcatatgtgctcatgcacagaggtaggcacgcatataaccagttcaaacagcaagcagaacacaagcagagacaggaaaagcgaagtgaagaatgagcagccatcagagatgcattcttagctgtcactatccctcactctaccccttgtcaagggaaggcttcggcagccatgttcgtatgtatcacgtgaccccctctctcggtcactgtgggttggaggagggctgatcacctgacccaagttagccaatcagagctctctcctgacactggctcaggttgaagttctagaaaatgttaattgggggagctgtggctggcagagaaggaaaaaggaagctgaagggcacttgggctcataatggtctctccaaccctgatcctgtcctttatggacatttggcagcgctgctgccttgaggtgccttgcaatgctttatctttttgttaaagccacctctgttgcttcagccagcttgagcggttttctgttacttgctagtggttgggaaggcttagccgacgaagggaaaatgagtcaggtcctgaaggatgagcaagttacgggagtgggccgcatggtgagggagtggacttcctgatggggttaagggcgcctgaacacctgggaggcaagttgaggccaagacctggggtgatggagaggcagggtaggctacccagtgagtaggaggccgaaggaaccacagcagggctccagatctcctggcccagaggggctggtacgggaagcccagaagacactcatccctaaggggagcctgagactgaggaactctcatgccctgcgtcgggctcgtgggcgaagggccttcccagggactgcaccatggcctgtccccagccttacccaggggcctccctctcaggttctgaaggacccaggggtcacagctgtgtggggtgctccactgaacacttccttcaaactccttcaggtttgctatttttatctgcggagttctcagttcctgagtgggaggcaataataaaagggagtgggtggggaggaggaattcgtatatttcttttcttatttatttatttatttatttgtttattttgagacagagtttcactgttgttgcccgggctggagtgcaacagggcggcctcggctcactgcaacctccgcctcccgggttcaagcgattctcctgcctcagcctccagagtagctgggcttacaggcatgtgccaccatgcccagctaattttgtatttttagtagagacggggtttccctacattggccagcct

SEQ ID NO: 5397 - DNA, 6000 bp, Homo sapiens
cgagccaccatgccaggcctaagactgcattttaaggttaagtcttggctgggcatggtggctcacacctgcaatcctagcaccttgggaggccaaggtgggaggattgcttgagcctaggagttcgagaccagcctgggcaatatagtgagaccctgtctctctctttttttgcgggggcgggggacggagtcttgctgtgttgcccaggctggagtgcagtggtgtgatcttggctcactgcaacctctgcctcccaggttcaagcaattctgcctcagcccccaatagtagctaggattacaggtgtgcgccaccatgcccagctaatttttttatttttagtagagacgggttttcaccatgttggccaggctggtttcgaactcctaacctcaggtgatccgcccatctcggcctcccaaagtgctgggattacaggcatgagccactgcacccagccttctttcactatttttaaataaaaatataaataggccgggtgccgtggctcgcacctataatcccagcactttgggaggccaaggtgggcagatcacttgaggccaggaatttgagacaagcctggccaacacagtgaaaccccatctctactaagaaataatatcaaaaaatagctgggtgtggtggtgcacacctataatcccagctactctagaggctgaggcaggagaatcacttgaacccatgaggtggaggttgcggtgagccgagattgtgacacggcactccagcctgggtgatagagtgagactctgcccaaaaaaaaaaaaaaaaaaaaaaaacaggccaggtgccgcggctcacacttgtaatcccagcactttgggaggctgaggtaggcggatcacttgaggtcaggagtttgagaccagcctagccaacatggtaaaaccccatctctactaaaaatacaaaaattagccaggcatggtgtcaggcgcctataattccagctactcgggaggctgaggcaggagaatctcttgaatctgggaggcggaggttgcagtgagccaagatcgtgccactgcactccagcttgggctacagagcaagtctccgactcaaaaataaataaataaatgaaaaaataaaaaaattaatgttaaatctcaaccccaaagtgaacacaagatgtatgtaacatgtatgtttgcttagtatacatgcatgtggctccctttcatgaacattcatagcttttcctataacccattaatatgtatgctagccaacccattttacataaaactcctgtcccacccttcctccctcaaattgcctgcttttggtctcagccaaaggctccacttaccagcctgcaggttacaacctgacataagaaaaaatattgtttccaaatatatagatctggtgattttaagttgacacttctcaggttgtcacaagattcaggtatggctcactgttgcaggacataagctgggatctcctgggaattggtctgcttgcaggccctagagagccttccttcttggttgattttcctctagagatccaactgtcttctcaggctcccctgcctgcctcctccttgggtcctttcttgtggcattgcccagattactgggcccccattttccctacacttactgccactcatagtctgatggttcccacatctgcatccaacctggactcttcccctgagctttcccctctacaaccaccttccccgggccaagggcacacaggcacctcgacaaaacagtgttctatgtttcttcctgcccaaacctgcccctccctctcccttttcccatctgtggtaccaccatgggctcagagaataaaaaaaatgaaggcttctgtcattgactggggtggagatggagggaagagttagcccagaatcacaggtgctgtagaaaggatacctgagttgccgggagagggggtccatgagttggggatggaaggagagcttggcccttcaaacaattgaagatctgatcaaaagattcagaacatctgtgattttgtggctggtgatgggtgacacctgggctaatggggttgggggagttggtggctctacaatttatggccttgggagatccttgctctctatagctgactgggaggttggaagcctgggctctagcccttgccttgatcctccggatctcattttcctcatctgcctaacaggacagaggggttggaaactgatgagattagctcaaaggatcctggcagctcaggctgcaagatttttttcagacctcagtgtttgggaaaaaattgggtaggtggagcttagggactggccttaggcctgcactgttaattcaccccctcccactaccccatggaggcctggctggtgctcacatacaataattaactgctgagtggccttcgcccaatcccaggctccactcctgggctccattcccactccctgcctgtctcctaggccactaaaccacagctgtcccctggaataaggcaagggggagtgtagagcagagcagaagcctgagccagacggagagccacctcctctcccaggtatgtgacactccccatcccccttcagaggccacacaccctatggcattcccaccatgtgttaaggattttctgaactggaagggccctctgtttgcctgaaggccagagaatcttgaagtggagactgaggcccagaccagagtgtggcctgctcaaggttaaacgacaagttagtgttcatccccctgaactagtacctgggctctagcccttcagtccagagctgagttctcagctcttctagtctggggccccaaggttgggtgtgggggtcatgattgttggtggggaggggtcacagctggactaagacctgaaggtgagactaggcaggtgggaaaggagcttgcagagtgatgctgctcaaaaggacaggaagagagcctggcttcagaagcagccacagcaagagagactactgactgaacaggtgggctccactgggggctggggaaaggattttctcagcccccatccccagcactgtgtgttggccgcacccatgagagcctcagcactctgaaggtgcagggggcaaaggccaaaagagctctggcctgaacttgggtggtccctactgtgtgacttggggcatggccctcatctgtgctgaaatgattccacaaagattaaactggctatcatttgttgatttcccccttcttacatttaatccttgcaggagaaagctaagcctcaagatagtttgcttctctttcccccaaggccaaggagaaggtggagtgagggctggggtcgggacaggttgaacgggaaccctgtgctctaaacagttagggtttgttcccgcaggaactgaacccaaaggatcacctggtattccctgagagtacagatttctccggcgtggccctcaaggttagtgagtgagcaggtccacaggggcatgattggatcctggaatgaatgaatcaaccatgagagagtgaatgaacactggaatcaatagagtagcagagtaatggattgtggagcaggaaagagagctgctgggtgggaattcaattccaggcttatatgagccctgctgtgcagtcggcctggagacagcccagctcaggccctgcctagacccctgtcaaggaggccctgtcaagaggagaggaggggcagcacgggggcaaggcaagcttgtgagcgggaaaggcatgtccactttagcgactggtatgtggaagatgagttagaggagacagatggagagaagtcataggaaataaattctgagcattttaggagggcccagacacctggtgtccagtggagtgaaggaaacagtcgcctcccaaaattcagtgtctgaggtcaaaggattgaagttctgtgatgaccaaggagaagccagctctgtggtagggggcacaggagctccccaaggccccagggctgtccagctggctgtcccctgccagcacccatgtcctgtgaccccaccccaccaagatcccatggtttccgggaagggcctactaaactagcttgagtgatgaggctagaaaggggctgggaccaaggtttaaaaagcaaaacaaactaacaaaaaccacactgcagcccccccaactaaaacatttttataaactttttttttttttttgagatggagtctcgctctgtcacccaggctagagtgcaatggcacaatcttggctcactgtaacctccacctcctggattcaagtgattctcctgcctcagcctcccacgtagctgggactacaggcacacgacaccgcacccagctcattttgtatttttagtagagacagggtttcactatgttggccaggctggtctcaaacttctgacctcaggtgatccacccacctcagccttccaaagtgctgggattacaggcatgagccaccgcgcccagcccatttttgtaaacttttacaatgaagtaatttggtgtcaaaatctgacctgaaaattaatgtgagtttatgtatagttttaatttatcccactagtgtaactgtttcaccccagaatatacacttgattattgggtatatgaaaattatattttctttgaatcacctttgatgaaatcctaaaaaattttaaccctgaaacatttgaataaggcattgtggacctatggcaaactcctggctatttctgcattttgcccaaatccatccttgaattatatcacctgaacctcgtgaccacctggagaaggcaatgaggctcaagccagggaggggtggtgtctaatcctacctttcattggatctgggaaaactgagggagatgggggcagggctctatctgccccaggcttccgtccaggccccaccctcctggagccctgcacacaacttaaggccccacctccgcattccttggtgccactgaccacagctctttcttcagggacagacatggctcagcggatgacaacacagctgctgctccttctagtgtgggtggctgtagtaggggaggctcagacaaggattgcatgggccaggactgagcttctcaatgtctgcatgaacgccaagcaccacaaggaaaagccaggccccgaggacaagttgcatgagcaggtgggccagggggtgatctggggtggtgagggactggctcaggaagaggaaacgaggacatggaaatgccaaaccccattcactggtgaactgaagtggaggagcccttcagtttgcattaatatgggtgactatttcacagacactgtgccaaatgtcggtacaatgccaacagttcaccttcttggttgttgagtttccgcattacagaaataaggaagcaggcccaaaggagagcctgggaaatgaagttggagtgacccatcctggggttgcttgatttagggatttagactgggaatgactcctccaaagatctgagggaagaaactgcacactgtgcatagtggcctcttttctgccagccctaaacagctcaagaagggagagtctctcacattatgaggctgtgtgcaaagcattcttttttttttttcctgagacaaagtctccatatgttgcccaggctggtctcaaattcctggactcaagtgatcctcccacctcagcctcccaaagtgtgggattacagaaatgagccgtacgccctcctgaagcatcttggttcatgcatctcgcaaaactttgggctgtgtctctcgaccacattggacctgaggtctccctataacatttattttgctaccacccctttaatatcctgaacatgatgatataactaaagaaaaagcagaggaaaagtaatttgtaggccaggtgttacggctcacgcctgtaatcccaacactgtgggatgtcgagatgggcagatcacttgagctcaggagttcgagaccagcctgggcaagatggcaaaaccccatctctactaaaaaataaaaaaaattagtcaggtgtg

SEQ ID NO: 5398 - DNA, 6000 bp, Homo sapiens
gctctctggggtggatgacagtgaacccagaggcccctcctcatcagagcagcagagttgctgggagtacctcacagctctcaggggacggtggccctagagcagagaaaggttcagatcttggattgtaggcacccctcaggatgagggaattgtggagtcactgggcaccttgcaaggccatcaaaaggaaggagagagagaacaagaaatggggctgaagagacctcaaaggcaaacctcattctctctgagagacctcaggttgtagaaaagactcctgtggagccagcaggagcagcatcgttgatgcacagccatgtctgaactcagcataggctggggggtggagagctccaaaattcacagtgattagcttaaaaccttgccttgagctggcgacaagcaggactggtagctgactgagcaagctggggacaatcctcccatagaaacctttgcctactttctgtgagtattctgaccaggacttatgtgggatggctgaagagggtgagccagacaaaccatctgtgttcttggggaaacctgttagcttctctgggaggggcaaaggaagggcttgggcatccaaggactcagctcttcctctcccatctctttcctggttatgaaagctcttcacatgcaacttgctgctgagctaagctagaacactatgtaagctggctggaagtgggtccatgcatgtgatggtgcctgcgtgcctgccgtgggtggtgtgttcccaagtgtggcaggtgccagggcacgtgtgcatatgtatgtgtgaacctgtgtgagttatgtggagctgtttccggggctgggtgtgctgtgcatgcaccagtgcagaattgcacccacaggcatgtgctccttacaactctgttaggtctctgtggcctctctgtggtttcctatgatggaaggcaaacagcagaccccagactctggacagtatgaggggctcaggctgcagagagggaaaacctctgtggctcagcaagaaggcctagccctggccagacatggtggctcacgtttgtgatcccaaaactttgggaggctgagggaggaggatcgattgagaccaggagttcgataccagcctgtgcaaactagaaaggccctgtctctacaaaaaaaaatacaaatttagccaggcgtagtagcttatgcctgtagtgccaactacttgggaggctgaggaggatcatttgagcccaggaggtcaaggctgtagtgagctgtgtgtttgcaccactgcactccagtctgggtgacagagtgagaccctgtctggaaaaaaaagatgtccagtctcctcctgtccaaggagaccaccaaccatgcttcctgcaagcttgaagtgggccaactctttttaggatctgatctgaatcccagagggaccacatctcctcccacggaccagggctaggcagcctcctgtttcagtcaagagggctgaaggtggtgttttccctcctgactcctgggagcagcaaggggccaatgggcggtggccagggatgtgcacgagaccattcctgcctgccaggggcctcattacaggctacagagacccttctcagcccttgactcatgtggatcggaacagctccattccacagctgagaaaaccaaggttcaggaaggggtgagacccacccaagggagtagccagtactgaactgtgagcccagcccagagccaggaaggaagacactaggactgagctagcagtggctgcctggcggcagggcctcgggggtaggacgtgaaggtcagcctggccagctagtggtgagcatcacccagcaagggcatgtggggtgtaaactgtaaagcacctgatttattgtaaaggacccaggggcttcctgctggtgactgagtgcaggagggtggctgtggaggggtcagtgcccacaggcaacggagggtctaaggggcttcaaccttgggcactcctcccctccccgtgaggagcctacaccctgggctgagctgggagagcctgcgcctgaaagttagcccctaaggcttcctcctcatcttatgtaactgcttttattcctggggaaaatcaagagcctgggaaccccacaaatctcccgtgacatctgggacagtttgaagattatgataaggatttcggagcctgggaaaataaggcctgtggactaggggtttgcggggctccccaggagcagcatgtgtgtggagcacatgcagaggcccgggcctgggcaaacaggtatgtgaacaggtgtacacactccagagccactcacagaaacacacacacacatacttaggcacaattccaaacacctgtgccttgtgaatgcatgcgcatcttccagcacaggtacacatggctgacaagcccccaggcagacactgtgcaaccagcattcatgtcctcccccagcctgggggcctgactggggttggtggctctcaaggctacctcagggctatgcctctgcctcccggaacaagctttcccaggcctccttcccagccttgtctctttcccgtctctccccccacaccttcttaccacaaggacagaggaggggcccttcctgtcagctggctgggagcagaggtggctttgtcttttcggaagaactggttctgtggaatttgtgcttatttcccatcaaggatcaaggacctgctctggggctacctcagggccccacaggatgaggggctggttttcagatgagttttctgcttgcctgtcatctggatagtgtctaaaaatttgcaaactgccttcttgtcagtgtcttgctcattcttcatgacactcctgatatgtaagtgccttcacttcctctatttggcagatgagggagctgaggccagagagggatgggactgcctggactgcctgaggtcacacagcaagctgaggcagggttgaccaaaactctcatgagctggggttgcaaggaaaatgccttcagcttcctggggcttggggtaggagaatttggctgtcagagcctggagggtggggcaggctggcactaccaggtgggcctgccacagaaacacctcacactcctttaccaggagctgacggggggcacagccagcccctcacaggccagcactgtgctgggaggctcacccctgaacctacctttgtggacatgccaagagagggcaggagagggagctctgccttgctgtgtgacccaggcaagtcccgaccctctctgggtccagcgccctctcgcctactgggatattgggattggggattggttgagggatgtgctccctctctggaccacagaggaagcagagagcttccccagggctgggagtggggcacaagctcgggatgctccctgccaaagcgttggtggccctgagttgctgcctgtgcccagggagtcccagtcttcgcactagcctgctgctgagatccactgaggcagagcctggcacagagtgggggcttggggcctgggggagggtctcctccaggctaggtggctgggagagggtgatctggcaaatctagatggggcctgtccacctgtccgaggctgcagccccctagctctccgccccttaccctcctttatgtttctatatcgctgctcttatcactatctggcctgctatatatttactcattaaccaaaagaaactaatctcccctgctagactacaggtgtctcaagggcaggactttgttttttgacctcaagtgcgttgaacattacccgaacagagtaggtggccaataagtacctgtaagaaagaagaggaggaggaggaagcaggagagtcatcttacagacggggagggcccaccatgggcccaggtagagccgcccgggctgccttctcctcatcaagcccaagctcaaggatggattggcgctggggaggggaggattgcctggggtcagcctttcccccccggcatcaccctccatcttcggtgctgtagcaggacgagccgcggacaaaacccttcagacactgagatagtgaagggagtggctttaatcagctgggagcatcggcaggctagcatcttaaaatctgagctcgtcaggtgctcaacttctgtcccttttaagggctcacagctctaagggggtccacgtgagagggtcgtgatcaactgaacaagccagggggtacatgatagggactgcgagcaccggtggtcagagtgaaacagaacagaacgggaggtttcacaatgtccttccatacaatctctggaatctatagataacaacagctgctaggtcaggggtcgaattttaactaccaggcttaggtcaggcaggcccaggcctggtttcgggtctggttccttggtttcgggtctggttccttggtttcaggtctggtttttaggcgccgggctacctgcctttagtttcgcttctctttccttttccgagtataaaacagtatgagagggtctctctcctccctcagtgccatcctcatccctgggtgggagttgtctggatccatagggttggagccacagataacagagccattaatctcggggtctcagcctctcttaacggaccttccaggcactgctgagaaaaccaggttaatggtttcctgcggcagcaatgagcagaagcagggccatctccagactccagagaagccaggagagggctggggtgataatggggaggaggataaaaaacagccacccaatgcgtgccttccctgtgccaggcccttgtcctgaaatgttatctcactccatcctcccaacagtcccttgggctaaattggtgatgctgcttgtttgagtgagcaaacagagggtgaatgaagtgacttgcgggcagctgggtagaggatgagtcagcattggtgtaaaggactggagcttcagggttctcgggattcgagtcctggccctgctgcttgccagctctgtgctgtggcaagttacttcctctccccaggtctctcggtttcctcatctgctgcctctccagacttctgccagaacattgcacgcgacagtttcaggcacagaactgactggcagcaggggctgctccacgagtgggaatttgctccagcacttcacggactgcaagcgaggcacttgctaactcttgggtgagttttctgggtccatgcctggaagggcttgcgcccctcagctcccctaggagcttcctgagtaactgcagtccacttgcagccaccgaggctcatcacaggcaagagtggcagtagggcaggcactggggtcctcctccttcctccgcctggctatgcctggagcctgcagactgcacagcatggagggacgaggcaccgcaggacggggtcagtgggggcggggaggagatggacacattggtgctgcgccgtgccttgctggagaagtggaatagctcagtcaggattcggagccacaaaggtcttggttggagtgcaaatggctggcaagggcacttttcctctctgggcctcaatttcttactctctaaaatgggggcaaccgtggtctctccctgcgtatgtgaacactgctaagtgtagtatctggagaggggtcctcacggaggaggctgggccctgccctcagagctccccaggaactttggttgagggaatgagtaggaaggattagtgatcaaataattgtccacagaggaggcccttgggaagcctctcacctctgccattccagctaaatcttaagacagcctggagctggccccgtgagagtggtttggaaaaaaaaaaaaaaaaagtccctgagtccaggtgtgacttgttaagggtgaaagggcctatctgggagagctgggttaaaacttttccagagtttctattgccattcagctctgctgacaccgacacagagaaaacaggcagcccagcccatgcgttcagccccggcctcttgaagatatttgggactctcatctcttgccagctctagaatgggtcatattcagg

SEQ ID NO: 5399 - DNA, 6000 bp, Homo sapiens; identical to SEQ ID NO: 3609

SEQ ID NO: 5400 - DNA, 6000 bp, Homo sapiens
caaaatggcaaaaccctgtctctattgaaaatacaaaaattagccaggtgtggtggtgcgcacctgcagtctcagctactgaggaggctgaggcacgagactcacttgaacccaggaggcagaggttgcagtgagccgagatcgcgccgttgcattccagcctgggaaacaaagcaagacactgtctcaaaaaaacaaaaaccaaagaataaagaaaacagtgattaaacttgagcttctagaagtccttattcatctgatgatccagatggagtattgttcaggtaacattttcaccacctcccatctctagacatggggtaccgtttcctctagacgggaggctctcaacaccctcccctcagatctccttgtctgccaggccttcctccttcattcccaaacctggtgtttccaattgattcaaattgggagttaatggaaggaagacatcctcttcttccctgcattagtcagggctctccggagcaacagaaatagtaggagatatatacatatacaaagagatttattttaagggattggcttatatgattgagggggctggcaagtctaaaatctgcagagcaagctggaaactctcaggctggggctgaggctacagttcaatccacaggcagaatttcttccttctcagggaaacctgttttgcttgttagacccttcaactgattggtgaggcccaccaattatcaaagataatttcctttacttaacttcaaatgattgtataggtcaaccaaatctacacaatatttttacagcaacacctagattagtgtgttagattgagtaactggggactatagcctagccaggttgacacataaaactaaccattacacttcctggctggagtgcagtggtgcattccatctcctgagctcaagcgatcctaccacctcagcctccttcgtagctgggaccacaggtgcataccaccacgccctagccttaaaaaaaattagaaaaatattttattagttttaaaaactttttacatctcaacaacaaaagccaaataacccaattaaaaaatggacaaaagattagaataaacatttccccaaagaaggtatacaaatgtctaataagcacatgaaaagataaccaacattgccaggcgcggtggctcacgcctgtaatcccagcactttgggaggccgaggtgggcggatcacaaggttaggagttcgagaccatcctggctaacatggtgaaaccccatctctattaaaaaatacaaaaaattagccgggcgcgatggcgggcgcctgtagtcccaactactcaggaggctgaggcaggagaatggcgtgaacccaggaggcggagcttgcagtgagctgagatcgcaccactgcacttcagcctgggctgaacagagcgagactccgtctcaaaaaaaaaaaaaacaagataaccaacatcattcgtcattagggtaatgcaaataaaaaacacaaggagtgaatacttaagacagacaataacaagtgttggctaggacatagaaatatcggaactcttagaggttgttgatgggcgtgtaaaatggtgcaatcactttgaaaataatttgacagttcctcagaatgttaaacgtagagttaccacatgacccagaaatttcacacccaagagaaaataaagcatatatatgtccacacaaaaatgtgtacacaaatgttcacagcagtattataatagctaaagagtagaaatcacccaaatatctatcaaccaatgaatagataaataaaacacgatatatccataaaatagaatattattcatcagtaagaaggaatgggccaggcgcagtggctcaggcctgtaatcctagcagtttgggaagctgaggaaggagggctgcttgagcctaggagatggagacaagcctgggcaacatagcgagactcggtctctgccaaaaatacaaaaattagccaggtgtgatagcatgtgcctgtagtcccagctacttgggaggctgaggtgggaggattgcttgagccagagaggttgaggctacagtgagatcgcaccattgcactccagcctgggtgacagagtaagaccttgtctgaaaacaaaaacaaaaacaaaaacaaaaaacaaggaatgaaatactgataacatgctacaacctggataaactttgaaaacattatgctaagtgaaagaagccagtcacaaagggtcacacattgcatgattccatttattttttaaaactatttatttatttagaaacaaggtctcactctgtcactgagtctggagtacagcagtgcagtaacagctcactataacctcaaactcctggcctcaagagatcctcctgccttcacctcccaaatcactgggattataggtgtgagccaactgcgcctggcccatgattccatttatatgaaatggccagaataggcaaatctgtacagaaagaaagcagattaattttgccagggacttggggggaagacagattgggagtaactgctaaagactatagggtttcttttcttttctttttttttttttttttgagatggagactcgctctgtagccaggctggagtgcaatggtgtgatctcggctcactgtaacctctgcttctcgggttcaagtgattctcctgcctcagcctcctgagtagctgggattacaggtgcgcgccaccacgcccagctaatttttgcatttttagtagagacagggtctcaccatgttggacaggctggtctcgaactcctgacctcaggtgatccgccacccttggcctcccaaagtgctggaattacaggcgtgaactaccatgtctggcctagggtttctttttagggtgataaaaatgttctgaaggccaggtgcggtggctcacacctgtaatcccagcactttgggaggccgaggcgggcagatcacgagctcaagagatcgagaccatcctggccaacatggtgaaactccatctctaaaaatacaaaaattagctgggcatggtggtgcacgcttgtagtcctagctactcgggaggctgaggcaggagaatcacttgaacctgtgaggcggaggttgcagtgagccgagatcacaccactgcactccagcctggtgacagggcaagactccatcaaaaaaaaaaaaaaaaatacccactgaattttttactttaaaagggtgaattttatggtaggtgaattacatctcactaaaattatcactttggccgggcgcagtggctcacgcctgtaatcccgctctcagggaggcaagaggcgggaggatagcttgagcccaggagttcgagacctgcctgggcaatatggcgagaccccgttctccagaaaaaggaaaaaaaaaaaaagacaaaaaaaagcgtaaaattatcactttaaagtgttttcttttctttttttttttttttttttttgagacggagtttagctcttgttgtccaggttggagtgcagtggtgaaatctcggctcaccacaatctctgcctcccggttcaagcaattctcccgcctcagcctccctagtagctgggattacaggcatgtgccaccacacccagctaattttgtatttttagtagagatggggtttctccatattggtcaggctggtctcgaactcccgatctcaggtgatctgcccgccttggcctcccaaagtgctgggattacaggcatgagccacagcgcccggccatttaaaatgttttcataagcacttttacttttgctcaaattgcatcttgatataaacttcaagttttttaaaataaagataatataaattattctcattatattatactctctagaaaatgtaagtagtaaatttgaatttgatgagccagtccactatttcctaaacaatgtattatctgtgggctgttcattcaccagggacacttgaaatggcaaaatcttttcctctctgccaatggttctgtgcaccatagccacaaagaaatgtaaaagttacttgttggcttattagtctcaataagttttagttgattgaacaaacaaagtctctcacagccaggactgctgcggctggaattcctgacatactgtcatacctctcactcgtcaatctacactctcctcccatctacacagctctggaaattaaaaacaatccaaccatgactatcatggcttcagaggtctatgaactcccaggaattatacgcagattttttcctgaggacagtctacacttccttattggcttctcaaagagggtcactgaccagcttttagagacatgggccaagtccggctacgtttagattcggtagtagtgtctgtggttttagtttgccacgtcctttcctctttttttcgtcatagtgcccgctctttgggaggtaggggagagtcttcccctgaagtctccactgctgctggagaaccttcctttttcatctggttgctaaatccagagaatgaaatctaggagatgattgcaccgtccccgcccctcaacatgaaggatgccccactgcccatcggggaggggagcagggagagctggagagaggctgggtcggggcaggacccaggcgcagatcctccgaggccagctgcagccctacctacctgccttcccgtctttcccctcccttcttttctccttctgtctttccttccttccatatctctttccttgcctctttccccctcccactgcttcctttcttccttccactgtggaggtggaaaatttagctaggagaagctgggactgggacgttccaggaaccagacagagagtgagttaaaggcacagagatgaaaacgcggtatgggagagctggttcttgagtcggctaagaggggatgaactcaatggttaataggattggccatggcgaatccctcagcagggcacgcaccgcacaaagggccgaggagcgagggtagctcgaggtcaggattacagagactcaggagcaagagaggaaggcttaaagagccagactgcgcagccaggactggggtgatgggcgctgtcctgccaggccaaagaatgaagatgtagccccgcccccaacctagggaggaggaccagcccggttcctgtcctgcccccgcaacctcgccccgattccactccgggaacctcggcgatgctgagccaagaccacttctgaatcagggatgacttgtctagtgaacctagggtcagagccatcagttggaaaggctgggaggagcctggagaaagagggcgaccttccttgggatctgtgcgctccctccttgcctccccctccagcctcccacttggtagcaccttcctgatccccttatctctaaggcgctcagggaaatgccccgctgcgggagccttctgggaaatgctgccctggccacccaggaaccatgagccctgcagccccggtaaggaagagttctctgggacaggaggaagggcccagggcagggtgggcacccttgccacataggggacgggacagaagtcttttaggccctgacatcctctggtctctgaatgacatcctgtggctgctggtaggtgagggtttgcggggctgagctattgaaggaaatgatcacagtccgaggtgatagatacagaaagtcttcctttctccaggtgggctcccgccagtccattcttcactgtgccctagaggggcctttccgaccccctaatcacacacctcactcctcatcttgaaactcccacccccagctccagtcactgcgtcctaacatccaagctctccgcctgtcatgcaaggcctctgtgctatttctttccaaaccctgcagctctatcgcctgacactcccgatgccctccccacccctgcgctttatgttctagacacacggaaatgctgggcactcttcaacatcctgacagtattcataggggaaatttcgggtcgcctaggaaactgcccctcatcctccaaggcccctttc

SEQ ID NO: 5401 - DNA, 6000 bp, Homo sapiens
caggcccttggatatggctgaagtcagtactgattggtcttatcctgttacatagagttctgttgatagtacctttaattaaatgtaataaaatactttgaatggacctggttccagtttctgtcagtttaattagagtgacaggtggagtggcatacttatgggagaattcatcaaaagccaagatggcatagaaatgaaaggtgcatatcgttgggagacaattcttcatgggtctctagcatttctgcatattttgcaaagagaggcactgactatctttgttccagactatttgtccaggaatgtttgtatagtaaacaaccttagaaggtatcagagcaaagggcgcacatgctcactgcccattattgaagattcaggttccctaacctcaaagttcctctcctttaaggcacttcattacatgtgcaggtatcatctggctctctgcgtcatcatatgggaattggggctcagaactggaacaaatgctggtactctggctactgctattgctgtaagtaacaaactatcctttttacaggtagtaacaggctatcttgttagcttgcaggtaagataaaaatctcagacccttcacaattcttgacagccccactcctacttctgcctgtcccatatcttggaagctccctaacttctgtaacaggaagttcccccgatattcctgtgccatcttacttgatcgcattacttaatacccttctgcatccctcttccttcaaacttttatataattctgctctgctaatacgggtgccaggcctgatcccctcgctttagttgctcacagtctgctgagagtgtcagacacttagacaatctgaacacagtagaaggaggtgcaaagtgctatgggggcttgaaaaggagtatttgttctagtatggaggtctgggaggtcctcatacaggaagtgaaaactgaaccatgagtgaggagttgggccattttacagatgaggaacctgaggcacagaagttaaataagttgccgagatcactcagctaggaagtgggaagagaggattggagccaggattctctacctctaaatatagaaattgctctttaacttcactttctcaggcataagatgagaccatctgagtttacctcaaagaattgagaaagatttggtattagctttgggtctataaaatttgagatccacagagttggtgattgtgaacttggagaagtctgataaagaaccccaggacatgacccggtttttataaaggaaatatttcagacaaataaggcttaaagaataataagatgaatatttgtgaacctactgccattaaaaatatatatattaccaatacagttgaagtcctcagggtatccttaatcatatcttacttcctgcactttcagaagttactactacctggaatgtggtgtttattattcgtaagcattttcttcatacatatgtgtccattatatatatggatatatacagatatatagagacatatatggttattttttaattttatttttacctccttgggagctcttatacaatatatatggttattgttttacctgtttttaaactttatatgtggtttttgattgagagtctcccaaacaacccctgtgttcaggtatttgctagaaggacccacgcgactcagcatatatgactaagatttattcttcgataaaataaggacacatctggatcataagggaaaaggacactggcagagtctggaggaatccatttgcaggcttccttatgctcttcctcccatgagggattgcaaagagcccactttgccccaacaacaaaaatgcagcaacacgtgtgtaatgtttctgtccagggagcccattagagagtacccacagtttattgaggtttggtcatgtgggcaccatctgcctagcacataataaagactcctagaaagcaagcaggtatccaccataaatcatactgcaatcaaacagtctacatagtcaactacccttttcagttaactggtgactgggaacactttgagagccaagtttccagacacctgtcaaaaaacaccaaccttgcaagcaggccttcctaaggataacctgttaggcctgctatggtaaatctgcacaagtaccattctctctgtattgtgcaacttgcttttttgttcaatattttgtttgtgaagataatttagattgatacctgtagctacaatttattctatttcactgctgtatactgttaaacatgacagtttatttaccctattaatggacatttaggtcttttataatttttcactattaaacatttgctgctatgagcattcttgtatggacacatctaatacaggtagtgggattccttggtgggagaggatatacatttttacttttctaggtattgctaaattttcctctaaagcgactgtaccaatttacattccttctattaatgaaggaaatacaagattggaataattgggatagttgtgttatctttgtgaatagattttaaaatactgatttagatttttaaatagttgtaagacttcacattttccatatcttagtttggtaactttttctaaaactgtattaactttatctagattttcaaacttaaggaataaagtttgtttaatatttatttctcatctctgttgtatccctgcatatagtctccttttcattaatatcatttataacttttaaaaatgagtcttgccagagggtttgtccggtttattagatatgtcaagactaatatttgcttttgtcagtcccctctattgtactttgcttcttgtttcatttattctgttcttattttcatcatttccttttctacctttttgggatttattctgttcttccttttctacattcttaagttagatccttaactcattactgttttgttgttcttatctcctggtatagggtctttatttgagttctcccagaggcaagttctgagaccaggacctgagggcaatagtatatgtgagagatgcagggagtgccataatgaggtgggaaagtaggaagggaagaaaaggtgagcaataagggtgtagcttttagtagctattgataattgctgtctagattcattaaattcattttgtcattaaaggacaaaatgatgaaattctatcattcatttggcattggtcagttaattattttatgaaggagaacttttccccatcaactatttagttacccagaaatagggtttgtacaggaaaggcagaataaaaagctgctttccttagcaaactctgaggtgaccaaagtgacatttttctccatatgtcgatatgaactttctttgcagtccttgttctttttgatgttctaatttttccatatttggccagtggaatcaccttcaaattgattcttaccttcttttgacatgacctgaaatagtcttttatggctttcttgctttctgttaagatgttctaggctaatcttataaattttcttccctgcacctaaaatcagccatttttttcatggaaccctggttcctttggggacaaaatagtattttaagacccattattgccaggcgcggtggctcacgcctgtaatcccagcactttggtaggccgaggcgggcggatcacgaggtcaggagatcgagatcatcctggctaacatggtgaaaccccgtctctataaaaaatacaaaaaattagccgggcgtggtggtgggcgcctgtagtcccagctactcgggaggctgaggcaggagaatggcgtgaacccgggaggcggagcttgcagtgagccaagatgacgccactgcactccagcctgggcggcagagacacactccatctcaaaaaataaaaataaaaataaaaaagacccattatttgggcttattacgatgagttggtctctggttctaggcctttttttttttcttttttttttttttttttttagaaaaatacagcaggttgtattgaggttggcacctatgttctttcaaagaaccctcatcattttgtgagttctttccttgtggcaccacgatgttccaggctcatcttgtatgttccctgcctcagcacaggattttttttaatgagaaaaatatcacgaattcaaatttacagaagctttacatttttatgtcctctaagttagcagtctgtctttccttttattggcgtttgtaaaatttcttctttttaaaattgttatattttagagacagggtctcgctctgtcacccaggctggagtgcagtggtgcaatcacagctcaccacagcctccaactcctgggctcaaggcatcctcccacgtaggccttccaaagcgctgagattgtaggcataagccaccaggcccagcctattacctttacgttgtacttagtcccagataaaaaatgaccttagatcagtcctttcctctttggctggggagaggggggcttaaattccggtactgtgaaacagaagaatggactcagtgctatgtgacaaatctatgtatgtaaatgtgtgtatatacacacacataaattatatatatgaatatattttcattttcatattttgcaaggagagtagccaatgctctggacctctggtcctttttgtagggtaccctctgaggccgggaacctttgctcaactctcaggctgtccagggaagctttaggcggtgataccgagctacagaccaatataagagctcggggctgtggcactgaagagaggaggcggccgttgggaactgaggtgggcccagggcttgagctgagttggcgagggtggaggtggtgccggtcccacgccgtggtggggaccgagctgcgggctggagggaggggcagcgccgagggggcgggacggggagggctcgcggagtaggccaacggttggccccaaccgccactgactacagcctgcgcccgcctcttttcgttgccgttacctgtttccggcagtcgacacgctcttcgcttctcggggcttgtctccgtgtcctccgtctcagttgtttctccctctctatcctcctctgtctcagtctccccagccttggggccggtgcctcttccgggcttcggcgaatgagacctgcggacctgcccccgcgccccatggaagaatccccggcgtccagctctgccccgacagagacggaggagccggggtccagtgcaggtgagcggggttgggagacaggagagctccccgaggaggactcaactgtggggacaggttgagcaagaccatctgcgtttgggaaatccagccttggattattgagacagagccacctagtcggctaggatctgacctggccagagaattcttggctagtcctatttttattcgttctcacagaagccgaacttaaacctcagaattatcactccagagatgaaagggaactgagactggaaaagccctgcttaccaaaggtctctgggcggcagaaagagccctgagcttcagtttcaacttaggagacctgggtcttggtccagattttactgtggagtggcgttcagtaagctttgtccccatcccgggcccgagttttcccatctataccatgagagggtttagactacagatcttcaaaggtctggcacgtggtaggtgctccttaaatattacttgttaggagtgaataaatgagataggaaggcctcctgggattcactggaggctcattgggttagttggaggctgtggaattacattattatagtctgagaagtaggcggtattatctccattttataagtgaggaaactgaagctcagaagtaaagtgacttgctagtaagtgtcaaagataagtcagacttcagagtccatgctaggctatactctctcccagtaagaaagcgggaaggacttgatgggaaagtgattatatcgagcagcaagtaatcatttgaattctctgcttaaatgaaccccagagcaggcccatatctgatta

SEQ ID NO: 5402 - DNA, 6000 bp, Homo sapiens
actttgtgtttggagcactacagcttcatgatccgagtgagatgggataacatggaccccttaaggggtcaatttaagcagagagagagattagctgggaccacatggagggaacagagcatggccttgagccatagctgcctatctctgagcctctggctccttgttttaggcatagagagactctccctccaggccctagttgctattttttaggtcatcctgggtctagatggggtagccagggttacaactgggaacaggaagtctcagctcagggtccctgactgagctgggaaaccaccagaaagtttgcctggcccctccgcaaacctgccagatctccttcaagaaacaacagctggagtctcacaaagctggacctcaagcatgctattgtcctcccagcagaccacccaaggtcctgctgggaggaatttcccaaatatgacagccaagcccaatgcctggagacatgcccccttcctgcctttgactctctctcctccagaatgctgggccaggccgaacaaggaactggagcattcagggcccttatgctgcccccatcccaactcatgcacaccaccgcagtccccacccacagaccccgtgctccagccttctcttccccttcatttagtttagttcaattcaacaatcttgttcttttattgagacggagtttcactcttgttgcctaggctggagtgcaatggcacaatctcggctcactgcaccctcggcctcccagattccagcaattctcatacctcaacctcccaagtagcggggattacaggcacatgccaccatgcccggctaattttggtatttttagtagagacagagtttcaccatgttggccaggctggtttcgagctcctgacctcaggtgatccgcctgcttcagcctcccaaagtgctgagattacaggtgtgagccaccacgaggccaggcgtgagccaggcctcgaaagataagtggtttgctggggaagaagaacactccacgctgagggggtacagctggtacaaaggctttgaggtggaaaagaacatgatgaatttggggaatggcaagaatctattggagccagggaataatgctcactagggtggggggtacgtgggatgggactggcttccactagccttgacctccttgggactgagcctgtactcacggtttgcagacgcagctgggagttggggaggggctaaccattgttgaggaccacagtataccaggcataggacattttcctttaatcctaataaaaacactgggagatagacactgctcactcacttacagagaagaaaacaggcttagagaggctaaatcagatgtcttaggtcacatagctacgatatgacaaaacaaatatttgaatccaaagtcttctcacccagaggctttcagcagggaactaacatgatccaccaggactgggggagtacaagacaacctctgccctgggggagtttattgcctagtcaggcagataagagggaaacataagtaatgcaagagagtgaccggcagaaattggcctgggagtggggttttatggagggagagatgagagatgagctgggctgcaggagcttggcagggggatctgcaggcccagggaaccccaagcaactttaggaggtaggaagggcccaaggcaggggcttgtggccttgaagttgtctgcctcccaccccaacacctctggagggaggtgtctgccattatcatgaggaatggattgcccagcatctgctgctgatgttaccagaaaggggtctggatccagaccccaagagagggctcttggatctcgtgcaagaaagaattcagtgtgagtctgtaaagtgaaagcaagtttattaggaaagtaaaggaataaaagaatggctactccataggcagagcagccccgagggctgcttattgcccatttttatggttatttcatgatgatatgctaaacaaggggtggattattcatgcctcccttttagaccatatagggtaacttcctgacattgccatggcatttgtaaactgtcatggtgctggtgggagtgtagcagtgaggacaaccagagggcattctcatcgccatcttggcattggtgggatttagccggcttctttactgcaagctgttttatcagcaaggtcattatgatctgtaccctgtgctgacctcctatctcattctgtgacctggaatgcctaactctttgggaatgcagctcagtaggtctcaaccttattttacccaatccctactcaagatgaagatggagatggagatgggtaagaatctcaattcaatggttttgaattttgtggggagagagtctgagaatctgatggccacagcctcttcccttgaagggctgatccatctttcaggaagtttctctaaagaacaatcaaaccatttgctttggacggacagtctaggaagaggaaaaatattgctaatgaagacagtgaaatagcaaataccatcatgtgaatgttgacggtaaggtacagtttgagttttttagctgtcaggctgaatgtggggatagatggctttcatcctcaggagatgctttctgcaccaggaaggagggattacagtctctgcatggtagctgggggcttcaagcctgtatcactgcctcctagcccagagagggagagagatgatccagagatggatgaatggcgatgtcaggatggaggggtttacctggaggaagaccaggtgtgtatggaaggggatggatccagctgggcccgattgcctcagatgtgcttgaatatttatcaggaaaagagagcaagggccacctatatgccaggccagctgccccaaaggccttacctctttgaggtcgtatagaggagaagagatttcttgtcctcactctttgctaggctggtggctgaggtccctataacaaaagacagcttaacaggagaaaagcatacaaatttatttggcttttaaaaatttaatttacttattattatttttacatagagatggggtatcaccatgtcacccaggctactctggaactactgggcttggtaattctcccacctcggcctcccaaagtgttggaattacaggcgtgagccactgcgcctggcccaaatttatttaatataagttttacatgacacaggggccttcagaaatgaagacccaaagaaatgggaaaacgtgtgtattcttaaactttttagtttttattatattgaattaaattaaattatttatttatttattttttgagacagggtctcacgctgtcgcccaggctggagtgcagtggcatgatctcggctcactgcaacctctgactcccaggctcaagtgatcctcttgcctcggcctcccgagtagctgggattacaggcatgcaccaccacacctggctaattttttgcatttgtagtacagatgaggtttcaccatgttgcccaggctggtttattattttttaatcatctagcctaaaatgtcaaaaacttgtgactttttatgccaagtttgatgaagaagtatatagttgtggaagtattgcacaaagagtgtgtgagctaatggtgatacacttaggggaacctagcaaggcctgtttgttcagattcttctctgtgtccttgcatcttcaaagttaaggctgttttttttttctccaggtacaaagacagcaactctcaaatgagaatcttatgacctatttcagggtgaaaggtgggagaaggtcagagtggggtgactatcctaggttttatgacctgcttctactgttttctcaaatgtggccaaggtgccatatttggagaatagtgtgtcctgaattccatcagtaaatactgttatattcaccttacaaatggggaaactgaggctcagaaagctcagggatgtgcccaggctcacacagtgggcttgtagcacatctgggattccaacccaggtctgaggccttaaagcctattctcagcctcacatttccctgagatctgtcctttgctgctgggaggcagccaaaggaggcagaatcctgggcctttcccacagagaacaggtaaaggaaggcggtccttgcagtcaggctggtctctgaaaccttgctcctcatcacccagactcaggtggtgtggagaaggctgactctacccatgaagggcagccccttgaagggtgagtctctgactgaccagatacctgggaaacgaagtttgtggctgacagactttcaggaacttgtctgactgtcttatgaggagctgcaggcaggtggctgactgacggcctgaacggacagctctcctgaaagacagtagcccgccggctggctggcttaccagcaggtggacacgatgtgcctgcatgagtgatcagccaagtgaccgactgacagtcagacacacagacccattgcgggccagctcgggctgtgggtccctagcccctggagccacctggcctacctgggaccccaaaacttagctgcccacctgggagagagagggactgggttttttaaactagggcctggctctctgccccaggtcccttcattcccgcaggcaaccgcctgcccagcccaggttcagtcccatggccgtcccatcctcctgtcaggggtggcccctgacaaaggccccacagcacagggcagggtctcagtgcccttccacaggaggacacgcagtcctggactggaccatccttccaaggggagttccgccctgagtcagggaggcgaaggtttgctgtcagcgcgtcagcagagaccccagcccacaggaaaggctcggagggggtgggcagcctgcctgacaagccccattcagtgaccagctgacccccaatacatgactcgtgctcctctcagaacccggaggaatgtggccagtgcttccctcccctgcccagaggcacaggctgtggactttgccctccacaaacagccatatctctaaaggataaagtactcccaggaaggctttgagccttggcagaaaaggctgggattgaagcttcagggagagccagaggtgaggctggagtgggagatcacctgaggcaggtgagcaggctccatgagtgggcaggtgagaggccagggggctggaactggggctagacaggctggggcacagcaaggatgccaccagtatacccaggaagctaagtggagggtccagggtctggcctggaggcgggggcctcacattctgagctggcccacaggcttccacccctctcccccatccattccttgggtttccttcagagctggggctccaggtcaaggacttctgctcccagcctcagctcccgctctctcacctggttggcttggccccttggtggactggcactgctacctatgaagtgacttggctaggtttgggtgggccaagacagagaaaagcactgtgcttcttccccctgtcaaacttgtacaaggagcattgagtgatgttgagtttaacacttacctgggcttgagtcctgggaccaatgctaaccagcaaagctagttcctctgagcctgggtgtccttatcagaagcatagagataataagacaccaaagggacggagctgtggagagggttcatgggccagtgcacagaaagcctgtggcatggagcccagactacagcaggaaacccactgcggctggtgagaggagctgaggctcagaaatggtcccctccacctcctctgggagcctttgctttgaactgccttatttcctccttgcctttaaagtgactcccactgagtgtcccatgacactcctcttccctaggccaatttcccgtctcctcgtcaggtgtcagttttgtttcaacagttccttgcttcctctgagtgtttatgccccgcagagggactcctccctagccacacgcacttccatttcctcagccaaattcctcaacctgtttgtatagacatttctccaaagcaag

SEQ ID NO: 5403 - DNA, 6000 bp, Homo sapiens
tttcctaataactcaggacctacttgtttaggaataaaccatcctagccatgacagatcagatgaaacctgagaccacaaactcattttcttctaaaatgctttttccaaaagatttttaaaaagaaaagtgggaaatgtgaaaggaaaatatcttatgcccccaaaaatcaatacgctaaagggaaaagtcaagctggaaactgcttagggcaaatctgcctcccattctattcaaagtcacccctctgctcactgagataaaaacatatctgactgcctcttttgaggaggctaatcagaaacttaaaacaatgcaaccatttttttcttacgtacctatgacctggaagcccccttcctgcttcaagatgtcatgcctttccagactgaaccaacgttcttcttacatatattgattgatgtctcatgacttcctaaaatgtataaaaccaaattgtgctgtgaccacctcaggtaaatgtcatcaggaccttctgaggctgtgtcataggcacgcatcctcaaccttggcgaaataaactttctaaattaactgagacatgtctcagatttttggagtacacatctgataaaacacaatgagaaaaatatggcatcacttctgtgatattcctgctaaagatgcataccctgtaaggctgcattgagccgcgatcacgcccctgtactccagcctgggcaacacagtgagactctgtctcaaaaaaagaaaaaaaaaaagacacttaacctgaaactagtatctaggaaacattaggcaaacccaaattcaaggagattttacaaaataactgatctgtaacctcaaaattgtccaggtgatgaaagtcaaggaagagctgaggaacttttctagattgaaggaaactcatgagacatgacactaaatgcaatgtgcaattctgaattggatccttttgctaagaagtacaatgttgcgacaactggcaaaacttgaatgggatctgaggagtagatggtagtaacaatgttaatttcctgattttgatagtcttattatggctatgtaggacacagatgtttaagaaaatacaccctaaaatgttctgagtaattgggcataatattaacaattaattttcaaatggttcaggaaaaaaaaattttgtactatacttgcaacttttctgaaagcctgagattatttcaaaataaaatacttttaaaatgcaattacttaaattcttcccatgtttcttcccacgtaaacgtcaagccaaaggacatggcttcagaagctctttttttttttttttgagatggagtctcaccatgttgcccaggctggagtttagtggtataatcttggctcgctgcaacctccacctcccgggttcaagctattctcttgcctcagcctcctgagtagctgggactacaggcatgtgccaacacgcctggctaatttttgtatttttagtagagacagggtttcaccatgttggccaggctggtctcaaactcctgacctcaggtgatccacccacctcggcctcccaaagtgctgggattacaggcgtgagccaccgcgcctggtgcagaagctcttaaatgctttatctcctcgcagatgttaacgaaatgcaattctgaattttggcaggggtttttttttttcttcatttcgctttgtcttgtctgaagcttcagggcaaaatccatgattattgaactatcgtctattttacctccatttttatatattaaaccttattaagcactactatgtgctgggccatgtactaaatctttttcaggcattatttcttttaaccttgatctcttgctacttcccccttcatactccagcctagagcacggggactcctctaggctttctctgtttgcaaaatgcagtgcctctgcctctcttctttctccctcttctctttaccccttaactcctatttattcttcaggtttcagctaggatgacacttcctccaaggagcctttccttaagtctgagtgggggcccctccctgtgcccaggcctttcttcttttaccattgtacttttacactatattttaattttgttttctcttctgttccctcttctatgctattcaagagcaaggactgtttttactgctgttttaccaaagctaacagaggtcttcgtccatgatgtcactctcaagagactttaattggtgatttcttgtttctgaaaataggaaggttgatttgatgcaaaatatccaatcagtagtaattaattatgttaattttgcccttgttctttaatttaaaaaatgtccaaagtccttttaatgacaatatgtattaccacgatactaaaatttcttaccaaagtccaaaacactggttttctacatgactcttccgggtaaaagtgaattatcagcagagcagtaaataaaatacattcacattaatcctcaagtgacttcaagtctaggggagcactgaaagggttacattcataggattgatttaaaggcaacttctttaaacagcagtgacttaaaagtaattctaattgccgggcgcggtggctcacgcctgtaatcccagcactttgggaggccgaggcgggcagatcacaaggtcaggagatcaagatcatcctggctaacacagtgaaacgccatctctgctaaaaaatacaaaaaaaaaaaaaaaaaaaaaaaaaaaaaaaaaaaaaaagccaggtgtggtggcaggcgcctgtagtcccagctactcgggaggctgaggcaggagaatggcgtgaacccgggagcagaagttgcagtgagctgagatcacgccattacactccagtctgggagacagagcgagactctgtcttaaaaaaataataataataaataattctaatttaaattctttctggccaggcaatcaacacaggaaagagaaaaggtcttgattttctactagtttgtgtcttgtgaaagaattttttttttttttagacgaagtctcactctgttgctcaaactggagtgcagtggcactgtcttggctcactgcaacctccacctcccgggttcaagggattctcttgcctcagcctcccgagtagctgggactacatgtgcgcaccaccatgcccagctaatttttgtatttctagtagagacggggtttcactatgttggccaggctggtcttgaactcctgacctcgttatccgcctgcctcggactcccaaagtgctgcacctacaatgggccaccccaggggacaagctgttgggactggaatgcggtggcaagagccgtgcactctggctgctgaaacctgctgtttccactgtaagctaccacttagtgaatattttctacgtattgggaactgtactaagtggctttcatgttttgttttttgtttgtttgactggtttgttgttgttgttgttgttgttgttgttgtttttgagacggagtttcgctcttgttgcccaggctggagtacaatggcgcgatctaggctcaccacaacctctgcctcccgggttcaagcgattctcctgcatcatcctcccgagtagctgggatgacaggcatgcgccaccatgcccggctaattttgtatttttagtagagacgggggtttctcatgttggtcaggctagtctcgaactcccgacctccggtgatccgcccgcctcggcctcccaaagtgctgggattataggcgtgagccaccgcgcccagccgcgcccggtttttgttgttgtttttgtttctaaaaacagcgtctcgctctgtggcccaggcaggggtgcagtggcgcgatctcagctcactgcagcctggaactcctggggtcaagcggtcttcccacctaagcctctccgtgctgggactccggacgcgctccacctcacgcagccgtattcctgctttcaaagcagatggaagaggtgcgccaggacccccagttcttggaaacagacctctccagttacctgttgtttcctcttcacgaagagtgcatgtaacagtaagacacaactgtttcatattatacgtaaagagttcatgccaaaggttatagacagtcacatgctaaaactaggctacactttgaagaatcaccgctcaagttctggaaaaaagaggtgactgttgaacaacactgtgagggtaatcgatgccactgaaatatacacttaaattgattaaagtggcgaattttatctggcatatattaccaccatttttagaaatgttttttggcaggtgaagaaaagcaaggctccaggaggccctgcgcaccggtctacgcccactaactcacccgccccctgcgccgcgtctcccctctcaatttcagtcgcccattgataaaaacgaggtggctatgtgagatggccttcagcggtctttccagctccacggttttacagtgtggagcggggaaagaaaaactctaaggtcctcgctgcaaagcaaccatcagagctccgccgcgccgtgccgctcctctccgccccgtggtccgggtgtcaccgcccgcaggggcgcaagggccgcagcacgcgtgcgcagtgggcaccaagagcgctgcgtcgaccgcgccgcgccggccctccgccgccgcgcccgcctacaaggccctgagggagactgcggagggtgagtgcgcggtgggctcggctgaccgttggccctgcggccggcgccctaggctacctcccttcgcctccccgcgcctccccgcgcctccccgcctccccgcctccccgcctcctcggctctggttccaacaccccagcgccaagccggggaggcggggaggacttcttaagtgtgccgctcgggagcctcccgctcgtcccgccccgaggggcgtgaggaggggaggggctgcggacttcggactcgggcctggagaccgcctcctacccagagccggagcccgcaacccgctcaggcggcgacggagccatgtcgccgctgctggggctccggtccgagctgcaggacacctgcacctcgctgggactgatgctgtcggtggtgctgctcatggggctggcccgcgtagtcgcccggcagcagctgcacaggccggtggcccacgccttcgtcctggagtttctagccaccttccagctctgctgctgcacccacgagctgcaactgctgagcgaacagcaccccgcgcaccccacctggacgctgacgctcgtctacttcttctcgcttgtgcatggcctgactctggtgggcacgtccagcaacccgtgcggcgtgatgatgcagatgatgctggggggcatgtcccccgagacgggtgcggtgaggctattggctcagctggttagtgccctgtgcagcaggtactgcacaagcgccttgtggagcttgggtctgacccagtatcacgtcagcgagaggagcttcgcttgcaagaatcccatccgagtcgacttgctcaaagcggtcatcacagaggccgtctgctcctttctcttccacagcgctctgctgcacttccaggaagtccgaaccaagcttcgtatccacctgctggctgcactcatcacctttttggtctatgcaggtttgtcattctcaccaaatacttggcacttccagagcctctatgacatgaggctgtaagttctttactaaaatacatttgaaaccgtctatcccgctatgatgtaaatgctggtatccccgttattctaaccattttgcagcccgttcttaaccagtagggccgacacgtagagccttcatgcagtgctgctttgaacacccagagaaaggagccacctctgtgctgaaactgagatactgtgagatattgccaagggttcagatatcctacaaagggattgttttaatggtagaaaggaaagataacttattaactgcctctttcttcatgccaaggtggtatagatcgtttcggatactcttactgaaaaatgatcctggctttacaaagttcctttcgatttaaagca

SEQ ID NO: 5404 - DNA, 6000 bp, Homo sapiens
ttcctgacaaaggaaactgcctccacctatttgcacacagattagccattccaaccacacctgctcactgacgccctcagcatttcctggtaagtacacaatgtaggaagggactcaactgcctttttctctcttcaaggaaaaaaaattaaaacatacttagcaggccaatgttcagacacagaaatctcagagccaaccaagggtaacaacccatttgagggtagcctgaatctcagggagtttatgctgacagagcttggctccgcctagaaagctaggcagtcagaacctattctggggcttccataggaaatatcaaatctgtctctggtgagtaacactgggagagcctttaaaatgaactaggatggtcttattatcaaatgaactatatccttgagaaagaataaggaatgagttcgaattttaggaaccacagttggcctggttcttgctcccaaagaattctgtccaatataaaattttggaaccgaataggtcacttttggcatgttgtgagttcattgctcattcagtgtcataaattaagtcttgaattatggagctctcttctacactacttttgcaaccctcagggtccaaagacccttctccatgcccatctcatcttcatgctggcaactgaaagctagttctttctgtgcaatattttgtggaaactgagaggcctttaaatgcacaaagaatcatttgttaccaaatgtaaaagaatcatggactattcttccatgttcgaaatctaagatgattcagagttcatttagtccagcctcttcattgtaagaatagtaatatctccttccacatgggtagcagacatgtttttgcccacctagcatcctttccctctttttcaggtaacaccacctcattttttcttttgggtaacttctctccccgcactgttattcaagaataacagattattccacatctgttattcagatgggactgattctagctccagaggagggtctaaagagagtacccattccctgaccacagtgattgcttcaagaatgagcactcatcccaggtttggccaatgacagcagtctaatttgatatcatttctgatgcctgttgccaggactatgcttaatacatgtacaatattttccactgaaagcttaagggacatttcaaggtcatagcaagtcattcacatagccaagatctccggatgtcttctcattttgtagtggggaaagagataccaacagataatttcggtgatacattaagggcatacattcattcaacaaatattcactactagaaacctggttccgtggtgggtgttcaggatggaattatgaatgaaacagtcatgatctctggatgtcccatgatgttctgaaaggtgcagcatgtgtgagagtgcacaggagggccatgtaaactaccctggatatatgtttgtgggtatccagaaaggcttcccagagaaagaaaccagcctcctaaatctctctgaatctatcctcctttaattttcttcctcatcctcacagctactgtctcagttcaggccctctttatttcacatctgaattacagcaataactttccaactgcacaccaccacacccctactcttaccctatttttacccaactcactctttactaatgacagaatgattttttcttagaaacttttttctaaagtataatgtccacccataaaagtacatatgtaagcatacagtttgatgaacttccataaccaaacacacccattaaccagagcctacattaacagtcagcattccgcagcccccccgtgtccccatccatatactcaccctccttatacgtaataaaaataagaattcattttaaaaatgaatatcgcttccttcctttgttaaagccttccaaggactttctcgacagcctgcaggataaacaccatctccttcgccaaactataccctagtaattcctcgcctactgccccagtcttccctccctggcctctgcagtgctgctccctctgtggcaactaacacctcagccctcttcctctgcattgtaatgattcctaattattccaggagccacctcctcaaagccttccatgatcccttccctccccactatctgtttctctcgtagatttttgaaggtagaaaccgtgttttgcatttgtttcccaatttgttaaatgaacaagtgagtaaatttattaatttcccataactcctttcctccctttccttctcctctaccctaccaatggctcttttaaaataagaacaatccagtcccctgtgaatgtttgtgcatgtatgagatgcacaatgatcacgtatgaccttcaaccagcaatttgcgaagtcacgactggtttccattcatccagacacaccttactacctagtatcccctcctcccacatcaaataagggtatagtaggggcagtttgtggtctcaaccctaccgaggtaagagggcacaaagaaaattgatatgcatgagacctcgggcattcttcaggtaaaaagatggcttaattggaacattcggaggcttaagagaaaatcgggagtggtggaaggaagcaatcaagcagggtaatatttcccaaatgcctaccggccacgtgccagacacaatgttaggctctatctgtgatgtcttatttaactgaagagggagaagaatgtgaataaatggctggattcttgaattgcataaaaagagaagccaatacactttttcctttatttcgtttaaacaagtaatttgtgcatttatagctttttcttttaattaaaagtaagagtggaaaaaagtcactgaaatgtctaatttcaaataaaatatttgatttctaatttctgtttttcaaacaaacaaaaaaccccagaagcattatgaaaggttttactgtgcaggaggaaatgttactaggttgatgggcctagccagaacacctaacatcctccatctagtctccaaactgaggctgtggccctgcagagagcgccacccggaagccacttttatagaagcttttacacacaatgcttgatttttttttttttttttccgagacggagtctcgctttgtcgcccaggctggagtgcagtggcgcgatctgggctcactgcaagctccgcctcctgggttgacgccattctcctgcctcagcttcccgagtagctgggactacaggcgcccgccaccaagcctggctaatttttttttatttttagtggagacagagtttcaccgtgttagccaggatggtctcgatctcctgacctcgggatccgcccgcctcggcctcccaaagtgctgggagtataggcgtgagccaccgcgcctggcctatacttgatttttaatgaaaacattcttaaattcatatggctaacgcaaatttattttctgtaggcataacatcaaaaacacctggcaggattgccccattcccagcactgtctatttctcccctagtatcagtgggactccactgatgcacagctgtgatctactaaaacttctctcaaaactttctcctctccttaggtcagcagccccgcccctgatctatttggaaatcccctgaataaaagttgaatatcataaaccaaagcgaacacccagaaattcaaattcaacccgtaggtaaaaaatttctcaagtgactgtagacgtagatgtctccagtgtcgcctaataaggtagaagaggccagtgcgatactgtctttacacccttaacttgggtgctagaatatttatcttcgtcatcattttatcatccaaactattttgcataactttcatgggtgcagaaaatgttttttaagtgcttggtaaaattaatagtgatattcattcattcatctcactgaacaggcaataaattccttgacgacaagggccttgggggggtcacatcttcatctttggtttatgagtcctgtgcgtcttggtacaagcaatactactatgagccggcaagtcagacttatttggtaggggaccaaaggaaagaacatgttttgattgctaagaaaacattttgttctctatcctttactgggctggcaggcaaaggaaatgttcttatgagcactcacattgaaaacttaagttcttcaccaaatgcagagactctgaaggccacgccgctgcgggctgcctccacaattcgaccgtctcggcgggccacgagatcctggccacggatgcggtggccgcgcctctgctcgcacgttcccccggcctctggactccctccctccctcaatccctccctccggcgggcgtcgctggcgggtggctaggcccaacggcaggaagccgacgctatcctccgttccgcggcgccgggtccgccttccgtctgttctagggcctgctcctgcgcggcagctgctttagaaggtctcgagcctcctgtaccttcccagggatgaaccgggccttccctctggaaggcgagggttcgggccacagtgagcgagggccagggcggtgggcgcgcgcagagggaaaccggatcagttgagagagaatcaagagtagcggatgaggcgcttgtggggcgcggcccggaagccctcgggcgcgggctgggagaaggagtgggcggaggcgccgcaggaggctcccggggcctggtcgggccggctgggccccgggcgcagtggaagaaagggacgggcggtgcccggttgggcgtcctggccagctcaccttgccctggcggctcgccccgcccggcacttgggaggagcagggcagggcccgcggcctttgcattctgggaccgcccccttccattcccgggccagcggcgagcggcagcgacggctggagccgcagctacagcatgagagccggtgccgctcctccacgcctgcggacgcgtggcgagcggaggcagcgctgcctgttcgcgccatgggggcaccgtggggctcgccgacggcggcggcgggcgggcggcgcgggtggcgccgaggccgggggctgccatggaccgtctgtgtgctggcggccgccggcttgacgtgtacggcgctgatcacctacgcttgctgggggcagctgccgccgctgccctgggcgtcgccaaccccgtcgcgaccggtgggcgtgctgctgtggtgggagcccttcggggggcgcgatagcgccccgaggccgccccctgactgccggctgcgcttcaacatcagcggctgccgcctgctcaccgaccgcgcgtcctacggagaggctcaggccgtgcttttccaccaccgcgacctcgtgaaggggccccccgactggcccccgccctggggcatccaggcgcacactgccgaggaggtggatctgcgcgtgttggactacgaggaggcagcggcggcggcagaagccctggcgacctccagccccaggcccccgggccagcgctgggtttggatgaacttcgagtcgccctcgcactccccggggctgcgaagcctggcaagtaacctcttcaactggacgctctcctaccgggcggactcggacgtctttgtgccttatggctacctctaccccagaagccaccccggcgacccgccctcaggcctggccccgccactgtccaggaaacaggggctggtggcatgggtggtgagccactgggacgagcgccaggcccgggtccgctactaccaccaactgagccaacatgtgaccgtggacgtgttcggccggggcgggccggggcagccggtgcccgaaattgggctcctgcacacagtggcccgctacaagttctacctggctttcgagaactcgcagcacctggattatatcaccgagaagctctggcgcaacgcgttgctcgctggggcggtgccggtggtgctgggcccagaccgtgccaactacgagcgctttgtgccccgcggcgccttcatccacgtggacgacttcccaagtgcctcctccctggcctcgtacctgcttttcctcgac

SEQ ID NO: 5405 - DNA, 6000 bp, Homo sapiens
ctgcatggaatagaaaaaccttattcagtccaacagatgtttgctgagctccctactatagaagggaaagatcatgagaggaggagaagacaaagagagattgattgatggaaacaaatacagtttgataggagaaatacggccaagtgtttgatagatcagtagggtgactgtagttcacaattacctattgtatatttcaaactagctagaagaaaataactcaaatgtttctagcccagagaaaaatatttaaggtgatggatatttcaattatactgacttgatctttacaaattaagtgaatgtattaaattatcacatgtaccctgaaaatctgtatagctattttgtatcaattaaaactgttattttcaagaacacaattaagaaaaacaaaaaaaaggaaagatcatagttttgggcccaaacgaacttagctccagccttgactgcaggtgtgattttacgttagtcaccttacttctctctcacttccccatcactgggtttagtaagagcctgacaaaaccccacaggcatgttgtaggaatacaacaagaaaatgtgtgtaaagcttttgtagtgcctagctcttagtaagggctcaacaaaaatagttttcatttttttttttttttttttgagacggagtctcgctctgtcgcccaggctggagtgcagtggcgggatctcggctcgctgcaagctctgcctcccgggttcacgccattctcctgcctcagcctcccaagtagctgggactacaggcgcccgccactacgcccggctaattttttgtatttttagtagagacggggtttcaccgttttagccgggatggtctcgatctcctgacctcgtgatccgcccgcctcggcctcccaaagtgctgggattacaggcgtgagccaccgcgcccggccatagttttcatttttaacgaaactggaatctacacagtattcacacatcaggaaggtgagtcagccactttaacttaagcagcatcctgaaatatgacaagaaatgtacttgttttattactcttctaggacatccttatgcatatgtccccagcaccagagtgtagcctgggagacaggagtggtgcttgagtctctgcatgccctgaaggtgatgggaccttgacggtgttggcccaatgccacactggcatctgctgttgcttgtgtttgccagcatgcaaagttgacctcctgacctgtgcaatttttcaggctggtaaagaataaagaccatgtcccatcattgcttttttttttttttttttttggagacagagtcttgctctgtcacccaggctggagtgcagtggcattatctcggctcactgcaacctccacctcctgggttcaagccattctcttgcctcagcctccagagtagctgggactacaggtgtgtggcaccacgcccagctaatttttgtatttttagtacagacgggttttcactatggtggccaggctggtcttgaactcctgacctcaagtgatccacccgcctcggcctcccaaggtggctaggattataggcatgagccaccgcgcccacccccatcattgcttcttattttcatgatttcatgccaaaagttattgagtcccgtaagttttgcctattgtctggtcttaccagtacttttatctaaagcttttttggtctcttgtatccttcttgccggtttctcccagaagctctcctccgagtggaaaccagagatcaggctcccgtctggcagtgaccacgtcatgctgaagtccctggactggaatgctgagtatgaggtctacgtggtggctgagaaccagcaaggaaaatccaaggcggctcattttgtgttcaggacctcggcccagcccacagccatcccaggtatggctgcctctgctttctgtttgtttccgctttgaattaatgcacaagtgctgcacctcctaatgcgcctgaacaaccctgacaacttgcttgcttacagccatcctcatgattggttgcccatgcaaagcttagttttgccttgtacctatctgtgcagtggggtgagatgtactggacccccaggaaggcttggccaagcatcctggagaaaaggtcctgtcccatttggccttgaaggactgatgccaatcagtccattggacccctcagatgggaaatgccccagctccagcctagccttggaagttggttgagtaaggatccttttttgagaccttatctgccatctgccacatcatacttggaccacataactgtttctaagcacttcctatctgatgcttgctttatgagcacagccatggtccaaatctcttctctgtggtgaccctaagagaaggaagagatgatgcccatttacttacaaaccctatctaccaaaggcctctcaatggaaacagattaaattgaaccacttgtaatagaacaagtggagaaaatagatgctggaaagcaccatcaatgaaagcaatccggtctgctagagactgtgatggcagcagttctcctaggagatacagatctgtctccagggatccaagacctaaccttgctggtctcctttttggccaaatccctcagagaagaaggagctcttcaactgatcactctgcttttccagaccagccaaatgccaaccccaggcaggagaggtgggcatagaacatacagctgcagcctgttggggggccccatagaccctgccatgttcaagtgtggtgggaagacggccttgggcagcccccctcatgcctgccctgtcttcagtgcttgcccggctcttggctcggtggtcatgattcctcctcccaggaggagacaggccagagggctgtggcctgcctatgatgcagggatgtatgtgcaaaaatgggctaggagagcagcaacaaaacgggatcagtgtgtggttcccagtggttgtttgtacatggatgtgtgtgtctgggagacgtgtgctggacctccagtgagttggcaggtgagttttacactgtaggtcagaagcatcaattggtccaccctgcattgacaggaaggctccccagtgcttgctggggtgggtgtttctccacagtcgctggtcagatggtcggtgcagaaggcaaggcacgtgggcaaggctgcaggaaatgtcctcattataccttaacaggatgttcaaatggaggttctccttgcttttcctctgccccttctttctctccattctttggtccattcctttacaatcgacagcttggagtgaatgtccagatctgtctggccttcatgggacacttaggaggtgagatcaggtgaggcttgagtaagccctttgcagcaagacagattccttatggcaattgctccctggggtgagactcactgggtaggctgtttggacctgctgtgttcacatgctgggtactcctagcagcactggcttctgtggtttttgtgtcagagaccgaaattctgggtagaccttgtcctccagagttgtgcctgctggagatatcagaatccttcttgtgaatcgcccaggtgcccacttaagccagagagggctgggggattgctcacctcaccggtgacggctctgtggctctcctgcacagatctgagaaggtggtggctgtgttctcggttagactttcctggccattgaattgggatccgagaataaaacctctctgaattacaagttggacatttgtggttgaattctgtggtcagcaagcagggtagaaggtgaagcggggtacagaatgagacttcctttaacagcactgtggtgtgggacttgtgccataggaagaaaagcctgcttcatctctgacaaggccatccccaatccctaagcacagtgtgctgactcatagtgcagcgatccaatgcatctccaccactatgggtaaaacacgctagacactagaagacaatacacttgctggctgtatctaagaggcttcaccttagtgaaaggtaacactctcctaatcaaactcttgtattttagcgtggaggcttctgttctctcactttaatttcatttgctcgctgatccctagcccccaaattaaccctgctgtgctgcttctggcattgctgagcttctgaactggccttatggtattgatactgcactgaaccctctctaacctttgtcaatttaatttactaagttgaattaacctttgattctgtgttttctatagttgacctaattttttttctttttatctatttttttctctgtttctgtctctaccttccctttccttctgtccccctccccttcctgtgtctgtcgtcacacttgtcaccttggacgtcactgggacatccccactgccacatttgtttttaaacaaccacattatctctggggacccattgcttgacacctgcagcaaccttgggaggcaattctgcatcctacacctttgtctcattgcttttctctgcagtgactcttcttttgctctgttaggaacttgaacacaaaaattaaatttgcttaaaagcccagttcctatgaaaaagatcagtgccccctttggaagaacctggcaggaccaccatggccacagctgctgagcaaccattctgtgtggaagagaaggttttgtgattggaaaaagctttacctccagacatgtcaccactcacagatacttttgtgccacttcataaggagtttgccccctttttaatggcagtaaaaagaatttgagagctctttctttaaatgctatttttaaaaaccatcatgctagatttacagagaagtttctgcatatctgctacttgttgcattttgggttcaaacctaaatatgatgtagcagaggaagaattctaagtaccttctaaagcttgtgtcagattgttaaaatcaccacacattcccctcattctaactctgtgctccttgtcctcccttcaataataattggctttgcttgcaattaagcatttaagtgcccatgttaaaagagccagaccgcactgattcacatgagcgttttgctgacatgatgggcaactgaagtcacccctgttgcccatgcactggaaaaaaagttgaatttgttggatattttctggggctgatgaacgttctgggatgtgctttcagtcctcgtattacggccagcaccttacactgtctctgtgaacggggccaagccatgatgtgccaacaagtgtcagctttgaaaggtgtttgtctcccaatcggggtgactcccctgctgcctggcagcatgtcgcagatcagcacagagtggggccgtggttcagcagtgacccacagaatggctttgagcatcagtctacaggacaggttggaagcatccactgtgaaccaggcattagtcccctacctggcctgtgtgtgctcagtagagaaggagagggacaggccactcccagactgcccagcccaggagggttaataaattggggccgagccaacctgtcagtgcttcctgaatgccccagcctctgtattggtgcgttggttcagtgacattttctaaactctcctgaaaatccagctgctcctccctgctgcttgggagttcacccaggagaggaaatgggtgtgttttgttaaggtcccttgtggagactcagggctgaatcctgcttggtaatatcagtgtgtgtgcttggggatggaccttctactgaataaaaactccctccctccccccattgtggtcacatatcattctacatatctcatctctgagcatctccatggaagcttgatttttgttctttttggtttctttatgtatttttttctgttgttattattttttaatgttcaaagactagcctttccctttgggattccaaatgatcccatgctgtggtctgaggggcaaagccacctatgttggcgctcgccattaatccccagcgctcagtttagaggctcacgtgcagacatcagaggctccatgctgcacagtagctcagg

SEQ ID NO: 5406 - DNA, 6000 bp, Homo sapiens
aggttgggcagtgtacctacagcaccatttcttgggagcttgttgggatatcacatacttagagtggcaaggtcttgtggctgaatctattgatagtccagtgctacattgccagctcccttgtcattaccaccccctctacacgtgctccataggcaggagctgttactatggaaatacattatttttaaaaacagacacacagcctgggcttgggaatctccagaacaaacctacacgagcaaggaggttaatggggctgtttctgggtccaagctccaagaggaaggagggtgatgatggtggggggaattcaaattcggtgttctactctcaacctctcccagcttcaggttctgctttctctctgttgacatcagctggacctctgccagacacttctatctgggagggacgctctgcgtctccttaccctgggcctagcttcccccaggaaatgggaagctagaagtcgctgagtctgggggtgttgggagaagggggcggtgatttccacaggggtcacctccttcttaacctcacaggcgtccgacctgtggaaatctaacaagcataggggaaagcaaaggcagcatcttaggtaagtgaagttactcttgccttgagctgagtgtgggagcaccgcgattgcaagatggggcgaggtgatcaaagatcccgcctattttcaaccccggaacctcctccgctcgctgctagccctcccgccctcctccagcgagggagcgccaggctgtcctggccccgcccggcgcgggtgcggctcctttaagggcgggtgggggcggggcgccggcggtgttgtcagtgtcagctctgcgcacgcagccctcccggagccggtgccggcccgcgagccccagcgtctctgcagaccagtcccctccagggtccggcggggcccgcgcggtgggaggagtcgggcactggccggcgactaacgggtccgactgctgaccaagctaggagagacccggaccacggagacagagaccccggcatcgcgacccccgaggacctcctctcctcgccctgtggcacccactagtcctgggcactcagccgcggagagcccccgaccccgcgcgcccagccccgggggagcccacctcctccccgcggcccgcccgggccatgctcccccggggcagcgggtgagccccagccgggaccgggatcggagcccgcgcggagcatggatccgggctgggggcagcgggacgtgggctgggcggccttgctgatcctcttcgccgcctcgctgctcacggtgttcgcctggctgctgcaatatgcccggggcttgtggctggcgcgggcccgcggggaccggggcccgggacccgccttagccggggaacccgcgggttccctgcgggagctgggcgtgtggcgctcgctgctgcggctgcgggcgactcgggctggcgccgccgaggagccaggagtccggggcctcctggcgtcactcttcgccttcaagtctttccgggagaactggcagcgggcttgggtgcgagcgctgaacgagcaggcctgcagaaacggggtgagttggaccaagcgcttgggtggtcccttcagcctttccttccaggggagggactgactgctcgtgctaggaggccagacgagggtgggcataaactggggaaccctatggcttctcttcccctcccggatcagagaaaagggtgccgctaaggctggaggttgtagaaatccaactgggtccccagacttccatttctgtgggcaaggtactctggttccaaacccatgcacaagttgctgttctcatagcaacgctaatccctgtgcctgagggcacttccgccttgcctgggtgctggttgtgttggggcatgggagacaggtgcacctgcagaaggaatttgcctgcttctcatgccaccacacccatttaacatttcatgccccaaatccctggtgtggtcaggcagatccccaaggagcctgaatcacccccctacccgacagtaatttcactgctacagtcaaacacatccttctcctccatgctggcctgtggttcactgggggttggggagtgttcaggtggagagcagattgacagtgcccctaccagtagatgagcttggaactgccccttgagggtcagtcacaaaccagtccagcctacttcctcccattgcaccatgggcatctggcctcccaggaagtggggcaggaagcgtggtcatgagatggagataaggtgggaggtagaagtctctcttttctggagctccctcccatcctgacccagcaatctctccttgctctcacagtccatcagctccttgctcagagggttctctatttccagccactatgagtttggaggctttaccttactagttccccagatgccggaaacagaaatgtccacaagaaattgctctatttactctgtccagctggctggctaaaagccagatggcatctgtcagtttacaccttgaacccacctcttcatccaactctccctgtaccttgtccctcggtcagaagcaactccccaggatagctgactcaactggacattggcctcccttgcagagggtggggagattgaggtttcaagcatccatctccccatcttccttggcctagcctttgaatgagacagctaccagagcaaaggagttggcttcccctggtttgccaagcaaatgaaccctatggatttgtttcctccatctcaagacccaaggaagagttgccagccaattctgtgccccttcctcaattctgtgtccgcactgctctccaggtggggctgcggtaggttgcttccattactgtggacgaattagggagcagctcttttgagatctaagcagctttctgctctctaataccgtcctgctatctgccttgaggaattagccaggcccctggactcttgggtcctctgagcttgtatctcttcccagtccccctggtacggatccccaaggccatgctcatcttcatctccaagaatatgaagcatcatactcttgaagcctccacatcttatttatttggaagaaggcttagcttcatttctgcagctcttatcttgaacaaggtggctctaccacctttaccggggcttagccctttccctctgcccagctattatatataggtggcaaccagcaccttaacttttttctatgtaggattttttgtttgtttgttatttgtttttttagggggtagggtaggggatgaaagggattgcagggagaagaagaaggaagctcttggtattccaggaggaagccagggtcttcagcttaaggtgatctagtctctgaggtggactacctccccattgctcagtggctcctagcagctacaggcccctggagaggcaggccttgaggggactacctcctgtcttaaagccctgagccaaggaggggccagaagccagcctgcagctgaggcctccgcagtggcagagtccagccagcaactgagcaggccaaccctgtggggggcagctccagagacctgatccaatgcccacattactccctcagagctccatccaaatcgcctttgaggaggtgccccaactcccacccagagccagcatcagtcatgtgacctgcgtagaccaatctgagcataccatggtaagggtctgatgggcactgccctctttggggtccaagaaggactgaccccaagggctccctttagtccagaggttcttaacctggagtctgtgaatgccttatggatctaaggattggtttcaggaagtctgagaatcccattgaagttatgtgcaaaatgttggatgtgtgtttatatgcatttttctggggagaggagtctttggcatttatctgattcttttagggatttatgatcctgaaaacatgaagtccttaggaaaacggaagtggggaggggtctgctgaactattacagggcagttcaaagcagggtgagcacccttcccccacatctgacccacctcgccggtctcaggtgctgcgttgccagctctctgctgaggaggtgcggttcccagtctctgtgacccagcagtcccccgctgccgtctccatggagacctaccacgtcactctgacactgccaccaacacaggtagaaggggatgtgggaaactgagttgggcaggggcggttccattggctcagcttcttccatttgtttcctctctgggatggaattcaggaagggagagtcctcgaattaggagtccttgggtaaatggggcaagtcagcccagtcactttgttcctgtctgtagttggaagtcaacctggaggaaatccctggtgaggggctgctcatatcctgggccttcactgatcgcccagatctcagcctaacggtgcttcccaagcttcaggccagggaggtaaggaggcagagctggcagagaagaggcagaacggggagggaggcagaggtgggggatccacctccttgttgttcccttcttctctctgcagagaggtgaagaacaagtggagctctccacaattgaggaactgatcaaggatgccatagtcagcacccagccagccatgatggtcaacctcagggcttgctctgccccaggaggcctggtgagttggcacccaaagcaaaagatttgcatgcaccttgttcctagggtgctatgtcaggattcttgctctttggaccttcttctgctcttaggtacccagtgagaagccacccatgatgccccaggctcagccagccatccccagacctaaccggttattcctacggcagcttcgggcatctcacttgggaaatgagctggaaggtgagagctggaagtggctgcgggactgccaaggctatggttggttgcagatgctctctgcccctctgccaagggtacagcctctttattctgcagtgacttcccatctctgatctgagcatcttctaacttctggttcatcacaggcaccgaggaactgtgctgtgtagctgaactcgacaaccccatgcagcagaagtggaccaagcccgcgagggctggatccgaggtggagtggacagaagacctggcactgtaaggagtaaccctgccccgaccccatgctccagagcagagaggatcaaacctttccagcacagtccttgcaggaatcagctctgttttcagtagcctttggcgtgagctcctattgtatgccaggccctggcgtgggtcttagggatacagacttgaccaagatacagcccccacccctgggtcaatgacaagcttgaggcagagacaggtgtacataaagaagatggtaaaaccgctccagttgaggtttatgtaatgtgccgtcagagtgcctaggtgggggggagattaattcccatgagggaataaggatcagagtaggcttcatggaggagatgacatttaaaccacactttagagcaagagtaggatttcatcagagtgtgaaagtattctcggcagagggaagagctggagcaaatgaaagagggtggcttgcaactgagagactggcaagacaggaagagcaggaccagggaggatttgaatgcatagctgagaagcatggtttccactcaggccctgtccctttctcttgggacgagagagaatttggaggccaggagaatctgattggagcatttatgccgttttatttatgtacacagctctctgcctctggcctgtgatccactcaagtgtgggttcagcttgctaattttctccttcctgccccatctcctcttgtcccacagggatctgggcccccagagccgggagctgaccctcaaagtgctgaggagcagcagctgtggagacagtaagtgaggggtgggaggggcacccctgggtgggtacagagtggggtctggccatgggcccagctcacagtgccatccctttccccagccgaactcctaggccaggccacactgcctgtgggctccccctcc

SEQ ID NO: 5407 - DNA, 6000 bp, Homo sapiens
attacaagaatattttaaaaactcaaataatagggccctgggggagtatcaggaatatggagagagcagaagaggaaggaaatacaggaaaataaggtatactaagttaaatgtgttgtcccccctaaaaaagtcctactcacccaaaacttcagaatgtgacttcatttgaaaatgagggtttttgcagatgtaattagttagggtgaagtcatgctggattaaattggactctaatccaatgactggtggccttataagaagaggtaagagacaccgagacacacacccagggaaggccataagaagacagaggcagagatggagtgatgaatcctcaagaccaggaaggccaagcactgctggtaatcagcagatgctggaggaggcaagaacagatccctccctggagccttcagggagagcatggcccagctgacaccttgatttcaggcttctaacctgtgagaggatacatttctgttgttttaggccacctagtttttggtactttcttacagcagctgtaatgcaaaaggagagagagagaaggctagtgggctctgcaggggtagttgtgaggactaactatttaatcaggtatagtcaccaagtgtatatttatggaagcttgctctgtatctagttttataaaaagaaccaagaaagctctttttctccctggactttgttttatctgtattgggatgtgaacatttctgcccagttgtctccagatttccagtcttggtagagtgtgttgcaaagtgtctccccacagtctcctccactggaaccctgtggggaaagggggactttcatgcagggggccttggcttattatctcagcagctataggggttgagccaacacactctggctcctgccgggggcaggctcctgctgtctgctttccagctgggtgcctgctctttgctctctgattccccctcctgtttggttctctggcccctgctggctgggtcgctgccccctggcatcatcactctgaagccagcagccctgctgggccattcacaggcataccctagtgggggtaaggggcagatgttatttctttgtccccctcccagcaaacacacacacacacacacacacacacacacacacacaatctcacactcaatatgtattaatgtcctgggaaggggtccaggcagagagtgatggcaggctacaggctctggggggatgcaaatggaccggacagtgtgtgtgtacattggggggaggcagtggtagtaatggggggttgtcttcagactgcactcctgggcaattacatgccagcagcttcatccactaccagccggcatgcaggctttagaccaccaagaagcctccccatatggccccagcttggccactgaaaattcccagccacattctctggccgatatgctggcactaggccaagaaagttagcctggggtagctgttctctcccctagcacgtgaacacacacacacacactcacacaccagtggggggtgggatggagagttcctttagaggctcatgattcccaaaacaccactcttgtgtagggttcctgccttactcataatcacttgcccttcccatttcccatgttcctctgcaaatccacccacccaaaataccaccataggaaagaaatattcctcttctatattacctcatcaactcctggcccagggctcttttctagggctctacctgtgaacccacacatgcacacacacgcaaacacacacacacacacacacttcttcccatcagatgctgtaaccttatcagaacaaacttagctcctaactctacaaattcaactcgccccaacctccctgcttcctgctactctctcttctttctgccaaatctccttcaaaacctctgtttctttttcttaccctttctaaagtctggactgtacatattgttggtaaaactctgggaaagaagtagtttcctgaggtggtagaagagagggtctctaaacccaactctgactctttctccagcccaaggtggaaatttataagtcaacagaatgaatgcaccccggctgaggctcctccaattgcagggcatctactcagtgttttaggtgctgtacaggcacttacagttgacaaattaggaaatggacatagttgcaaagagttgcatacccactccagaaaaaggacaaagagttgtcttggtaattttcagagagcagagcaggcagtgaggagactagtaggaggcaaacccctttcagaactgcctatgggggtagccaggagagaagctggatgtggacaggggcagggccagtttctaggctgcctgtctgaccctcagtaaagaagagaaggtggggagagggctgcagaagagctgggaggtgtgacttctgctgggccttctctgcccactctctgctccactctgcctagcccagggccgtaaggacactagagaatgggaaggaaaagggagggaacttaggttatggttgggaggtatttattctctgatatccccagttgggagaactcagccctcttggcttagatctgagtttggtttaaaaggagagtatcatcaagataaagagaagtacaaagaaggaaagagcagagagaaacaagaaaaagtggagagtgaaaattagagagagcccagacgaggtgaagtgtaggagagacagcagattcctggaaagtagagtggcccggctatttgtccagcctccaaacccacgtgacagggactgtgaagcagccttgctcacgggttgagccgcgcctccgctcagggaaccctgagcaaatacgccctgatccccacataaagggccaattaactgcgccgtctccgggaacaaatccgctaacagggtgacaagcccctagacgctggcaggccctgtgtttgcggagaggccagccgggagcaaatcagggcattaggaccgggcaggagccgcatggtgggagggtttctggccccctccgccccagagtagggcctggtaccaggacgtggggtttctatcccgattcagcctctgctgtgatggaacccaggtgaccgcggtcagcagggggcggagcaaagggccccggagcctcgaatctcacaggtcagagtagatcaagcactccaattcctccttaacagatgggaaaactgagatccaaagcggtgacgtcttgtacttggcaaacgtagaattagaacccacttctgtgttggtcattcctgaaggatagatttcgggtgggaaatacatcccttactttctctcttatctgaataccaccctggagcgaggaagggaggggcgtcaaatctcttattatcttcttgcttttgaaaggatgtgtctctagcccgtctcccacctaccccagtcctcagcctcagggtctgctcggatttatgtcttccctgggggctccagggccctagtcaggcacctgcagatgaggtgctgaaaaggacagctcccagggcgctgcgtggcggtggggtggggggtccatccggccccacccccactcccacctaccccctcccccacacctagtgcttccagcctttctacgtcccgcccagaactgctagggttggaaggcacctaaacacccatagttggaggctcacagccaggcgcctggactgaggaaggaggcttggaacaagccccccaccccttgacaatgtctcgggttcccttgaacaagctctgcctgaaatatttcaattcttgattctgcttactccagagtctgcgactgtatagcacccacccctctgatctcgacccctttggggtcagaagcagtcgccccatgaaagttgtctcatcccagaacctgacggctgagccagaactctggcactgactcttcaatcagcagggccttacctcaggttaggaatgccccggcctctctctttccctgataccccaaagccatctcctgtctaggaaagtgagtttgtcgaggtgggtcttcaggtagaaagaactccagaaaagtcagaagcagaccgcgactggaagtgggaggtgggagtaggggcccatggttttcttttcgccccccccaggaaggacgactgctatccgatttgaacagatttgcactaattttgcagcaatcccacatgcctttacaaaaataatattatctttgtttttgtcctagaatccttggttccatttcagtctcctcaaaaacgtaaaacaatttaataaaaaatgtcaaagcagggtaatgtaaaaggattcaaataaatgacagttgcctgggtttccctggctttcagtctcctacaggaactcctagattagggcgtttggagcaggactcccgggtcagggcgcgccgctccatcctctggcctcctggctgcagaccaaaggaccagagggcagagaggtggacctgtcttggaattctctgcctactcccaactcttgctgcaaaccaccccagtctcctgcccttccgtcgccaaacccctagacttgggagggaatggaaaccagaactttggcagcaaggagcattgcttgcgctttgcctcagtttccaaaaggttcgggaaaagagaggacagattcctgttctaaagttgggcagaagggcagagtccgacagagcctcgtccctcatcttgggtgctttgagacagggaaaatctctcgccgcgtccagaacggaacgctgggcttggggtgcggggcggggactccaactcgcgcgctacgctactcgtgtctcctgctcggatagtgactgtagaggtaagggtgggagggtggagggaggcggattaatcccttaattacgccgtgatcggcgtggcacctgctttccgcctgcccagctcccaggggactccggcactagggggtggagagaaggacgagggaaggaggagggcacgaagaggcaccgaccgtacccaggcgcaccggcaggagagcggcaccgtggctgccgcagcgcgcagaggctgtggaggggcttacggctcccagcccacgggtctcagacccaggggctgggcccccagcccccagtcccgatcccagctgggtcgagccatgctgcgctacctgctgaaaacgctgctgcagatgaacttgttcgcggactctctggccggggacatctccaactccagcgagctgctcttgggcttcaactcctcgctggcggcgctcaaccacaccctgctgcctcccggcgatccctctctcaacggtgagaccctgcctcttggggatatgggatcctgggatggggatgaggtgagagggcggcgtggaagggaaggagaagcgctcctgtcccgaggtccgggattgagtggcgcctcccagcgcctccctgggtcgtggggtctaagggataatttggagcttcgagcacatgagtgggggtacccgcgggaggtcgagggcttgggagaagatggctactgagtctttttacacctccttcccttcccctacaacgcccaccccaggtgagaagaaccgttgctggtaacgggcagggaagtccgagctaagaaaggcccgggcccagcgcagggagggcagaggagggggcacagtctcccgccggcctcggccaagccaggtcactcggtgacccacccaggcagctggtcttcggaaccccgaagtttcccaagaactcacttaggaccagaggaagccaaaatgctggatgtgtttgctacggaggggataggggcggcgatcattttaaggaaacttagaagtttgtctttcagcggcgggactctcagccggcccaccccggcagagctgtggcgggcgggcggagctggcggcgaggtcgttaccgctaattacggtgattaataaatgactgggacagcgcgctctcccctagcgccgcggggaagctgcgggagccggccgccgccagcctgcggagaggccggagcgcgccccctgcctg

SEQ ID NO: 5408 - DNA, 6000 bp, Homo sapiens
agtttgagaccagcctggccaatatggtgaaaccctgcctctactaaaaatacaaaaattagctgggcattgtggcgagcgcctgtaatcccagttactttcagaaggctgaggcaggagaatggcttgaactccgtaggcagaggttgcagtgagccgagatcgtgccattgtgctccagcctgggcaacaagagcgaaactctgtctcaaaaaaaaaaataaataagaaagccaaaatctattggtgcccacatctcagtggctttgtcttcatggtgcttgaattctctgactggtcctaatgcctaccacatgtcagcttgttgaagtatcccatttgattgctttgttacaatgttaggctccagtttcatttcctttttatttatttatttttttttctgagatggagtcttgctctgttgcccaggctggagtgcagtggcaatctcggctcactgtaacctctgcctccaaggttctagcgattctcctgcctcagcctcctgagtagctgggattacaggcacatgccaccgtgcccagctaatttttgtatttttagtagagatggggtttcaacatgttcgtcaggccagtctcgaactcctgaccttgtgatccacctgcctcggactcctaaagtgctgagattataggcatgagccactgcacccggctcatttccttatgagaaaagcagtgctttagttgagacaagcatggagatagaagtaaacagacttatggtagtgtaaaatgattttcatggcataatatctgatgttaaactgatttttcattgagtaatgctgaatttctcaatggtgtatcctgaggagcaaaattcaccacaaatttacaacaaagtttatttcttgctataggtactttaattatcggactaccaggttcctggctgaggaggggttttataaattccataactggtttgatgaccgagcctggtaccctttgggacgaatcattggaggaacaatttacccaggtgaggagaccagatgtgtttttttttttaaaaaaaaaacagaaatatttgtatgctagagaaccagtttcttttatttctaatagctttgtcttgtgacacttgtaatttcatcctgattacaggttcctaaaagtgcatcttacataaacaggagtacatttgtagtagagtggagatgggtggtttttatacattctagacttctgattgaatccttaggggagaaatttataggcttactgcagttgctatgttagtatttctggtgatttgtcaagacttacatagtcactttattgtatctgggattttccctttctttttcccttaagttctggtaagacaacctaatggagtttcttcttcctgttacaggtttaatgatcacctctgctgcaatctaccatgtactccattttttccacatcaccatcgacattcggaatgtctgtgtgttcctggcccctctcttctcctccttcaccaccatcgtcacgtaccaccttaccaaagagctcaaggtgaaggatttggggtgacaggaggcttgggaatgaatgttattgagcctctctaatcgatgctggagggtgggggacagagccttagaaaggcagggagccagaaggtgaagacagcttttactgggccaaattaattggcttcactccaacccctttctgcaatatgtgttttttatcattagcaactgtttgtccttatgagagtacagttgaaagtgaaatgtaaattgcaacataaagaaaaaaacatttaaaatgcaaaatgtgaggtttggattttgaagtcctcacaatgtaagggagaggaaaaaaaaactacatgaaacattccaaaacggttagtttttcctaccaggaatgtactcagcaattatttgttgatttaaaaaaaatttttttttattttaaaattcttaagccatttggcttccgtagtagactccataatgctgactctgtttttccaggtttcagcattgctgaccttggctccctgggtgctattcttagtttgtgctgcggtgttagagagatacctgagaggtgataaactagtagggggtttgggaagcctgaatttagtttggaaaactttttgatccttctccttgctgccctttcccaaatttgactctttcaacagacaagtctttacttttttggaatgtggcttatatctgttgctcctttctcctgagctcaaagggtgcctggtgatatttaagctttattgcctaagctcctggcatcttcagtttaggtagattatcacttagctttcttggctttttaactgaaataataattttcttcctttgattgtccttgcatggcttttagaggtgtgactggtgttccaatgatgtacagatattgttaggggtagagacttacgagcttggggagattggtagccaaacagcccattctgggacagtattgatgtttgacatctcacttgatttgtctgtcctcagcatatgtgttctcagtgtcaggtttggtgtcatcatggggaattggtcatgaagtttttagcttgcttgtgctgtgagcatttctagcatttctaacatctcacatctaccttcgaaattgttggactgttttctgggctcattataaacagaatggactagtggatcctctgttctttctcagcattgtattggtgttaatgtcttattaccctttttttcttacaggatgcaggggctgggcttcttgctgctgccatgattgctgtagttcctggatatatctcccgatctgtggctggctcctatgataatgaaggtaagacttttaaaatgctgaagaagatcatctcacctcattatccaacagagcttcacaaagtgcagtctatggtttagcaataataaaaatggtaactgggtgagaatattagaaatgggcaggaacggatcttggacaagctcatgttctcttcccatcatcctttccagaaaggtagttggtaacttttcttacaagtctttggttcatctctgcactcataaaatagttaactattgttttaacattataatcatttgctttattttcctacataaagggagtggatgtccttaaaattttaatgactgattgacttattctcaattcaacatacatttgttgaatgttattgggaaaacatagtattaagtgttaggtaatgactaagattactttgtgcataattataagaaattaaagagataggtaatgaataaggttatattggcccatcatctattaaggaagattaaaatggacatgtaaatataactccagtgacaggagatagtactatgtgccatgataaaaatttgaacagagtacttcaggaatgtagtggaaggagagatttggggctgagcttggtggctcacgccctgttatccagtactttcagaggctgaggtgtgtggatcatttgagctcaggagtttgagaccagcctgggcaaccctgtcactataagaaatacaaaaattagctgggcatggtagtgtgcgcctatagtcccagctactctggagactgaagtgggaggatcgcttgagcctgggaggttgaggctgcggtgagctgtgattgccactgcacttcagcctagtaatagagcaagaccctgtttttgttgttgttgttgttgtttttatttttatttttttaagaaaaaaaaaaagcagactggagaatcaaggaaggctttttagaagtggttgagggtcaactgggtcctgaagttgggacttcattaggcagatatcaaggaaaggggcaattggggcatgagtattatatgttaagacatagaggcaggatgatgaatgatagtataagatgtctttagaactatactagcaggatgtttagtgcttggaaagaatgataataatggccaatatttacttaatgtttattatatgctaggtactcttctaagtgctttacaggcattaattatatttgttttcagaacacttttatgaagtagatactattacttcttcttacatgaaactgaaacaaaaggaagtaaataatttgcctaaaattacactattacttggtagtagatccaggcagtctgttccagaacagtattcttaatgactatactagcctggcctcttgttgaatttttggtgtgtcctttctgcagggattgccatcttttgcatgctactcacctactacatgtggatcaaggcagtaaagactggttccatctgttgggcagctaagtgtgcccttgcttatttctacatggtaactttttctacatgttttcaatttttaaagttctctaaatactgtatttcctatgggtacttattgtttgaccaactttcttttctggtaggttcccctaaatttttttcttttccagtatattttttctgttcatacttacgtatacatgtagacttccttaattgcttccacttgctcacatatccctaaatcctctgtgtgaccttacagtagattgcatttagattaattctgaggcttgagtccctctcgttatgtgatcatgacatcagcaaccacaagggagcaggggattgagttacagtgatgggtttgaacttgattttatattttcttttttaaaatttattttattttgtgtgacctgtacatgtaaggacttgattttcctgtttaaaaaaaaaaatcagttatttgaactctttaagccatttggcataaataaagttatagttactataagtgttctttaaagagtcacaggtgatatcctacaatatagtggtggtggtctgaggaggcatactcagaggaactgtttttttctattccatcataggtctcgtcatggggaggttatgtgttcctgatcaacttaattcctctccacgtcctcgtgctgatgctcacaggccgtttctctcaccggatctatgtggcctactgtactgtttactgcctgggcactatactttctatgcagatctcctttgtgggtttccaggtgagcccttgactgagtagggttttcagcttctactttttctatgcagccccaactagactgatttatcttagattctgttaagaagagtacgacttattcacagcctttatattgaactacttgtgttagttgaagcaacagaattactggtcattaaagtttgcatccaggagtctgctaatatttgctccgtggagtttgaattccatggctcttactttggctttaagtttgtgggaaggggagggatatttagttgagttgagtttagatgagtgatcagagttaaaatttccagtcttcttaatgcagatgaccccatgtagtagcagagattcctgatcttaatggcatctaattgtaagtgcttcaggaagtaaagcacaaacctttaaccacattgctccacagggttaacagacaactgttaaatcaaagaataatgtggtatgtttgatttctcttgtgaaattatcatgaaaatgcaaaccttatctagaggtcaacaagtatttctttactgattacctactgcagattgtccccaacttatgaagcgtgacttaggattttttggctttagaatggtgtgaaagtgatctgcattgagtagaaaccgtacttccagtacccatacaagcattctgtttttcacttacagtacggtagtcaataaattacatgagattctcaacactttattgtaaaataggctttgtgctagatgattttgcccaactgtaggctaatgttaaatgttctgagcatgtttaaggtagtctacgctaagctgtgatgttccataggctaggcgtattaaatgcattttctacttaagatattttcaacttaaaatgggtttatggggatataacccaatcataagttgaaaagcatttgtatatgcagtttgctaatcacttgaaaatgtaaaaagaataaaaa

SEQ ID NO: 5409 - DNA, 6000 bp, Homo sapiens
tagtagttaaacctctgaaaatgagtgaacttgtcccctgaaaatgtgtggcaggggagaagcgaggttcaaggacagtgcccccgagaatgccagcatttaaagggtggaccctcggtggctcacgcctgtaatcccagcactttgggaggctgaggtgggcggatcgcttgaggtcaggagtttgaaaccagcttggccaacatggtgaaaccccgtctctactaaacatacaaaaattagccaggcatggtggtgggtgcctgtatcccagctactagggaggcacaagaatcacttgaacctacaaggcagaggttccagtgggttcgtgccacttcactccagcctgggtgacagagggagactccctctcagaaaaaaaaaaagaagaagaagaaaaaaaaaaaggtgggccccggcagcagagcctactgtcccggaggcaggaggaaaacctgaagggaatcttgaccttgacctagaagccaaggaggaggcatggccaacaacatcaaaggcctctgagcagcgcagtgaagactgacaatagacctttcttaagtttggcaattagaaggtcattggcctcagcaagagcaatttcagaataaaaacaagagtggagggagtggcataggggtcgggggacagagtaggaagtgagggtgtagtagaggggaagaagtttgatcactgagggaaggagggagatgcaggggtagcttgaggaggagatagagcagagagaggtttgctgtttattttaggaagaggagacttgagcatgtttataagtcagagaatagagaaggagaggtgggagacacagggaaaagaggagtcattgattgggaactattctgggaaggtgaggtggatctggtgtctaggtggaaggatttgggggaaagaggggaggtaggagagtctagacgtagacagcaggcagacaggggctccaggttttccctacagaactgaggacagtgatggccgagcgtggtggctcatgcctgcaatcccagcactttgggatgccaaggtaggtggatcacttgaggccaggagttggacaccagcatgggcaacatggagaaaccccatctctactaaaaatacaaaaattagccgggcatggtgacacatgcctgtagtcccagctactcaggaggctgaggcacgagaatcatttgaacctgggaggtggaggttgccgtaagctgatggcaccactgcactttagcctgggcgatagagcaagactgtctgaaaaaaaaaaaaaaaaaagaagaagaagaagaactgaggacagtaagagtaagtggtcgcttgtgatcacagaaccagcaagtaaaccgcgagcttctgcccctctggtcttcccagaccccttccccggaacattaagccatatcgcttttatgggtccaggggctctgaggggctgggcatcatactgtgcccctgggggcatatctagttctgccccacttggttgggcgggtacctgctgagtactcactgtgtgttaggctgtgaatgctggggcagcaggaggcatggtttctgcctccactgggccttatttcttcaccttgtcccccagttctgcccttgggtaagttctgtggcagaactgaccagctcccttcggccagggacatcttggttcctggcagagcaccaagaagagcagattgtcttcctacccgggggcacctttgcccagcaggtcgggtgagctggcctcttggtgagaggctggtccccttggacatgagtggattcgatgcctgctttcccacccaggtactctactgtggctttgctcctgccctttatgctcagagctagaccagcaatgtgggggagctgctggggaaaggcgccatgttgtcttgaggtagcagccagccccggaagccctggaatgcctggggccactgagcaatcctcaccctcagccccacaaggggagggcgtggctcgtgaaattcctgattgggtatagcccagcaagccccaagactcgcccagtttgcttagcgcaacactgacgctgttttggaatgaagacaagacaatgtagaactttactggggaagaggtcgaagaagggctaattgtcttgttgttcaagactggttagcgctgctcacctctgacgctgctcacctctgacgccaaaggtttttccctggaaggcagccctggaggatacctgtgtatctgtctttcacaaaaggtgaaatgagctctttgtagtgtttcccgcccaggctgcattttagaatcacagaggaggtacggcgctgatttgttttactattccctattcatgcctgggccccacccctaaccaattaaataaacatctcggagagtggggcctagactttatatgtttaagctcctcaggtcattgcattgtgcagccaatgctgtgacctatgaatacaaaggaagatgaaacgcaccctggtcatgcaaggaagatggagagagggagcagggagggtgagagaggctgcagttcgtaaggtcctgaaatgttagagctggagggatcctggttcggagcactgcaactcaaaagagtagttctagccatgcagcaggccccattagggagctggttagaatgcaaatccccgcctgccctgcaccccatctggcaccctctgagtcacggcgtgcacatcgaggtttgagaagtgtgctttcaggtcacccacagatcatccagaccagtggttctcaaccttggctgcactttagaatcacccagcgggcttcagcgaattccagtgctgggctagatgaattaacccagaatttctaggtgttgggacccaaatactcatttaaaaaattttttttgtttaagtacttcaggtgagtctcttcttcagccataatcaagaatatcaggcttgaccagtgcttctcaaacttggacagatagatgaatcgccagggtatcgtgtttaaatgcagattctgattttataggtctggaaggggccaaagaatccacttgtctgggctctgggatgcccatgggactgatctggccttttttgagcagtgggaataggctgacttctcagtttgacagcaaggaaactgcaggtcagagagggaggtgtgatcgtccacggtaaccaacctgatatgcattcagtactttctgatgtactctactgtgtgccaagcagcatgctacatgtgggactagagctgcgaacaggacagacccaattccaaccctcacagagcttatatcccaactggggagacagacagaaagaaaacaagtaactaagctgatgacagatgggaaaagctatgaaggcgaggagggccatgtgtagggaacgactcagagattgctgtggggtgaggggtaggtaaggcacgcccctttcagaagagctgtcgggggagttactaggacaatacctttaactggggactcctgctgattacaaactgatcacttttctttactggacaggactaggcttcatcccctctggggtttggggatggtgcttctgactctcctgaggcagtctgaccctggtccctgcctggctgtctcctctgactcaagactctgatccttcagtgtttgtgggttcagagcagagcctgggaatgagcccgctggggagcaggacactgactccaccataggacagggctcaggatcattggttaatggtttgtaaaatggaccaggcctcatccagatgctgtccccagcccctatgaaaacatggaaagtttccactggtgcacaaacactagtgcttgcctccctttcctgatcaaccgtcggactcacatgggctgtttgtgaaaatgcctgtcccaggccatactcaggctgaccaaggtggtctggtctccagggaagggccgtgaaatgtatttttaggaagtggtccaaaggactcttctgatccagatcatcaggaagcatggcgtggatggaagaaactggcacttggcatctggtgcctctgtgtggctgtagaagctacagaaatgtcttctgcagtgactgcagcgtggccctggctgagctggtgcttgtgaggaagcctctgcttgtgtgcaggggtgaacagcagctcaccccttcccatgcacagtcctcaccttactaccttcacccttactggaagcatctcttgacttctctttggccagccagaccctcccagctccctgtgctccccatttaaacaccttccctccctgagcttagcccatggctgggtggggaggcgtgagcactgtttgcatttggtcagggcctagaagggatcaaggaggcctcatgaggaccatgtcatagccccaccctcactccccacccctgacctgagcaaacctgtttggctggattgatgatggagaggcaggcagtgaccagaccaagagacgccttggatggtggagaataggtgaccctctgttgggtaaaagaggactcaagccctcacacagtgagttggctaactttttgtctcaacagtgggcgggggtagctgtctgcctcctggagctggcccttcctgggtcaaaatgcagaaggagatggtgagaagaaccacaccagagaggctggagtaggccagcctggcttgggaccgagtcccgagtccctggctggaccctcggttttcccttccgtggcagggctcacctggatccttaatgccgcccttggaggagttaggaggatcctggatgagaaaactcaccctcaggatgattgccccagggagcagcttcctgctttctggtggaagggaggggcagacagtgggtgtgtcctgctccagtgtctaggcaggagagtttgtgaagctgaccggacacctgtggctcttatttcctaggtggcccgaggcagccgggatgacagctctccccaggaatcctgctgcctgctgagaaacatggtcagcaagtcccgtgagtgtcatccgagggctcccccaccctggaggacaggcctcagaagccgtcttcagcaggatcctgggacctctgggggctgtggagggacagacagggagccaggggcccttctcttcatcttgaaggacagtgggtacaatcagggtcaagccctcagccagggccaggagagggccagagactgcttctgttgagttaggggtcggagggactcagaagggggcaggtgggaaggtggacgggggttgtacctgcctgttgctgcctctagctcctctctgcatgtgtcctgcaggctggaagctcctggccatgttggctctggtcctggtcgtcatggtgtggtattccatctcccgggaagacaggtacatcgagctgtgagttcaccttccatgtccttccagtggctcttgtcagggacagggcttagggatggagcatcatggagcgggggacctagtagggcaggaaggttccaagagccggcacatgacctcatcccttcagctgctggtacggagtgtttccatgagggtgggtgggggtagggcctgggatgtctcactgggccctcacccagggagtgcaggggcaggaagacctggatcctcaaggacttgggttccaagtggaacttaacttgagatgattcctccccggcaccttgggaccttcatgccgtgggagaaggcttaggctgcctggaacatgggtccctgggtctgactggggcttctgcctcctgtccttttttctctccagtttttattttcccatcccagagaagaaggagccgtgcctccagggtgaggcagagagcaaggcctctaagctctttggcaagtaagtacttaaggatgaggagggtagagcagggcatggagcgagctgggattgagggtttcacagtgtggggagtagatggaaagagcagctgtgttggtggacatgggttaggtgaagccagggagggaagagaaggccttataatattagtca

SEQ ID NO: 5410 - DNA, 6000 bp, Homo sapiens
ggtgaagccatctctggaactctctctagctgttatcctccctcctagtaactcatagcacttaaagtttgtactgttcattcacattcaatcatacacaattttccaacatattttgccttgttattcaactctctggaatgtttacatgccctgtttcctcaaacagattgtaagttcatagagggccaggcaaattggtatatgtctgcatgtctttcatatacctagcacaccattgtgtaacagtaggtgttcacaaaatgttcattggatgacttttggcccagcttctaaagcaagggtctccaaacctcaggccacataccgatactgctctgtggcctgttaggaaccaggccacacagcaggaggtgagcagctggtgggtgagtgagtgaagcttcttttgtatttacagccactccccattgctggcaataccgcctgagctctgcctcctgtcagatcagtggcagcattaggtaggagcacgaacccttattgtgaactgcccatgcgagggatctaggtcgtgcactccttgtgaaaatctaatgcctgatgatctgtcactatctcccatcacccccagatgggaccccctagttgcaggaaaacaagttcagggtttccactgatcctacattatggtgagttgtataattatttcattatatgttacaacattacaatgtaataataatataaatacaatgcataataaatgtaatgtgcttgaatcatcctgaaaccattccttcccgcatccccagttcatggaaaaaattatcttccatgaaacctgtccctggtgccaacaaggttggggactactcctctaaagtagacttcttccattaacagttgtgcctggccacaaaatgtcttactgatagtgcttgccttatgttgtctcctttgcctaggatatctttcctccttttctctccagatatgattaatttttacttactcctagggcttaacttaggcatcacatatctaagaagcctcttgtggcatccatgtcaaggttggcttagatgtatatcctctgtgtctccataacacgtgattcaccattctgtgtcaccatacattagaatattaggcttctgcatctattttgatatcttgaggctgtgaactccttgaggaaaaggatggtatcttatttagtttatgtctctaatgcttggcacaatgctggcatatggaaagtgatcaatgaatattgaagaaggagtgaatgaatgaaaataagcaaaacaatcctagtatgtttctaacagtctgagtgatgagaagtcagatatagaatgtatccatggaaacaatataaaaatataagtagccctatctcacacttggtcagaagcttccttatgaggatggcttagctaaaaccacagtgcaccctaatcaattcaagtagtcttgaatactgacaatgtactagaagttgccacctagaaaatcatattttgactcccttagcatcttaggcatatgccaatttgtttctgataattgggattgctcccctagtcaaaccacctcatctctatgccatgaatgatctgtctttctcactcacccaagggcaatttgcctccttcaaactgtattcttaggcagaatttaaaggacagcaagcacttctcaacttctacctcatgagttggatattttccaattattagtggggggagacaattctagatgattcttccaagcatgaggtgcgattgtctcatttaatatacttactgcactgacagctctggcccaaaccaccttctgtcctgcttggggactgtccattgttctctagtgtatgattagcagattacctatcatgcaggaagccaggaaaatgaactcacagtaagcccttccaaagcaagagtaattcattacccggcctgatttccacttaaaatgtactttaagcacacttccaactacaaaccctaaatcaccctgtgttcacaaagtccatcattttttattttattgcatggcattggcgtgacataatcccttgcagagcatctcggagtgctttacagatcaataaattacttacctgcacagttgaagcaacgtctgcaaggccagcacagacattctgcaggcagcctgtcctccaggaagcaagcaaggctgtgtgggtgctaagagtgagcagggacagggaccagcaaacgtatgggttggtgttggggggtgggggaaggaggtggctggtgcatgagatgggaatgctctagttaaaactctgaataaaacacatcaaagtgtctatttttgcaatgatcaatttaaatgattccagaactaagagaatttagaagcttgtacccttcaggcagtcagcaaatcaaatgctcagtcattaactcatcagttacctttctgtcctggaaggctccatgtagcttttaaaatgatataaccataaatggcattgttacatcttaaaagtcccagattatagagctagcattctctctcctccaacccttgtccatgtccactctccattatttctgtcccaccaaatgcttatgggagtgcaattgagtgtgtatgtgtatgtgtgtgtgtgtgcatgcatatgcagagacacacacgctgcctatctgaagctcaatgaggatggaaatctaaaaatgattaactgttgcttactctgtgtaacataccctatttaggacagcaaaaaactaaaaagttaaatgaggatcttttcaaatatcttatattaatgtaatttatagtataaaaggaaaggtgggaacatgttacataaaagtttactttaaatgccgtataggagacactacagtgctgtggaatccccaggaaggagaggtcacatcctcttcaggttcatctggacagccttattaaaggggtggtaattctctcaggccttgaacaattttaatagatgtggataggcacagagaagagtgtaagcactgaagtcagcaacaagggcatggggataaggagatagctcagtgcagcacagataagtacagcacacgcttattaatgatgagcatttcaattgggtggatgcaggacatacatggaaggtaacactggagaaggagagaaggggaagaaggctaagatatctttataaactcccttttcatgaaggaaaagatccaacacaactaggaatgagtgagtaatggttcaagtagaggcaagaccagcattaaaatttgcaaacccatctgattttagtgtgagggccccactctgacctcgcaacaagcaataaagtcatcgtgcagcttccctgggctctccggcaggcccgatcacattgtaagccaggtggatggtgtgctttagaattgcacagcatggtggctctgaggaatagttattcaaggaaagaatataacatgaagaaacagaagagtgctggatggaggggacacttaacttgccaagaactaagaagtcaaaaccagcatcaggagggttgaaagaatatctgccaatgacccaactctgaggttggtatggacacgttgcacacaggttgggaaggtggttcccttgaataaccattatcactcaattctgtaaatatttgttgagctcttagcgtggatacagatataagtaacacattgttcaggtcatcagaaagctcatggcctagtgggtgatgctaagcacataaccatagcatagtgaaataactgtctagaattggagtgtgggagctcagtaaatgacatctttactccatccacttgaatgttaaaacacataagacagataagtagacacatggaaccaaatatcacatgtttactagtggtaaagctgagactggagaattaggctcagatgtgcagcaacaatgaggttctacgactggaccccggaaagaaacgcacacacatgcaatggctggatgttccacaggccctatccagtccttgtgggtgctgcttctgaaaataagcacatggaggagcacaacataatataagcttcagaaggttccaaaatagaagaccaaaggaagtagacatcctgtctccaactttacctattagaatgaaccccttctctccctagggggagtcatttagtggagaaagaaggtgggggagagagagagagagatgttatggctaactgaggcttaatttgattccccaccaggtgtgtagaatgtgctctgggcacatggatgaagaagcagcagtcaatttgagatgtccaaaagggcagagaagtatagagggtagggaaagtttcaacaaagaaagtggcatttgctttgggccttaaggatggctgcgcgtgcactttgataggctgaggctggtgaattgcttgagctcaggagtttgagaccagtctgggcacatggcaaaaccttgtctctacaagaataaacataaacattaacaaggaatggcggcacatgcctgcagtcccagctacttggactgaggtgggattgtttgagcatgggaggtcaaggcttcagtgagccatatttgcaccactgcactccagcctgggtgacaaagtgaaaccctgtctcaaaataaaaatgaaaacgagaatggctgggagttgcccaggaaggataaaaggaacaatatgaacccaaatactttatgcccagacagggcatgatggagaacaagggagtcagcagaggtgggatcactggggatggccatggaaaggtgggctgatgcttgattctgcatggcctcatgcctagaaggagtcaggctatgaccaggtggccatggggagccactggagctgtttagacagagatgtgatatgatcagaattgcattctttcaagacatcgctgaatgcagtgtggaggatggctcgtggatatgtgttggaggtgggtgggggtgagtggatacaggaagagggtggaggctaggagaacagctattccagtgttgcagtagaatttattcccattcggactccctgactttgtgtttaaataggaggaaatcaaagctaaattaaaggtaagacttttttatgtttaaggtaattcctctaatttcttatcgttaacttactgtagtccatatattttactctctggactgttctgccaactaccatgttaagacaactaagaaatgtttcaggaggatttttattttcattctgtcttgtttccacagtatctcccaaaattgtagagatttcttcagatatctccattaatgaagggaacaatattagcctcacctgcatagcaactggtagaccagagcctacggttacttggagacacatctctcccaaaggtaagagaacagtttgttgcattgcatcatgaggataaatgggggaattttgggcctttggtaggaggttatgggtgctgatacctactccagaggagtctacgtttttggtggcttgatggtaatctactcatggctctgcagagaacgttgatgttctctgcaaaacagccataccctctaagatttcagaattcatacctcagtatctctccagtcccttggaaattaatctctgttgtctctgggtgaaatggtggtaaggtgttctgggtgaactttacatgttgtttgatgatggaacaaagctttagtggcaattgttcagctggttgttttaaaatagagaaaacacataatgatgggtgagagctttaaatggccatattcctaaaaggagattctccaagtctgtgcctctgcagccttgccaaaaatctggtcacgagctgtttttgtggttttgttgttgttttactccgattgatcctagagaacaaatataacttaatatgtgactaaattgcaaaaatttactttatctgaatgctcagatgttacgtagaccaaagtgttgttttgtgctttcatggattgtacattaaaacctttagaatttgagacaagatgtcatttattattaagctagcttttattt

SEQ ID NO: 5411 - DNA, 6000 bp, Homo sapiens
agggatattaagcaaatgttactagggccctgatcggataatcaactgtaaaagtcattagacaatcggggaaattggattactaggtggtatttgatgatctattaagcaactgttcattgctttaggcatgatgaaggtattgtggttacgattttttacagtcttgtagagatactgaagtatttatggataaaaggtgtttggaatttgtttcaaaataacccagtggtggtggtgggaggtgggggaggagaggaaacagattggtcatgcactagaggacaaagtgacctggccagcaaaccacaccaggcttttactgcatgtggttctctcctgggaggtaccttctgatctgtggaccatccagttccacgtagtcatcagacagattttaacagggtcctctgtgttcattttgccaaaatgttgccccaggagcagtcatcattgaagagcccttttaccagaataaaagcaaggttccacctcccatttcggatgttgccaggctttggtgtctccagtcccaaggggattggttgttggggagctgtcaggcaggtatcagggagtgggtcagggaggaacatgcacagtgctggggaagctgaaagcaagcgagcaggtgtcgacctagttctggacccagctggctgtgctctcagaaatcggccccatgatgggtccgattatttacttgtcattccctgaaacaggtgttcactgctgttcacaaggacgactctgggcagtactactgcattgcttccaatgacgcaggctcagccaggtgtgaggagcaggagatggaagtctgtgagtttcttttttgaagaggtttcatcgcaagactgggaagtgaatagaacattttaatttaatattataccatcagcttagagaactcttccgccatgggttagctttcttctggagctgcctaggtccaccagaacccactgcacagtgaagggaaggctgagaaaaccgagtccagataagcaggtcctcaaaacaaaaccttctgggatctgctggtgttgggaacgtggccagccttgcaactttcactgcaagtttagtaaactccattctttggtaattgatagaattatcaaaatgtaaggtggtgtcaggtctccagaaatttatccagttataaccctcttgtagaaaactgacagttttagcccgagtaattttacctgcagacaaagcttagcccctagagtaatgttatctcagggctctggttcccctaatggaggggcgttgagaggagggtgggggcagagaggatgtgtccaaatcacttggggagcttttttttttcttaaaaaacaaaaaacaaaaaacaccacagggtcttgctttgttgcccaggctggagtgcagtgagtgcagtcacaggtcactgcatcctcaaacccagccttcaagccattctcccacctcagtctcctgagtagctggaacaacaggcacacaccaccatgctcagctaattttattttttgtagatacggggtctcactgtgttgcccaggctggtctcaaactcctggcctcaagcaatcctcctgcctcggcctcccccaggtgctgggattaacaggcatgagccactgtgcccagccaggagcattttttgaatccttccctcctccctatttggagctctcctcagagcagcattttccaaaactgcctggtgatacccatttgggaccactgtttcacatacagattcgagcccacctcagacatatgctagaaatgtctgtgtgtgagacaagcgttccgaaggattcttctcatgtgtcacgtttgagaaactctgctctagggttgttttctcctgcagttttgccccagacctactttagcctattgactttttagtgatgaaacttgggaattgacattttaacatcaaaattgcatgccaggcgtggtggctcacactataatcctagcactctgggaggctgaggcgggtggatcacctgaggtcaggagttcaagaccagcctggccaacatgccaaaactctgtgtctactaaaaatacaaaaattagcctggtgtggtggcaggcgcctgtagtcccagtaacttgggaggctgaggcagaaggatcccttgaacccgggaggcggagcttgcagtgagccgagattgcaccacagaactccagcctgggtgacggtgacggagcaagactctgtctcaaaaaaaaaaaaaaaaaaacgattgcaagtttactttttgtttttgagatggagtctcgctctgtcacccaggctggagtgcagtggcacaatctcggctcactgcaagctccgcctcccgggttcacacctttctcctgcctcagcctcctgagtagctgggactacaggcacctgccaacacgctcagccaattttttgtgtttctagtagagacggggtttcaccaccttagccaggatggtctcgaatctctgacctcgtgatctgcccacctcggcctcccaaagtgctgggattacaggcgtgagccaccgcgcccggcctgcaagttgatttttaagtgtacattcatctttgagaaccaatacactaggataaaggagatttttttaaaacttccaagttacttggctcttgttgataaattccctgcatagttttccatgtgtcgcttgcttgaaggaacggctgccagagccccatatgaaagtgacccagtgcctttgcccagtgtatagacatgagaaaagggttccagggggtttcctctcagagggcttatagatcggaggtcaggcagccggcagagacaaagctctagttcttacctaggattctttacttgtttgttttttgagacagattctttaaggcttgaagctacctttcttccccgcagcaatctgcaacaaagggaggccctggaaattagggattcttttcttcttgggatcctggctcctaatcttgtcctcataaccatttcctccataagtaatctcaggcattcagccagaggatttttaagcctacagtgccaagcccactttaatacacttttcagtgcgactgcatttcaactgtagaagtctcagtacttttcacgtgtgaagttaggagttatggtgtcctatatgttctaggctagaaggattgtaagtgttctctcttctagctggggtaggcctgagggggcagggggcaagtgggtttggggtgaaggaaggaggcacagcagggccagggcctttttaaataacagatagtgtgtatcatggcttccaccaaacctccttttcttcagatgacctgaacattggcggaattattgggggggttctggttgtccttgctgtactggccctgatcacgttgggcatctgctgtgcatacagacgtggctacttcatcaacaataaacaggatggagaaaggtgagcctgccttatgtgaaaaaagggaagttcaagctggcaataatataacaaccctgttgctaaactgctctcttctcctcatagttacaagaacccagggaaaccagatggagttaactacatccgcactgacgaggaggtaatcatttagtaaacctggaaacctaggtgtacccagcagggaaaacaacattcccccttggaaaccacacgggtctcctgggaagatttctgagtgattgtgcagctcctgagctcctcagccccttcacagtaacacacacacacacacacacacacacacacacacacacactaatgggatttgtgctttgcaagcgctagtgatggtactttttaagaatgattattccatctgtatttagcccatgttagacttactccgtgtttttccctgcttgccaccaggccccttgatggctctaactgtgtgttggctttgcagggcgacttcagacacaagtcatcgtttgtgatctgagacccgcggtgtggctgagagcgcacagagcgcacgtgcacatacctctgctagaaactcctgtcaaggcagcgagagctgatgcactcggacagagctagacactcattcagaagcttttcgttttggccaaagttgaccactactcttcttactctaacaagccacatgaatagaagaattttcctcaagatggacccggtaaatataaccacaaggaagcgaaactgggtgcgttcactgagttgggttcctaatctgtttctggcctgattcccgcatgagtattagggtgatcttaaagagtttgctcacgtaaacgcccgtgctgggccctgtgaagccagcatgttcaccactggtcgttcagcagccacgacagcaccatgtgagatggcgaggtggctggacagcaccagcagcgcatcccggcgggaacccagaaaaggcttcttacacagcagccttacttcatcggcccacagacaccaccgcagtttcttcttaaaggctctgctgatcggtgttgcagtgtccattgtggagaagctttttggatcagcattttgtaaaaacaaccaaaatcaggaaggtaaattggttgctggaagagggatcttgcctgaggaaccctgcttgtccaacagggtgtcaggatttaaggaaaaccttcgtcttaggctaagtctgaaatggtactgaaatatgcttttctatgggtcttgtttattttataaaattttacatctaaatttttgctaaggatgtattttgattattgaaaagaaaatttctatttaaactgtaaatatattgtcatacaatgttaaataacctatttttttaaaaaagttcaacttaaggtagaagttccaagctactagtgttaaattggaaaatatcaataattaagagtattttacccaaggaatcctctcatggaagtttactgtgatgttccttttctcacacaagttttagcctttttcacaagggaactcatactgtctacacatcagaccatagttgcttaggaaacctttaaaaattccagttaagcaatgttgaaatcagtttgcatctcttcaaaagaaacctctcaggttagctttgaactgcctcttcctgagatgactaggacagtctgtacccagaggccacccagaagccctcagatgtacatacacagatgccagtcagctcctggggttgcgccaggcgcccccgctctagctcactgttgcctcgctgtctgccaggaggccctgccatccttgggccctggcagtggctgtgtcccagtgagctttactcacgtggcccttgcttcatccagcacagctctcaggtgggcactgcagggacactggtgtcttccatgtagcgtcccagctttgggctcctgtaacagacctctttttggttatggatggctcacaaaatagggcccccaatgctattttttttttttaagtttgtttaattatttgttaagattgtctaaggccaaaggcaattgcgaaatcaagtctgtcaagtacaataacatttttaaaagaaaatggatcccactgttcctctttgccacagagaaagcacccagacgccacaggctctgtcgcatttcaaaacaaaccatgatggagtggcggccagtccagccttttaaagaacgtcaggtggagcagccaggtgaaaggcctggcggggaggaaagtgaaacgcctgaatcaaaagcagttttctaattttgactttaaatttttcatccgccggagacactgctcccatttgtggggggacattagcaacatcactcagaagcctgtgttcttcaagagcaggtgttctcagcctcacatgccctgccgtgctggactcaggactgaagtgctgtaaagcaaggagctgctgagaaggagcactccactgtgtgcctggagaatggctctcactactcaccttgtctttcagcttccagtgtcttgggttttttatactttgacagcttttttttaattgcatacatgagactgtgttga

SEQ ID NO: 5412 - DNA, 6000 bp, Homo sapiens
gcagagcaacctgctgagtgtggctgggcgtctgggtctggactggccagccgtggccctgcacctgggggtgtcctaccgggaggtgcagcgcatccggcacgagttccggtgaggctcccactgcccgctggctgccagccccagggctgagccctggctgcctggagggcccacctgattctgacagaagtttcttccaggggaggtgggggaagggcaaacaccaggctggaaaggaaaggtctggccgcacctggccccaggagccgggaactcccccacactccgaggcagagtgtggtggggggtcctgggcaggtggacaggacccctctgtcgcccatcctctgcctgcagggatgatctggatgagcagatccgtcacatgctcttctcctgggctgagcgccaggctgggcagccaggggctgtggggctcctggtgcaggccctggagcagagtgaccggcaggacgtggctgaagaggtgcgcgcagtcttggagctcggccgccgcaagtaccaggacagcatccgacgcatgggcttggcccccaaggaccccgctctgcctggctcctcggctccacagcccccagagcctgcccaggcctaggccccacagacttttaggctggcccagatattccccagtggatgggcagagcccccaccttcaagtctctccagtgtgtggggacgggtccctgtgagcaacaaaactgcactgtttctttcacctcagagcttgatttatttgttggatggagaagccgttggagggcggagggtggtggggtagaggcctggcccctgcggggagggaggcctgtgtgcacaggtgccccacatcctggtcctgtcctctcccactgtgcctggggcctcctgtgggtcctcatcttcctgggagggaggagctgtgctacaaagtaacccacatgggctactttttttttttttttaaatggagtttctgtcacccaggctggagtgcagtggcatgatctcagctcactgcaacctctgcctcccaggttcaagcgattctgcgtcaccctctcaagtagctgggactagggcacttgccaccacgctggctaatttttgtatttttagtagacggggtttcaccatgttggccaggctggtctcgaactcctgaccttaagtgatccgcctgcctcggcctccaaaagtgctgggattgcaggtgtgagccactgcgcccagccccaagtggggtgctttggatacaaagtcgctgttcggcgggtggggttgtgcctccacttctccattgcgctggcccagcagttccacggatcacctgtgtctgccctggaggccacgcctcccccagggcaccctcatccaccggcgctctgccacctgcccgcgccccgcgggtccttgtgcctgcaggggcctgaggcccggaaaccaagaaaggaccttggggacgcgcggcccggcctctgcgcgcagaactgccaccctgcccgggggaacccacggccagggggcgggtgggcgcgtggctgtggcctggctgggcgcagtagcctcgacggccaggagggggagccgaagcccggaggaggccgagggcggagcgcgcgcggcgccgagcggacgcgcctccccgcctaggtgctggccgagcgcggggcgggcaggcgagcgcggcggcggcggcgagcgtggtgagtgtctgcccggcggctcccttctgctgcgcccatccgaacgcggccgggctgcgggggcgagaggtgctgcggcggccgagggaggtgacagctgcccgaacaacgtggcctggcgggcgggagggggggtcctggaccagcggatgctccgatccgcggctgctctggcgtgagacgccgtgctcggccccgacggttccgggcgcgctccccgcacatacgtgtccccgagggtgggtgtccggggcccgagcccaaggaagaaaggccgacccgtgtgggacgcacacgtgggagttcaccggacatctgtggacacgtgcgtggccggagtcgcggtggccaggcggaggacggagcggtcggctgagccccagcagtagggcaggggcctgagccggcctccgagcgcagagagcggcccccaacccgcttctcctttgtcctctggccgaggcatcgcgcagttggagtccccttccgggaccctccagccagcaggatagaaagcaccgccccaagaggacggggacagcgggagattgaatggggagccgccggccagactcggagcctcacccccattgcctttcttgggggtaggaggagcctggcggcttcttgggtggaggattttacccctgcagattcggaagcagcggtatcttcctgtggggtggtctctgctctcctgctgtctccctggcttgcctgtggcctcagttcacctgactatgaaggggggacagtgacggctcacagcccggggcccggctggggctgcagggtttctatagcaacatcagtgcagggggagggccctggccagctgtctcataaaccaggggtgggaactgccgagtgagggcagagaaaggcggggttggcgttcagagggaacccctgccggttcttccccaggcagagcccctcactgtcatcattctccacccagaagctcctctccgctgcactgggtgacgtgcgggcccaggcctgcctctccgccctgggatctctgggcctgcttctcttcttgggacgaatggccgctccccacctcggtcggcctgacttccaggattgcccctatcatgcaggtgtcctcatcccagactggagataggctcccaggaggaagggggttgctcagtccctggagggccagggtacacccctgggagggactagagtggagatgaagggcccagcgcagcccggagagctgtggccagtctgcacccgaagagtggggcggcaggggtggggggggctaggagggatcaggtagaagttcagaggtcagcttgtcaccaccactggctgaggcagggaaaggcaggtctgacggtgaagccctgagtgggacgggtggtggggcagagggctctgggcatgccagctcgtgtgccctctggacctgccaggtgagcagggcctgtgggtggcaacagtggcctctggcacccagctagctcttccctgtggacagcaggccttttttgtggcccagcatgaggcttccctgacatgcatctgcccctagcagacacacatcccacagacacgagtgggtgttagcccatctctgctccacagcaccggattccctgtccaggtacatacagggtaccctggcccggagaaagcctcattctcagagtaccagccctagacagatccaggccaggaaatgctatagggttcaacccacaggcagcagacaggaacacatgtgtgctgggggtgtggtggccacgcgctgaggtccctgtcggtgggtggcctcgctgtgccaggtcagcctgagtcagacccacccctgctcatctctcctctcaaggctgccggaagcctctgcttgcccaaagtgaaagagaaagtgcccccccacccaagcccgccccaccccgccccacggccaatccctgcggcccctcgcctcctcccccggcagcttccccttctgtgtgagtgctgggctggagtgtggaagagccatccagagtgagtgcctggggcagagtgagagcaggaccagcgggcaggtggcggagcgggggtcggtggtggatggcccagccctggaaagccgaggtgaaggttacgagtccctgaggatctgtgggtgtgagccagccgcgtggccctgggcaacggcgctgccggtgggtgaaacagctggcctctggggggcccagggaggggggaaaggcccccgaagctgggattttatggccatgaccctatgggaggcccctgaggctggctgtggctccccagccttgctgcttagtgggagaggcctgtcctctcctcctctgtagtggatgggggtgccagccacagggggcctcagaaggccagccatcccccacccccaaggcttccaggggtcccatcactggcttctgtgtgtccatgagtgaaactcctgggaggggtggaggggaggaaggggcgggcaaggggctggctgtggggggtgtgggcatcgtggggaggagctctgcaggccctaggtggagctgccatgggaggagagctatacctgggatagctgagcccaggtcggggggtcttagggcgcccgggaccccagcccctagctcgaagggggcaggtgccggctgctgctctctctgtgctgaaggatgtgggggatggtcaccacagctgtccaggtcgaggtgctccggtaggcaccctggccccggcccctggcactgcccccagaggtgcctggccctttaaaagccggagctggctggggtgcacgtgagccccgagcgtgagcggcgtgtgaggctggctgggaagacgctggcggtggggagggggggactgaaaggaagccaggtggtcccaggggtgagcatgggactgggtggcaggtgcctcccgctgctgcaccctcaggacgcagtgacggcttcagtctggggtggtgggtgaggggctgcgtgagagagggaggctgggggaggattactcttcgggtggccccaccctcactcattcccattccctcatccttctaggacagaagtggcggttgctgacgcctggaaattcccctgaaggtggagcaccacccaacccccctgggtcccaccctccctcaaggcctcctccacctccacctccaccccgcctggcctggcgtccacctctgcggctcctacctgggtgcaatcgagttaaatggctgataagcagatcaggtcagactccagtcctggctgcgtgcctcacccccaccctgacccatggtcaaggaagccggtcctgacacccctgtccacacagcctgccagccaagctcatcaatggcggcatcgccgggctgatcggtgtcacctgcgtgtttcccatcgacctggccaagaccaggctgcagaaccagcagaacggccagcgcgtgtacacgagcatgtgagtgtgccgggcggtcgcggggagtgggcccagcatgtggcagcaggagaggtgggggctctgctcctgtgccccccaccctgtttgacagaagggaaacgggaggcaggcgggcctaggggagatcccacgtgggtcaggactggggtcggggctgggctgaggacttggcctcttctatcagccctagacagtccagggaccctggcctccggctggccccagctggccctggctcaccctgtccccttggccacaggtccgactgcctcatcaagaccgtccgctccgagggctacttcggcatgtaccggggtgaggtttggctcggctgggctcgatatgggcaggcctgggtagcgcccgcgagtcgtggcagggagcggtgggggaggcagggcagggcggccagcctgggcctggtgtgtgagcgtggacgtgtttgtgggggctgtgcctgtgcaggggggactggatctctggtgagtggtagttctcagcctctcccgtggcagctccccacccccacttagtgcctggtgcgtgggatgccatggtacatctgtctcttctctggtggccacagctgcctctgccttctgggccaggctggaccccgtttgtggctggggatgggagggagtaaggggcattaccgcaaagcagcttaggacacaatccagagcctagatttggcagaagctctccagccctgagccttcggcactgagatgggggctctccacagcctcccccgagctctggcccagtccagaccacacactcctgtgacctctggccccagccccctgccagcacaagcaccatctgtcctccagggagggag

SEQ ID NO: 5413 - DNA, 6000 bp, Homo sapiens
atttgctctgcaagggttcagaaccatgaccatggaggaaacaaagctgtgatgctcactcctcctgaccaagtgtttctgatgtttcttcctgggatcagcagccaggtgaccttgcccttcaccctgagctgacagactggtatctgtagcccccaggggcttgtcccagctctgtggccagcccctacaggaagatcacaccacaccgcaaccaacacacacacacacacacaaacaccagcaaatggtctcagctaaggttctctgagaaacctcgctgatgtccttggctttttactcttcaggcttgcagccaggaaataaaccctggagatgagctcttaggagcaccaggatgtcgtctctctttaaatcaatcatttcacaaaaaaagctctgttctttattttcccatctccatcataatagcatctgctcgaaatcccaaatccttgagatacggcacttgggcactattcctatacccctaaaaggattacctttgctgatttaggtaaggggataatatccagcttttgctgagagattccaccacaattaggttcatgaattcccatttgctcatttactctaacgatgagactaaggtccctggctgcataaatcctaaaggtctaacatcaggaaaacctcctgaagacttgctcttagagctaagtgctagaactacctcacattttttatggaagtgaatagggaaaaaggagaaaagggccaggtgcagtggctcatgcctgtaatcccagcactttgggaggccaaggcaggcagatcaccaagtcaggagttcaagaccagcctggccagcatggtgacaccccatctccactaaaaatacaaaaaaattagctgggtgtggtggcgtgcacctgtaatcccagctactcaggaggctggggcaggagaattgtttgagcccaggaggcagaggttgcagtaagctgagatcacaccattgcactccagcctgggtgacagggcgagactctgtctcaaaaaacaaacaaacaaacaaacaaaaaacaaaatgagaaaagaaaggagggaatggaaagaaagtagtataagcttgcaaaaaaaaaaagtgacatactttgctacttcagatatactagtctgtttcttcccctctgagatacttatttcagcattcaacaaaaatttattgagtacctactatgtaccaggcattgtcctggacacttaagatatatcaatgagcctaacggatgcagatgccctgtggaccttgtattccagtgggaaaaaaacagatatttaacagatattaaagggtgaacatacaaaatagataaactacctaatctatagctcgtaaataaatttattaatatagaatatatgtcataagaaatatataaaatatgagatagatattataacatagtttataaagaaattatccagtacattagaaggtaaaatgtgtcattataaaagaaaaggagagattgggactcctgaagggaacgggagaaggcaggctctgacgtattaggtagagaggtcaggggaggcctcaatgagaaaatgacagtggagcaaaaacttgaaggatataaaggcattagttctatgtaacagattgtttctttttggcatcccaaatgatcagaaccaaatttgaggttcaagcacagtactctagaggcccctgtggtctgtacgtttgtaatcttttgtcctcgagaggcaggataggacagtggttaagggtatcggttccactgtcaacctggattcaaatactgcctctaccacttaccagctacgtgacttagggcatcatatttcatgtctcccagcctgagagaaatgcctccctatgcttcaaaatgaagataataatagtacttacctcacatggctcttttaaggattaaatgaaataatgtacacaaattcctttgcacacaagaataaactcaataaaaaaacagctgtgattattgagctttggtcatgtcactcaacgtttatttacattttctttggtcctgattctttatcctcattgatattttaacattgttttatggatcctgcccctttggtaagctacttcaaatcctttgtggattggggtaagttataagtaagtaaataaatacataaataaaaatctggatagggggacattttcactgaagcaaagcatttcattaccaagacagtgaattgcaagtgggccaaaagcaagaaagatggactctaatctctaacagtccaccaagaaccaccagtaaaacactctctggtttctcagaccatctttttctccccatctcctctttcttaaatccctcttcttccctctatcatgaaagggtaaatgagttacacaaaacggctcaagaagactcctaagtcgtcacaacctcacaactatttcgttgccatgggcctcacaggactcttcctcatcagagaagagaaaggaaatcaaagcagtcactttccgtgtgttggcagggtgctggttaagtgaacagagtcagacataagctagaatctcgtttagtgagctctgtggccttgggaaagcccctggacctttctgtgcctcctattcctccttggtaatagcagtccctcctaaggtgttttggcagatcaaacgagagaatgcagggaagcaacgtggatagcttatttttaaagccctcagaaaatgctagatttccttcctgaactgcaccctggggtaacactcttcaataagagggtgtatagggtggaaacagggtgaggagactagtttaggtatatccctatctgacagaaactcaatacaagaaacaaaagaagaaagatctttgttgttgctgttgccttactactttctagaggtattgtcatacttcttccttcccatagccctttaagatgggcattattatccacatgtgacagctggggctgggctttgaacccagagcacacagctaggaatgtttgcgaggcaccgctagctttccgaagttgcctttacaagggcagccattagcctccaccacaggacatcagaggcagcactgacaggaacctgtgaggccccagtgcacctggagtaccatgactctgtgacccctgagctggggacatcaagaatctgggccaggctgatgccactgaagctctctaagccctactttctccccttccttccatcagcccaaagggctttcatgttaaggcatccctgcttctgtgaccacgtgctatggaactggctagatctgaatttgaaacacacacctcttaagtgaccttaagtaactcacttattccttctgcttcctctactgaaattggggatgtcaaaaggcctacctcccacagatgtcatgaagattcaatagagcagtgccttgagaaaacacaaaacactacctggcacatactaaagtgcccatgtatagtagctgctattgttcaactgatgcagcctggagaaatcagcctcatgccgaaccatggtgatgatgctctcggggggtagggagcaggtcctggcgtacaggctgaaatgtctactcacacttccacacaacccaagcagtatggcctttttacccaatatataatcctcccccaccccacaggaaactccttgagggcaacacagggacctaattgggtctaggtctctaggtcttttcctaggggaaaaaaaaaaaaaaaagaccaattgaggcccagcctagggcctcccaatcagtgccgttgatccacaaacatgtgctgatgggcccttctgtgctgggaactggggaaagggaagacaccccgccctactttccaggagttcatagtgcacctggggaaaaagagaaggaaccactatcacagcagacagaaagtaatgagagctgagtgtccctggaaatgtggggagaaggaggtggtatttaagctggaccttaaaaattagtcaagacatgggagggatggcattccagactgaacagggacaacgtgaacaaaggcctagagacaggaaaacacagggtttgtttaaaaaacagattagtgaggtgaggctgaaggattgggatgggaggggattgagatgggagctggcaatgaagccagtgagcctcaggggcagggaacagaaataaaagtcatagctgcatggagaaaatgaggagggagggccagcaactttaaacaggatagttacagcaattatcttagaagcgacacattgagcctgggcagggtggctcacgcctgtaatcccagcactttgggaggccaagacgggcggatcatgaggtcaggagttcgagaccagcccggccaacatggcgaaaccccgtctcaactaaaaatacaaaaattagctgggcatggtggcgggcgcctgtagtcccagctactcggaaggctgagacaggagaatcgcttgaacccaggaggcaggggttgcagtgagctgagatggagccactgcactccagcctggacgacagagcaagactccgtctcgggggcgggggggtggggggagtgacactttgaagaggtaaaggagtagccgtgtgactatcagagggaagagtttccaggcagacagaccagcagtgcaaaggtcctgaggccacagggctgccacgccgatgatgcattaaaaaggccaatgtgactggagcgtgggagaagggggagggtggtagaaagagaggttaaagagctaaaaaggagccagttcctgaagggctttgcaggtcatgaggggcctttaactttcccttggatgaaatggagtgctagtgtaggatttccagtaaaggaacgacgtgctctgacttaaattttaaaggatcgccttgactgctgtgtagagaatcagctgcagggggccaagggtggaagctgggagaccagtaaagagactataatggaaatcccggggggcgggggtggatggtggctggaaccagggtggtagctacgtggtggctcgcctctgattccccgtgtaaaaaatggagtttaggatccctgccctgtgtgcagcccacagcctcaagcccccatggggatggaatgccggaaacctctggccagcgcactagcagcctggagaatacggaagattgtggcaggattgtggggcacatgggcagctccctgctcgtccgggcccctggtgcccacgagaaaaccaaaacaggtgcgtgccccgcgccgcacgtcaggagggcaagactcagtggagggaggggctgtccactcgctctagctccccagaggctgaacagggagaactgggaaaaaggacgcctcctcagcgtcctagaacgagtcctcggcacctggtattgcatgcgccctagtatggggccgctccacttgcgcaggtgttggcaacatgcggggagcgccacggcatgcccccaatgagccgactccctcccccaactctgccccctttgtctcgctggcccctactccttctgtctgcctgtctgtcccgtcccaggttcagcgcgcacggccctgccggggtccctctggcagttgccgtagccgcgcggcccgacccggggctcccaagaggagaaaaaatcatgaatgaaatggatgcgctgctcccactcctccgccctccttgtccaagcaaccttggcatgggggcgacgactgcggagactccgcgcagagttgctcgggagagggaggcacctgagatgaggtcaggggttaagggtctgtgatccggcccccttcgtgccccgggagcaggccgctctcccggtcccccgccccgccagccctgcgcaattcccggcgagcggcggaagcccgcccgggggcggggcggagccggggctggggggtgccaaacccacccggcggctgcgccagcgactctgcagctgaagcgcatttggtgaggcggtcgggcgagggagcgcgcacggagcgcgggacggagcgccaggc

SEQ ID NO: 5414 - DNA, 6000 bp, Homo sapiens
tacttggagtatatacttctggcctttattttcctgtgtgcccaaggctatttttccaaaaatgggaccatgatggcgtgttttttgtagaaacttttccagtattactgaataatctaatgatttttaaaatgaagtttcaaatattttaaaaataaatcatccatgtggcaaattaaaaaaactcaatagaaacataaacgaagtgtattcttccatgatgataacactattaaattacttgggaatccttccagagaaaaataaatgcacttacctcaatgtatatgtgctttatttccacaaatgggtcacattctatacactgttctgcatctagggtttttattgagatataattcacagaccagaacgtttacattttaaagtgtataattcagtggctcttagtatatttacaaggttgtatgacttatcgcaactgtctaattccaggatctttctgtcaccttgaaaagaaacctgttagcagtcagtcctcattcctccctcctgcatgccccagcagtgactgatgtactttctgtcttcatagatttggctctcctgggcacttcatatgcaaggaatcatacagtattgtggcactttgcgactagcttttttttcactaaacataatgtttccaaggttcactcatgctgtggcatgtatcagtacttcattctgttgtggccacatagtattctattgtgtggatatatcacattttgtttatccattcaccagtaatggacatatgggttgtttccactttttagcaattttgaatcatggtgccatgaacattcatgtggaaacttgtgtgtgaacgtagttttcaattcaaactacgataagatacttggagtgtatacatctggcctttattttcctgtgtgcccaaggctatttttccaaaaatgagaccatgatagcatgttcttatagaaacttttcctgtattactgaataatctaatgatttttaaaatgaagtttcaaatattttaaaaattatccatgtggcaaatttgaaaaactcaatagaaacataaacgaagtgtattcttccatgatgataacagtattaaattacttgggaatccttccagagaatggcagaagtatatacacttgtgagtggaattgctcagtcaaatggataactctatctttaactttttgcagaaatgccaaatttgtccagagtatctacaccattttacattcccaccagcaatgtttgagggttccaattttttccacttccttgcaacatttgctatttaccattttcttgatcttagccatcctagtgagtataaagtggtatctcactgtgattttcatttgcatgttcctaatgactaatgatatcaagcatcttttcatgtacttattggccatttgagaatcttctttggagaaatgtttattcaaatcctttgcccatttttttttaaagaggcaaggtcttgctttgttgcctaggctggaatgcagcagtacaatcatagctcactgcagccttaaagtcctgagtccaagtgatcctcctgcctcagcctcccaagtagctaagactaaaggcgcaacaccctgcctggctaatttttttattttttatttttgtagagttgggatatcactatgttgcccaggctggccgcaggcaatcctctcacttcagcctcctaaagtgctgggattacaggtgtgagccatcacactggcctcattgtccatattttaattgggttagtctttttattgtagagtttaagaatgttttctatatcctggatactatgctcttacatatgactttaaaaaagaaatagagagggggtcttgccatgttgaccaggctggtctgaaacttcccgcctcaaacaattctcccatctcagcctcccaaagtgttgggattacaggtgtgagccaccgcacctggtggtttacatgtgatttgcaaacattttctccctttctgtgagttatctttttattttttgataatgtcctttgaagcacaaaagttttaaattttgatggagtccagtttacctatttttctgccccccccccacctttatttttttttttttaaatcaagctccttccatgttagcacttgaaggcccacgtcatttcttatctgcatggaacttgcattgtaaggaattctattgtaatttctttaacactttttaaaaattaatggactgggtttttcaggtttttttctgaccattcttgagcatatatcttatacatagctttggctgggcatggtggctcacccctataattctatcactttgggaggctgaagcaggaggaccacttgagcccaggagttcaagaccagatgaccgggcaagaaagtgagaccttatctctctaaaaaaaaaaaagaaaagaaaaggaaaaaatccccaagtaacttcatagcgtaaattctaaaagtggaattgctggatcaaagggggcatgtgtttaaaatcttggcagatattaccaaatttccctcttaacagtataaatgcctgttcctcctccgtcccacccccataactatactggctctgatgagaccttggttttctgtaaaagctctatttagaggtgtatcattatttacttaattgttctcctttacaacccacctgggatgagcatcttgcctagaagtctctacttgcacaggatacatacgaaatagaattgaggattcaaaagcagatacagaactcttcccacttactttcttacccttgtgtgtgtctccccacagggttacaagtgtataacaagtgttggaagtttgagcattgcaatttcaacgacgtcacaacccgcttgagggaaaatgagctaacgtactactgctgcaagaaggacctgtgtaactttaacgaacagcttgaaaatggtgggacatccttatcagagaaaacagttcttctgctggtgactccatttctggcagcagcctggagccttcatccctaagtcaacaccaggagagcttctcccaaactccccgttcctgcgtagtccgctttctcttgctgccacattctaaaggcttgatattttccaaatggatcctgttgggaaagaataaaattagcttgagcaacctggctaagatagaggggctctgggagactttgaagaccagtcctgtttgcagggaagccccacttgaaggaagaagtctaagagtgaagtaggtgtgacttgaactagattgcatgcttcctcctttgctcttgggaagaccagctttgcagtgacagcttgagtgggttctctgcagccctcagattatttttcctctggctccttggatgtagtcagttagcatcattagtacatctttggagggtggggcaggagtatatgagcatcctctctcacatggaacgctttcataaacttcagggatcccgtgttgccatggaggcatgccaaatgttccatatgtgggtgtcagtcagggacaacaagatccttaatgcagagctagaggacttctggcagggaagtggggaagtgttccagatagcagggcatgaaaacttagagaggtacaagtggctgaaaatcgagtttttcctctgtctttaaattttatatgggctttgttatcttccactggaaaagtgtaatagcatacatcaatggtgtgttaaagctatttccttgccttttttttattggaatggtaggatatcttggctttgccacacacagttacagagtgaacactctactacatgtgactggcagtattaagtgtgcttattttaaatgttactggtagaaaggcagttcaggtatgtgtgtatatagtatgaatgcagtggggacaccctttgtggttacagtttgagacttccaaaggtcatccttaataacaacagatctgcaggggtatgttttaccatctgcatccagcctcctgctaactcctagctgactcagcatagattgtataaaatacctttgtaacggctcttagcacactcacagatgtttgaggctttcagaagctcttctaaaaaatgatacacacctttcacaagggcaaactttttccttttccctgtgtattctagtgaatgaatctcaagattcagtagacctaatgacatttgtattttatgatcttggctgtatttaatggcataggctgacttttgcagatggaggaatttcttgattaatgttgaaaaaaaacccttgattatactctgttggacaaaccgagtgcaatgaatgatgcttttctgaaaatgaaatataacaagtgggtgaatgtggttatggccgaaaaggatatgcagtatgcttaatggtagcaactgaaagaagacatcctgagcagtgccagctttcttctgttgatgccgttccctgaacataggaaaatagaaacttgcttatcaaaacttagcattaccttggtgctctgtgttctctgttagctcagtgtctttccttacatcaataggtttttttttttttttttggcctgaggaagtactgaccatgcccacagccaccggctgagcaaagaagctcatttcatgtgagttctaaggaatgagaaacaattttgatgaatttaagcagaaaatgaatttctgggaacttttttgggggcgggggggtggggaattcagccacactccagaaagccaggagtcgacagttttggaagcctctctcaggattgagattctaggatgagattggcttactgctatcttgtgtcatgtacccactttttggccagactacactgggaagaaggtagtcctctaaagcaaaatctgagtgccactaaatggggagatggggctgttaagctgtccaaatcaacaagggtcatataaatggccttaaactttggggttgctttctgcaaaaagttgctgtgactcatgccatagacaaggttgagtgcctggacccaaaggcaatactgtaatgtaaagacatttatagtactaggcaaacagcaccccaggtactccaggccctcctggctggagagggctgtggcaatagaaaattagtgccaactgcagtgagtcagcctaggttaaatagagagtgtaagagtgctggacaggaacctccaccctcatgtcacatttcttcaatgtgacccttctggcccctctcctcctgacagcggaacaatgactgccccgataggtgaggctggaggaagaatcagtcctgtccttggcaagctcttcactatgacagtaaaggctctctgcctgctgccaaggcctgtgactttctaacctggcctcacgctgggtaagcttaaggtagaggtgcaggattagcaagcccacctggctaccaggccgacagctacatcctccaactgaccctgatcaacgaagagggattcatgtgtctgtctcagttggttccaaatgaaaccagggagcaggggagttaggaatcgaacaccagtcatgcctactggctctctgctcgagagccaataccctgtgccctccactcatctggatttacaggaactgtcatagtgttcagtattgggtggtgataagcccattggattgtccccttggggggatgagctaggggtgcaaggaacacctgatgagtagataagtggagctcatggtatttcctgaaagatgctaatctatttgccaaacttggtcttgaatgtactgggggcttcaaggtatgggtatatttttcttgtgtccttgcagttagcccccatgtcttatgtgtgtcctgaaaaaataagagcctgcccaagactttgggcctcttgacagaattaaccacttttatacatctgagttctcttggtaagttctttagcagtgttcaaagtctactagctcgcattagtttctgttgctgccaacagatctgaactaatgctaacagatccccctgagggattcttgatgggctgagcagctgg

SEQ ID NO: 5415 - DNA, 6000 bp, Homo sapiens
tgctggattattccccatcaaaatgttagtttgaatcaacaagggtcaataatcttgtgaatggctttatgttctagtatatttaagtacttattgtgtgccttgtaagattcagttgagtgcgcctgtctcattcctgtgagatcctatattttgattattcatccagtatttattgaatgcctattatctataaagccataaattaggcactggaggacagcaaaaagaatgtataatgttgtaatgatgataagacttgaactcaaattattgccatatgaggaaaaattatgtaaaacaaaaaaatcacaattttttaaacatttcataattatatttgagaagaatcctagtggttaactgcgtatggcccttttggaatttctcaagaggcctcttaatattttgtaggacactttttgaaaaagaaggtgtgggcgtggagatgtctttagatttcagacttcctggatttgtttttgaaggacatcaagcacctgaggataaatttgcttctttttcttttttttaagacggagtttcactcttgttgcccaggctggagtgcaatggcgtgctctcggctcaccacaacctccgcctcccaggttcaagcaattctcctgcctcagcctctcgagtagctgggattacagtcatgtgccaccatgcccagctaatttttttgtatttttagtagagatggggtttctccatgttggtcaggcttgtcagtaactccttacctcaggtgatccacctgcctcggcctcccaaggtgctgggattacaggcgtgagccactgcacctggccaatttgcttcgttttttaaagcaaactatttcaagccctataaggaaatgtgaattatccatattagtagaaagtaagctcattaggagtaaggctttgtccccagttatactactgtgacccagccctaaaatagtgtctggcatgttgtaggggactcaataaatatttgttgaatggatccttttagcatctttagtccttgctgtgttttaggtaacctttttgctggacagttccatagagatagtggctcagtctctatgtaaatggttagccagccaaccacctgcaaactcattggttaattagcctttaggtgaccagtggtcaagctgagcaggtcttgaagatgatgaaaatagctctattggtttatcaactatttcagttgtttacatttttaatgaaattgttgggttcagcttagtgaaggctatttgatcctcagcctttgctaggtaaagcaagttgattcttctcactctaaatcagttaactgtgttgatgctggtgtgggaaggaggcagccagagccatggagataaatttacaccctttctgaggatatctgggtcacatttacttattcctttgaacttccttatggttaattctgtctcactatttcccactttttaaaaactgagatgggagatgtcagcgcttgctgccaatgccatcctctttttcttttgtattacccaagtggttggagcagagagaagtgggacaggttggggaatggagtcctggctttctttagcccagccaagaaaggaaacgccaaaaaaatctgctgtcccagattcttttgaaacataggccccagtatttacaaacaaaaaaacaaaacaaaaacacttccccccaagtgctgtctggtctttcaaaggcaccacactgtgattgataattttgtaccactattgatgcggttcatcgctgagagccaaataggcacattcaaggttatagtgaacagacaactttctctgggcagacagtctgtccctggcaatctttcttgacagttcactgaaagggaaacaaatttgctgcagctctggtcaaaactttaaccatttcaagcattgttatgtcttgttggtctgtgtattcaaactcttgcctggtaatagtagtttgaagttacacaatagttttcaagtttaatcagaataactgcatgtggagcagtcattgctaattgcatggtctgtttttctgaaaaaaattggggggctaatggggattggataaatggtttttattttcctttgcttgattcgttgaagggcacttggttttctgttcctagcatgttgtatgtggtcatgatgcatgcatttcacttccacttgggtaagaagaaagtcagatttctttcaaacattactgcgtttgtcacgtctccatattctaatgctttcataaatccagtctctccattatgtggaatatcagtcgtgggtttaagtttgcacatgacgttgaggacagacagacagaaggtaagctaggaaaactacttagaagtggaggggaaaacctcctattctgcaaaaaggttcagttcactttgagccagggaagcataatatagatggtctggtaattttatctgattattaaatgtctgcattgaagtaatttagataaacattgtcaccaatctcagacttttaattctccctacttttctttttaatctttaaagctgggatagcttatttggcacagctgaaatgtcatgatttctgatttaaaaattagacacgtatgccatctacctggtgtcattgcaactgaacctttcacatgcatgagtagaactagatacctagttctggatttcttcctctgtggttgtatggagtagcacatgggcactgtattttaaggactgtgttattgtgtgatggatctctgggtagttagacaccccacaacactaaaaacatagtagaagttattccccaaattacaaagcagctttaataccttgatactcccaaggcaaatatggatttttaaaattctcagatcactgttgaaacccaagacaggttcaaattcaatttggaaagaactccatttaaaactaatatttcagtcatgtagtataatcttggatttggtgcttctccacataacccacagggcttttttctggttcgtggtctgtaagctggatgttgatgataattattttcaggtaactctggcagccaatggaaagtcagccgactgcagtgttgaggaagaaccttggaaacgtgagaaataaggatatgagtctcagcaaattcttgaataaactccccagcgtatcctatggtaactgatgatataaacaagctttctttaaaaaggaaaaaaatgcgtatatttctatgtttacttaatctgttagccgaggcttagaggagctcttgtgagtcagtgatgacaggcacggtgctgtgtctttgccaaataatgctttataaccgtctaattttctcacttgtattattatttgaatggatgctgctggaggaatcagttggaattgaagacacgttcttgccagcttcccttttctcccaagatgcagaaatgtggatgctcttttcccaggggacatgagtaaagcagtgtggtacactccagggacttgggaaaatgagcaaacacacagcgtgttattccttaaagtgttctccatgtctcgccttgttatgcacaagagattctattaaaagcctctagaagtaactccccttaaaatgtctagtaaagcttgcacatggattgattaaaagcaaatacctgtcttagggaattctgacaatttatcttccatatgctctttaagtaaaatgtttcaaagacagttttaaagggagccatgctcttaaaggcagttgattaaagaacctgttacatctctgccttaccctgtgtaatctgtgagaacaatggttgaaatttcaaagtatgtttcattattctttctaaatttgataattgattaggaagtattttatatataaccactgtagatattgacaaaagtaagagagcacagtcaacataaagtttaaccagagttaaatattcaaatttatttatgttcggtttgccttcacctggtgtagtaaaatcaaatgagattatttggtatgtgttttgctttgtttaacccaaaagattattttttggttcctaaagaaaaagatatttttaatctgtcaattatttcagtcatcatctcatcgtcctagaaagcctggtcattttactgtcctcacacatggaagacacttgtgttggctgtgcctcttttaatgtcatctcttgatgaaacaaaaatactggtatttatccaatatgttgaaagcgttttgttatcttctatcaaagcacataaaaccagttataggacacagttggaagcagagccagtcttcctcctcagtcttctcagtagaaaggaacagaaaacaaacatctgtgcaaaaccctataaaagtgatattcctatggcagagtccaggcagccttgaacaatgacatggcaacaaaggatggctctgtacaacttcacagatggaatcttgtttaaggctgtgaagttttaaggaataaataatataattggtgtagcacagtgccttgcatgcagtaggcagccaacaaatccttaatgattggtaatgcaagctaaaatttttaatgtctctactatccttttttattgaataacgcacagtattttcctaaggttgctgggtttgggagtaagcttgggacttgaatcattgagaaataaagcacatttgactctaagaagtatgtagaaccttgtttataggtgagaataggctgtattatatgaaaccagcggagggatgctgagacagtcatggtttatagaatccaaattctctgagatgagggtgcttatggacctcaaatagcctttcttatctgctccttgtgacttctctcttttaaatcagatacctttgaaacatacaagagacatgagattccagttgtttttgtctcctaaaccctagtgatttttggataaggatcactactgaacagtattaggcaacttttcatttttgcttttcaaatgacattggtctttatttccagtagatgggcagtaaacagggtcagggtggtcaagggatatgattaagtgtagtagtagaaaatgcattctttttttttttttttttttagacagagtcttgctctgttgctcaggctggagtacagtggcacgatctcagctcactgcactgcaatgtccacctctctagttcaagcgattctcctgtctcagcctcccgagtagctgggactacaggcacatgccaccatgcctggctaattttttgtatttttagtacagatgggtttcattatgttagccaggatggtctcgatctcctgacctcatgatccacccgccatggcctcccaaagtgctgggattacaggcgtgagccaccgtgcccggccagaaaatacattctttacagcaaatgttataggttaaggagacagttcctgggtttagctgtgaaactgtttaggattttctttaagtggtgttcccaagagcttttttctggtaagttggaggctataggcaaagcgtctaggagcttgttgttttttgctatggaaggccagctttgggatctatatacatgggcatgtttctcaatggagtggtcacaggattctcttctcagaactctgcctgaaacctttccggtgtgttttgtcttcaactttttcctagctatcctattagcctgtaaatatgtcagcagacaatgtgtttggaagaaacaaggtgtacaacttcacaaagcaagttttttctggtctgagacttactgtgtgcaggaagtctcgtgagaatatacttagaaaatcacacttatctggaaattcaataagtcatattaaaaatatacaatttcttgaactcaggactagcctgaaaatccaaaatgcatgtagagttgacatgttgacatatgtctatgtcctctgtttttatttaagcctcatttatttctcccttgccatgcccatttgggattttctttgcccagcatatgtgccataaacagaacaaatggatccagggtatacctctaataacctt

SEQ ID NO: 5416 - DNA, 6000 bp, Homo sapiens
actcagcctcccaagtagctgggattacaggcactaatttttgtattttagtagagacagagtttcaccatgttggccaggtgggtctcgagctcctggcctcaggtggtccacctgcctctgcctcccaaagtgctgggattacaggtgtgagccaccgcgcccaacctagtctttttatagaacagttatctctgtagccaaacttacatcatattatttaattttccttgattcgggggaggggggagggatagcattaggagatatacctaatgctaaatgacgagttaatgggtgcagcacaccaacatggcacatgtatacatatgtaacaaacctccatgttgtgcatatgtaccttaaaacttaaagtataataaaataaaagatttacataaaacatttttccttgattctgtattaaaggaaagatgacattattttcaatgtctgcaaaatatttcactgatgggcatttagagtgtttccatttcccgctatcatagatactgctttaatgaatattttttgtttataaatagttttctttttttgtgtgtggatatagaatcttgctttgttgcccaggctggagtgcagtggcacaatctcggctcactgcaacctctgcctcccggattcaagcaattctcctgcctcagcctcccgagtagctgggactacaggcgcacgccgccacgcccagccgatttcttttgttcaggctggtcttgaactcctgagctcaggcaatccgcctgcctcgacctcccaaagtgctaggattataggcgtgaggcaccccgcctgacctataaatatttttctaagaacatttccttaggctatattcctaaacatggaattattgggaacatttttatttttctattttttttcatctcttcagtattcaaaacattcctaaattctggccgggtgcggtggctcacgcctgtaatcccagcactttgggaggccgaggcgggcagatcacgaggtcaggagatcaaagccatcctggctaacatggtgaaaccccaactctactaaaaatacaaaaacaaaattagctgggcgtggtggcgggcacctgtagtcccagctacttgggaggctaaggcaggagaatgccatgaacctgggaggtggagcttgcagcaagctgagatcaggccactgcactccagcctgggcgacagagcgagactccatctcaaaaaaaaaaaaaatcttaaatttctatataagttgtcaaactattttttccagtttaatcaacttacacttctaccagcagtatgagagcttttatcccactgcacagtcacataggaaaaatggtttatgtaaaggacctctcttctgttatttaatacccatgaatttcttatatagttgtaatcagcgaacccatactactttgggttctgcttatttcacggggaaggattctatatctatcaatatagttcacattctagccatttaaaatcattctttaattcttcattgtgttaacagatcccaataagcttggcgattttcttattgtcaggactcgggtttatttccagtttttgctattaaattggctatttctgcatctttgcacagtctcccctactttaccaagagtgaaactgcttgatcaaagaatagaaaatgttttgtagctcgcattagacactgccaagttgttgggcaaggtttttaaaaaaggaatattggctgtacagaggtgcagctgtgtggaccatcattcctgagcagggtccaatagcctggcatcttacctggaagtcaggacatctaaacttccctatgggaacttggtaagccccttccccatttcgaacctcaattttcttatctataaaatgaagaatttggatggaatgaattaatccttttctaccagaaatctagccatatttcacctagtctattctgtatcaccctctcctgactcctacgtgctcagaatctagctcagtgcttgggacagttatgtttcctttccctttgaagtgcccaaataccagtgtaatgagaaatatggcagagcctgagagttcagagcacaggccagggtcaaatctcagccctccacttacaagctgtgtgacaaaataacctcccccgggctcagtttcttcactgtaaattaggttaattgttccaacctcatagggttgttaggagaattaaatgagttaaggtttgcaaaacgctaagaacagtgcctggcacacagtaagtgctttataaagtgtttgttgaataaataaaattttggacctaaactctgggtctcttcaggactgcaacagctttgtaactggcaaccccacttttaggtgcgttcccactcctctaaaacccagagatctaaatgccaaatctctctgcttaaaaagtctcccagggctcctaggcgcctccaggctagaacagaaatgcctcagcttgaagacccaggcttttcaggtgaaacacctaagggtcaggagacgctaggatcatcactcaaggatcccagtgaatttttccaaaatacaataaaaataaaaacaaaaagaggcaaacagggttataaaaattgtggggcattttaaatgtttcattgaacaaattaaagcattaacagccctcccccaaccaccaccaagcccaagagaccgtaaatatgctgttcacaagataactgcaactttcaagggctctcaggctgctacttcgggcagcacaattggcggcacgacgtggcaagcaggcagtagtttccaaccctggagggtcagcgtctggagaccccggccaaggcatccacagcctaaagatgatgtccgcgaccgcccgggcagcctcgtgcacggaaaaacctcaaccccggccccgcccacccttcctgcggccaccccgcagccctggcccctcagtccattcactcctgcagcgcggccccgcacccagggcctgcactagaaccgctgttcctaccgcggcgccccctgggagccaacgccgcgatgcccgcctgacgtcaggaagtcgaatccggcggcgacgcctttagggagcccgcgagggggcgcgtgttggcagcccagctgtgagttgcccaagacccaccgggggacgggatctcgctccccgcgccacgaggctcggccaatgggaacgcgcgctgcgaggcccgccggtctgccctgcggtgctgaaaacccggcgcgcaggcggctggctctgggcgcgcgccagcaaatccactcctggagcccgcggaccccgagcacgcgcctgacagcccctgctggcccggcgcgcggcgtcgccaggccagctatggcccccgacccggtggccgccgagaccgcggctcagggacctaccccgcgctacttcacctgggacgaggtggcccagcgctcagggtgcgaggagcggtggctagtgatcgaccgtaaggtgtacaacatcagcgagttcacccgccggcatccagggggctcccgggtcatcagccactacgccgggcaggatgccacggtgagcgcagccaggcgggggcacaggagagggcgggaccggaggctgagtgcaggggagacagagttacgcactccgagccaaacaccgactaattcggaggaaagcccggaggcgcctgatcatacctgttgcccggtgattgggtgtcctgcggatgcgggatgaaaaggcgggagagaggcctggagaagtggagtctggggagtggggatggaggccaacaacacgcacacacaaacaaagggtcccgcctccctgccgtgcattccatctgcagccccgagcctcaggtctctgggcggggacagaaccccgagctgggtaggctaggagggaggagagcaaggatgcaggccgcctggggagggagggggtcagtggccaggggagggagtcacatcctgtctcgatggctaggagaggcagcgcagccgcgtctggacctaggtgccggtctccactcgccagcaggagcggagagggagcaggaaaggagcccattctcgaggatggggctgaaacgggaagcttggggagaccgctgccttggggacccctgcgtcgtgtgaagactggaggacgcggaagggacagcgctggccggggagggcaagcggccgctggcgtacataagggattgggaatggcatacacttagcgaggacccccagagctgttctcgaatcgccggggaggccactgagccgcaggccagcgaggtcttcagctattccgcggagcggaccgctgtttacgctctggggcggtaggcccttcgcggggtcctgtcccttcttcccttggtctcactgcggggtcggcgcgcgccccagccccaggcctgctgcttccctttctagaccacagccctcagagctaaggccccggcgcctctctgctgggttggagtcctggggactcagtcctagggactcgaaagtcggggcgttcccttcaccgcgtttcccccttggcggccagaatggcgtcccctccccttgcatccccctctgatcccgtgccctgcagcgtgatgccctccactgtccctatccactaccctggcgtcccagagtgtgccgcgggtcaccaggttcccataacgtcgcagcagagcttagacgctgcggggcgaagacccgccccaccctctgacgcgaccagcctagtgggcgaggccagagcttgcgcgggtcaaccagagtgaccactcgggagccctgactgcggccaagggcgcaggcgtgtcccggcgcatgcgcagacgaaacaggcaccaacgctggagcttcccgcagtgtgatttggggccgggaatgccgcggcggggacggcgattggtccgtatgtgtggtgccaccggccgccggctccgccccggcccccgccccacacgccgcatcacttacagggcccggggctgccggacctgccaacgtgaatcttatcgccatggaccttaccttgcacaacccaaagtagctgccttggggcagggggtggccagagtgcttagggaaatgtggagccctacccagaacaacggtggagggaaagggaagaaacgcagaagtgccccagttcggacgtagggaagtcttcctcttcgtggtttttggagaaccctagctaagagaggaaagggacttattgaaagacccgcaagaagggacggaagtctcatagccctgagaggtgaagccagctggagttgatgggtcgaatggggacctagagaacttttctgtatctagaggtttgtaaaatgcaccaatcagtgctctgtaaaaacgcaccaattggcgctctgtagctagctagaggtttgtaaaatgagccaatcagcaggacgtgggcagggacaactaagacaataaaagctggccaccccagccagctgctgcaacccgctccagttcccttacaggctgtggaagcattgttcttttgctcgtcacactaaaccttgctgctgctcattctttgggtctgcaaagagtgttattcctttaagagctataacagcgggaaggtccacggctccattcttgaagtcagtgagaccatacccgccggaaggaaccaacgcccgacacagccccacccatctctcctgtttctcacctatactgaaattcttgggcaaaagctgtctgtggacacacccaggggaaaggccagcccaggcaggtgtttcttagtggttcccctcagccaatgcttcccattccttgatgcatccttctaactagagcagatactcggtgatcttaaactgtggacacctgggagcaccctcaaaaggcagctgggcctagggagatggcctgtgcttctgtgtcaggagttggttccttcaggtgggctcgtggtctcgctgacgtcaagaatgaagccatgaaccttcgcggtgagtgttacagctcttacaggtggcgtgga

SEQ ID NO: 5417 - DNA, 6000 bp, Homo sapiens
gggaggccaaggcgggaggatcactaggtcaggagatggagaccatcctggctaacaaggtgagaccccgtctctactaaaaatacaaaaaaaaaattagctgggcgtggtggtgggcgcctgtagtcccagctattcgggaggttggggcagaacggcatgaacctgggaggcagagcttgcggtgagatcacgccactgcactccagcctgggcgacagagcaagactctgtctcaaaaaaaaaaaaagtgctttaagaaaaataaaactatgtcgggacagagaatgaatgaagtcagagtgctgtttgcttctggaaggctttttggtgggaggaatcgggggacagagtcttacttgctctgtcacccaggctggagggcagtggcccaatcttggctcactgcagccccggcctcccatgctcaagacattggcccacctcagtttccagaatagctgggactaccggcaagcacaaccatgcctggctaatttttgtattttttgtagagaccgggttgcgccacatttcccaggctggtcttgaactcctcggcctaccaaggtgttgggattacagttgtgagccactgcaccagctacagaaggcttctctaaggaagcaacttttgagtccaaatctggataagtgtcattcaagggacagggcattctagctggaaagacagcctacaaaagtgtgaaggtggaaatgtactttggacattaagtgtataaaagggccagtttgggaagggcatggtggctcacacccataatcccagcactttgggaggccgaggtgggtggctcacctgaggtcaggagctcgagaccagcctggccaacatggcaaaaccccgtctctactaaaaataccaaaattagccaggcatggtggcaggtgcctgtgatcccagctacttggaaggctgaggcaggagaatcgcttgaacctggaaggcaaaggttgcagtgagctgagatcacgccactgcactccagcctgagcaacagagtgagacaccgtctcaaaaaaaaaaataaataaataaaataaaaaataaggccaggcgtggtggctcaagcctgtaatcccagcactttgggaggccgaggtgggcggatcacctgaggctgggagtttgagaccagtctgaccaacatgaagaaatcccatctctactaaaaatacaaaattagcagggcatggtgccacatgcctctaatcccagctacttgggaggctgaggaaggagaattgcttgaacccgggaggcggaggttgcagtgagccaagatcgtgccattgcactccagcctgggcaacaagagcaaaattcagtctcaaaaaaaataaaagagctagttggtgctggggcctcgaggtgagtttggattttcttctaagtgtgatgagatgccaatggggtgtttcaggcagtgacaggatctgatttccttatctgtaaaatggtgataatccttgcagttttgtgaagatggcagatatctgtaaatgactgcccaacatgttataggcactcaataaataaaaattactgggccgggtgcagtggctcatgcctgtaatcccagcactttgcgaggccgaggcgggcgaatcacctgaggtcaggaatccagactagcctggctaacatggtgaaaccccgtttctactaaaaatacaaaaaattagccaggcgtggtggcacgcgcctgtatcccagctattccagaggctcaggcaggagaatcgcctgaacccgggaggaggaggttgcagtgagccgagatcgtgccattgcaccccagcttgggcaacaagagcgaagctcttctcaaaaaaagaaaaaggaaaagaaaaatgaggaaaagctatacgacccactgaatataagggatctaaactagcagctaaagaaatgaacgtgtttcacaaatattaaatgtcccttaaataaacaatggcctgaccttaagtatagtttttccctatagcatgcaaaattacctaaagctatcaacaatacccagaaggctgttagaaatgcaaactggggctgggtgcggtggctcacgcatgtaatcccagcaccttggaaggtagaggcgcgtggattacctgaggtcagtagttcaagaccagcctgaccaatattatgaaaccccgtctctactaaaaatacaaaaattagctgggcatggtggcgcatgcctgtaatcccagctactcaggaagctgaggcaggagaatcgcttgaactcgggaggcagaggttgcggtgagccgaaatcacgccactgcactccaacctgggcaacaagagcgaaactccgtctcaaaaaaaaaaaaaaaaaaaaaaattagctgggcgtggtggctggcgggcgcctgtaatcccggctactgggcaggctaagacaggagaattgcttgaacccgggacggggaggctgcagtgagcccagaccgcgccagtgcactccagcctgggagacagagcgagactccatctcaaaaaaaaataaaataaaataaaataaaataaaataaaataaaaaaataaagaaatgcaaactgataggccccacgtcagacccatccgaatctctggggatggggccgaggaggttgtgttttaacagactctccaggtgaagtctgagaagccctgctctatggcaacttaattacagccgcacagattgacaggttattccaattcatggcagaataaatggatgacagtaaaaaaaaaaaaaagtcagcgttttttcccccaatgttcacagatgttcatgttcctgtcttaatgctctctagccaccctttagccccgttcttaccagctagattgttatagcagtctgtctgggtggtatgcaatatgttttcttgttcaggcgtgagggccgggccctgaggtccgagattaggtaacggagagggcagactcggatccagaccccgcagctgaagcagagctcgatggtacctactcacagcatctcggtacttcccttcccggtagcgctggttcccttcctccttgtacagctgagcctcctgcagacgcttctccataactgtcgcccacggttcttgcggaactgggaagtgaaggagcaagtgaagctctggggttgggagcaaaataactgacagtagcagccaatttaaggaggcaggaaattacccttcttcctggagagtccccccacagggacctgcggtttgcttgtttctactgaaagccccacctctcctttctgcagtctttttctcaagaagtgcaggcaagtagtaaggaaagggatgtgggaataatgaagcccaacattaagtgacttcctaaagaggcgatgtgggggtggatgagactttccgaagaactcaagcaaggccctactcaggaattgttgcgggcgtgagaacgcctgggacactggcttccgcctttctattggacccgcccccccccgacctggaagtagaagggagtgggcgggactagtgctaaaactccagagggcttcaagcaattctaactcttcttccttattcaacatttatttgttgacgtcaataaataaactgggaagccgaggtgaaccaccagcgacactgaggtgtccacataagcgtcacagctgcaagcccacccggcgccgtgaccagttcctcgccctctgcagatgcccaaacctggaagtctcctgggcttcggtttaccagcaggagcaaggagaggaaagggtcagagatgcgtacagtttggtatcttgagggtcgcgcgcattgcgccacaccacccaatcagaagaggctccggaaaaataatcccgcagaaacgaccccgcctcctcagcggaccaacctgggaaaaaaaaaaaaaaaaaattcccctggcagcttcgccaattggaaaaatccggacgatcacggatgaccaatcggaacggcaaatgacgattcaagttgtccaataagagaaaaagggcgggttcaagggcctctgttgctgggtagaagttgaggcgttgaggaaaaaggagggcccggattacagtatttcttcgttctggggagcccttttgcttcctagccagaaaaacaattgctactaggcttacatgttgcaacacattctctaatgactttttttttgtcgttactgctgcaagcacagacagtagggaaaagaggctagcgacccctaaaacgccacagcaaatggaagtcagacggaagtaagggtggtgggaggggcatggcatcggggagctccgggcggctgcgcagaactccccggctggaagtactgaaagaccggcgcgcacacgcttccgtgctacgaggcacttgagctgcagccagccttgcccgtcttggactccactgcggctgcgcgataaaagcaccggcggcgattggcccgggggcgccagagggcgggaggaagcgggaggaactccgtcgtcctccgcgcgcgcctgcccgcggctggggaaccaagggcctggaggggaaacagctccctgctgcgttgttttgggctccgtgagccgaaagggggaggggagacgaaggagaagcaaacactgcgcagcgggaccgtgcgcggcctccgctcctgcgtgcgtgcgctcgctcgcgcgggctcagtgctggcgcgtgaggcggaggcgggcggcggcggcggcgcctgcgcggtcggactcggtcgacggttcgcaggggaggaggcggcgggaggcggaggaggcggcggcggcgatggaggtgaagcggctgaaagtgaccgagctgcggtcggagctgcagcggcggggcctggactcgcgcggcctcaaggtggatctggcgcagcggctgcaggaggcgctggacgccgagatgctcgaggacgaggccggcggcggcggggccgggcccggcggggcctgcaaggcggagcctcggcctgtggccgcgtcgggcggcggcccgggcggggacgaggaggaggacgaagaggaggaggaggaggacgaggaggcgctgcttgaggacgaggacgaggagccaccccctgctcaagccttgggtcaggccgcgcagccgccgccggagcccccggaggcggcagccatggaggccgcggccgagccagatgcttccgagaagccggcggaggccacggccgggtcaggcggggtaaatggtggcgaagagcagggcctcggcaagagggaggaagacgaacccgaggagcggagcggggacgagacgccgggatccgaggtgccgggtgacaaggccgccgaggaacagggtgaggagctggcagccgagcccggctccaacctgccggctgcgcccctgatctagcaccccgccctgcaccgcagggtccgagtccttgttctcgcttgcctcaaagtgccatttgatggaactcctttcattctctacccacctttctgaggggttaggccgcctctcgtggccctactctttgcaggaggaaggttcctgcctaacttggttccttggtgatagtggatggcagtgagtgattttgcatgcgaactacttgtgagctacctgtggaacagtctcccacggtgcttgttatatttttcttagctgagaaagtgctaagcaattggggattacacggagaactaggcccacagttagagggtcaggtctttgggctacctgacctaactttttcgccgtaaaaatgttaagcaaaaatcgaagtccgtcaaagtccgttccattaaaagcatgttaccagagcttgagccacagagaatctgaaaatccaaccttgctcctctttgagctgtaagggagagcctctagtgtaacagtgtcgagtttaatagttaaccagtgaagagaaaaatcttaatctagttcatttagagttagttaacgttacttggctagggtttttatcttgcttggattatgattaaattttaattgtcccactga

SEQ ID NO: 5418 - DNA, 6000 bp, Homo sapiens
gaaccccgaaggcggggcttgcagtgagctgagatcgcaccactgcactccagcctgggcgacagagggagactctgtcaaagaaagaaagaaaggaaagaaagaaaaaaagaaatgacacaaagaaagtgaacgtgtcactttcttttttgtctatgttgcccaggctggtctcgaactcctgggcacatgtggtctgcccaccttggcctcccaaagttctgggattacaagcatgaaccacatcagccttcacttttcattcatataatctcatttgaatttcacagctatgttaaacaagctcattttacaaatgagagcgaggacccaacctggccagtaaactagtgacagagcctctgacttctgtgagttttccacatctgaatgtaccttattatttcttagtcgatacataaattatctttaatgaaaaagaagacaagccagagctacttctccagggctggggtcccaggagggtgtggaagaggagatgcgggtgggacccacctcgggctcccacggaggacacgctgcttcggtgggatcgctcagcggggccgggctgcccggcactgccttctgtcccgtccatctgcaaaggcaaagagaaacagcagttaccgggagccagggatggggggctggaggtctcctcaagctctcggtgagtacggtaagggatcccaggctgggtccgcaaggttgagcggcgctgcctggaggggccaagagtgcagaccgggcgctggtgggaggggtgcgggttgctacggtcaagaaccgggggtcgacctggatgcccaggcagggcaaggcgcacgcccagccggggacggaggcccgggccagacgtcgctgtgctctcacctcgcagggtcgcagagcccgccacctgagaggcaaggctcctgcctggaatcctgccccgccgccaagcccgccaccgcccgcactcgggctcccgctaaggacgcagctgaccgggaagcgacgcggaagccacggcgggaggaagcgcggcgcccgaggccccgcccccttcgacccgggggagccaatgggagcccagggccgccccgcgcggcccgcgcatgcccggacgccagcctcgcgtgtctcatcacgcccgtggggtggccgcgtcacgtaccagccccgccaccaccagagtgacccagagcgagtttcccttcacaaaggccccgactgttggcctgtaagagggtttggcgaagattcgagaatcaggctaggggcgttggcctgcccacgctgggtcttcgggctagttccctgcctgtgaaatggacacttcctggcacgtgccagggatccatgcggcgctggcagcggcctgtaccgtggcgctctcggcagtggtcaggagaatgagtcctggcccagactcatcctggacaagtcccttctcctctgggcctcagttttcctcatctgtaaaatgaggtggttgaactgaatgacccccaaggactatccctactctctaaatgattattaatatatgtctatgtcggccgggcgcggtggctcacgcctgtaatcccagcactttgggaggccgaggcgggcggatcacgaggtcaggagatccagaccatcctggctaacacgatgaaaccccgtctctactaaaaatacaaaaaattagccgggcgaggtggcgggcgcctgtagtcccagctacgcgggaaggctgaggcaggagaatggtgtgaaccccagggggcggagcctgcagtgagccgagatcacaccactgcactctagcctgggcgacggcgagactccgtctgaaaaaaaaaaaaaatttatatatatatgtctaaatcagaaaaccaggacagacactctgtttttccagggagcagtgacatgagcccttactatcttacacaacagcctgggagaccttgaggttttcccaggctgggaggagacttggggccccaaagaggcaggtgtgaaaccacctaccctcagggccatgtcactgacatgtcctggtaatgcaacatgtgtgcatctgagatgtggaactcagggagaaaaataagtccatggggcaccttctggggccagaggaaccagaagttgtcccaagtgacagcagtgggcttggtgatcaggaacagagggcagtgggttcactttgccctggttccctgggattggaaagcagctctagctcctgacccagtccagccttctttggtatgtgaaccagctctgcctgccctcctatgatccacactgccccacagctgagcccatgacatcacatttgccttgccaatgtgacttaaggacttgaggaagctcagatgtgggctgcagggaagggtgtccagtgggggcaggcatctccttcctggttctcagctctgggaccctcagaccaggacacactgtatctccatggcctcttgacccagctggagtgaagcaggagcagaagagttcagtgttgttttgaatgcttactggatgcggggcttgtgctaggtcaggggatggagactgaggggagacgtggccctgccctcagaaagtgtctgttgtggtttaattggtgagttaaggaagaggggaaagagaaagaagcccaggagaacagcacatttaaaaccacagcactttgggaggccgaggcaggaggatcgcctgaggccaggagttcaagaccagcctggggaacatagtgagacgccatctgtaaaaaacccaaaaattagccaggtgtggtggcacacatctgtggtcctagccattcaggagcctgaggtgggaggatcgctggagcccaggagtgtgagctcacagtgagctctgatagcgccatcctgccactgtattccagcctggacaacagtgagactctgtctccaaaaaaataaataaaaccacagaagatgacagcattgccttaagaactatgaaatgctacaggcaggaaaagtctctgctcacttgctgtgtgtggggcactgggccaggccctttcccctgtttcctgtgtcattctcatgcgtcctgagagtggaaataagtattagcagttgccatttacgtgccagccactttttaaagtgctttaatccttagaactcactaagaggtgagtatcacatctctgttttatgtcaaagactgacacctgggagtgtctgcggtggtggtggggaggctagaacccgggtctagtcaaggaggggcactgggagagagtccgggaggctgatggtggggaaggaaaggcattccaggtagtgggaactgcacgagcatggttaggaccccaggaaagacccccgctgtgtgagagcatagcaggtgggtggcaccatgggggaggccttgaaccccaggatgacagatatggggcaggcgtgttagacagtaagaacattttggaggttgtgagctagagattcacaagatgacgccatgcttaggtgggcttcccttcagcaaggctgtagggaagtgggaatgagggtctttctcaaactggggtgaggcggtgagattggaaaagagaatgagacccattctgaagtgagggaggaggcggcctccagcctttagagctgagaggcttagacatcaattagcccgactgctgtcctactttggcaaacaataatagaccccaaggcccacagaagaggttgctcaacatcactgagagagataatgtaaccgcccattgggttcaccttaccctctgcctagacagagccaatttgtcaagacaggggaattgcaataaggagagtttaattcatgcagagctggctgtacgagagacaggagggttttttttttgtttgtttgtttgttttttttttttgagacggagtctcgctctgttgcccaggctggagtatagtggcatgatcttggctcactgcaacagctgcctctcgggttcaagcgattctcctgcctcagcatcccaagtagctgggactacaggcgcccgtcatcacacccggctaatttttgtatttttggtagagatggggtttcactatgttggtcaggctggtctcgaactcctgacctcaggtggtccttccgcctcggcctcccaaagtgctgggattacaggcgtgagccactgcgcctggcctgtatcagttatagtttttgcaaaggcagtttcaggaataagaagcagaaccaggactgcagcccaagccaccacgagaggccagtctttggggatggtcttttaggatgatctttgggggtggcccaaggagccccaggcagctccagaggcaggaggtaggaggtcctgtttcccgaatctgtccacccgggagaaagcagcaggggtgggtgggttctgccttggccacagtgagaggagaagggagagaaggactgggccttgggcgtcccccatgggagactaggagctgcggggagatctggaggggagggtgcaggtgtcactgggccttgatgtttcccagggccgtttggtgatgggaagagggaactggagccccaggctgccgctgatgctgctggctgacatttccgttcattcagtcactcaggatttattgagagcccaccctgtgccacccgctgtgcacagaacacccagagatccctgtccagacagacaagttcttcccatcgtatgttggcgtgataactgtgatggagaaagagaggaagagccagcagtgcctccggctggggaggcggggcagacctcacccaggtggtgacatttgagccccagctggaggggtgccagggcaagagtgcccaggaagagggaagagccagtccacaggcctggagacagaaggctgactgaagaagagtctggaggctcgggtggctgcagcagagaaagcaagggggtgggtggcaggacgtgaggtcagaggagaatgggcggcaccctgtggctcacagatccttgaaagggttttggttttgactgagcagaatggtgccattgcagatcaacacgcactttaaataatcaaaacccctatctttcccctgggaaggaggaagccgaggaaggctgtgtttctgactcacacgggggagtcgggggagtcgtaaacaaccctgaagagaacagccaggcctggtgagtcactcctgggagtggctcctccccaccctgccacgcagcggcaaatgcgggctgggcctaccccctggtggccacgctacctccgcacccggcctctctctgtggcatgggggcggccatgccccttggtggagatgaatgggagtggagctgggctggctgggcaggcaggggcttgcctcttgctgactaaggcagccctggaggggcccgaccatggggcaggaacccagttgccatcctcagagcgaggatcattggccgggctcggggatcagggcctctgtggtcccggcacgcctggcccgtgagactgtactctgcacgactcctccaggtggccagggtcaccggaactggctcgctctcctctgccagttgccggaggtctgggcaccaggccaattctcaccttcccgccagggttaaacattagtgggaggttatcagcgtgggccaggggagggagaggggggaattcaactctgtctcctctgctggagccaccagttcccgcaagcccagacaatgccggtggaggaatttgtggctggctggatctctggtgagacatttttcttccttctgtcacatcacacccaatggtaggtcacttcctcgggaagatgggtgacatgggaggagcagagaccaaagtctgagttccggcctggcgggaggatcacttgagcccaggagtttgagaccagtctgggcaacatagggaggcccctgtctctacaaaaaaatcaaaataattagctgggcatggtggctcacacctgtagtcccagctacttaggaggattgcttgagctcaggagttcaaggctgcagtgagc

SEQ ID NO: 5419 - DNA, 6000 bp, Homo sapiens
atctcagaatctttagcctccactctaaaattatctcatttacaacagaaattaccttctgtttgttttctatactttcctcttctataaagttaatttttatacctgtgctctggagttgatatcttcctattttttgtgagagccaaagccatcaattttcctctctttcttcagagcagtgattctcaaaccttagcttacttgaaaatcacctggagggcttgttaacacagatacctgagccacatacctagtgtttttgattcagtaggtctggggtatggagaatttctatttctaacaaattcctaacatacactgatgcacctagcccaaagactgcactttgagtaccactgctctagactttagagaaaaaagtcggcaatttacaagctaagaaatggtgtacatttttaaatggttaaaataatcatcatcataatattttctgacatgtgaacattatatgaaattcaattttaatgtttatcaataataaagttttattggaacacactatgtaatgtctgtttaagtagatatttatgtaggctactttctctctacaacattaaaatggagtagttgtgacagatcgtatggcttacaagcctgaaatatttattatccggccatttacagaatcagtttgctgacccatgctctaaggcagtaattctcaatcctagctggacactggaatcacttggggagctctatagaatactgattcctgattcccaccctcagaaattctgacttaattggcctgtagtacaatctagagaatccttaacgtataaacttacctaatttgtcctatctaaagaaaacaaaacaaaaagcaaggtatctaacaaaactactctatctacctataagaactagatagtccaatctccttattttatagattaggaaaaagatgtctagcaatatgaattatttgtccatattaaaagagggtgttgctgttattgtatttgtaacaaattgtagttgcatattgctttaatattgaaaactttttttataatccaggttatgttttttaaagtattacatgcccactgttaaaaatacaagccaaatatatgtagataggtttaaattcagtgcataaggtgaaaatcaactagtccaattttcttgatagtcactttttccttttgggaatcaaggtagttggcttgtatttaagggctatgctttaagaaaaacatacatacacactagaattacatgcattactgggagatgttcacattcagagagacactcagatctaagatcaattcagaaattgatagattcttatttctcctctcacaatcattccctgacttttgctcatggagtgcaatggggtaaatcccctcacagtttctagtatttccttcttccttatatctgtatttctctcatttactgacaagggatagttggattggataagttgttcattgtgaatgatttcctatagtatagaggtataaaataaaaactgtcatgcatcccttcctaagccaatagcaacactgttaaaatttcacacatgcacagacacacacccacaccccacacctctccctacaagtgtatgtaaatatacaaatacaaatagcctcacacaatatcagttcttttgcaaacttatttttacatataatattatatataacttggacatctttccacataagaatatgtatatatatcttatattcctatgttatgaataaactgtaatttaaagaaataaattccatactgatggatattttagatacacatacacacatatatctgggataaattcctgaaagttgaatcactacatcaatcataatttgcctctttaaatatttgatagataattccaaactaccttccaaaaagtttttaccaattaatgcatctccataaatacttgatgtgtcaattttaataaccttttctaacttttatgttttttcttaaatatgaggttgagcattttaaatgtgttttgtggtctttttgtgaattgctactttatgttctttgagtgcttcattcagttttatgttttctcttagtgatttatgaaagttctttgtatattaaaacaattcccaatggaatgtgttgtaaatagtttcccagtttgttgtttgtcattgtgtataatttacccaaggagaagttttatattttcatatagtcacaattgtctatcttttcttgcatggcttcaggctcctgtattccaatattatgcaaaatcaaatctgtgttttcttctagtatgtttacagtttcaatttttatatttaaatcattgatccttccagagtttattttgatggcagggttcatcattaatattctcattggacactatgagatacatgttatccccattttacaaatgggaatctggcatggaagtgattttccaggactactcacttgcagtatggaagcctagacttactctattgcctacaaaaatatgcataggcagttataactttcttctactatagcaaatgttattattcttgcagatatactgttctgatgaattccttgccttaaaatatggaatattctttagtgggacattgccattgtagttaatgccccatttcctgcatctataaaatgagaatagtaagttggctatcctagtccacttaagaaaattaggcagtaaatctacaggtatagcactgggattttgtaggctagacaggtatactcaggtgttttaaagaagtttttaaggctaagggcctttttaaaaaaatgtatacacattaaaatggtatctaaagccctgttagaagtcctccctgatagccttgacagggaaacctacatgtacttcttcacctgtaacttgtttcatttaatccttgcttgcgagctgttctgagatttgtaacattttccagttctttttggtctctctctcctgggccatccaaatatcccggcaactactaaaataatattaataaaataggtaaatttcattttcccagcttctaatggaaaaaaatggtacttattcacaggttgaataaagtaggtttttaaaagttcctctgaatcctcagtggagaaaggcatttttaagttcttctatgttttgcatggcattgagttgttatatttgggttcatttattaggaagagctgcaggaaatgtgacctgctataaccttgggaggggaaagtgttattaactgaaatactcagttttgcatttaaagtccgtagaaaaagttgtggaatgatgagagctgggcatccatgtcgattttttaatgtcctggaagtcactggttgtgttgtaagtgcttataatttgtaaattacctaggctcctaagacagacggaactggaaatcaaaataagtggctgccttctcttacgttgcccaaggatctccagcttaggataagactgcctttttcttcctaaaaaaaggcacaaacaatgacagcccaaaatagctatttagtcagaactgacgacactttctgaatgcttgtcattaagagagaaatagaaaatcctgcttttcttcttcctttaatttctctccctgaaatacctttcttcctcctgaagctgcctcacctcattgcccaggagaaatgcccagtaactctgatggtgcttcagcacttctgcaggctccagaggggaggtggcttatgcaaagcatattaaagaaagatcctaaaagtcactgcagctttttctagtgagttatgctgatcttccttgttgctggaagctgatggggagcatcgtggcaaagacataaccactttttttcctcccactatttttgctgcagtgaaaactgttcatttctgcttgcattttgccagatagctttagaattctagctgagaatcggcttcccaaggctggaaataagggtatagcaccctaaattgtactttgtccttttgattaagtaaaaattgagttaatttgcagcatccggtgcctgacaggaatgacaacagatagaaggatctgacggatgtttttaatttttttttttccttacggacttataggggcagaagcttttatttttctctcttgctctctcccttctggagcctgctgaacattttacattcagcagcagttgctactgaatctgaggttatgttatcccctgaaatcttctgtctccatttcaaccccatctcattactgattgtcatgtaccaataaaacatagttttggaaaattggccacatcattttattatggagtctggcaactttagatagctctaaaagatgtaacagggcagggaagtaggagaaggtggtacttctcagtcctttaaccacagatcaccccagaggaacccagttcacattttaggggactttatatgacaatgatcctctggtcctggtcctgttccacatggagaagcagaatgagacatgcttgcggtgatttgtagtatttgccaaacagggtgctgcaccagaatagcctggaatatagtgcagagctcatattaaacctccaaaggaagaagggtttcctcttcatttacagtctgcgatgcgatcccattgtaaagtatttaataggataacaccggggctctccagaaatataagtaactcattggttaaatttcaattcttcacctttccccccctccttcctgagtgagctcattcccccctccttcttcttcttcttttttttttttaatccagtgatttaaaatgctagaaggaaaagcaactgaggtcttaactttcagacgctgaattctcatctaattgaaattactgggcataatgctatatatagccaatgaagagattttgagctctcactcagtgccttcaagacatgtcgttttgtagtcagagaaaacagagatcaatgcattttcaaactgacagagggaacggatgctctttagtagcacatgcccaggatcgtgtgtgtggggcttgcgctgtgctgagaagctgaataccggtccatatgctccttatttactgcaatgttctttgcatgttactgtgcactccggactaacgtgaaggtaagaggaggcgagccggcaactgggcacaatatacatgttaaaccagctgcagaaaatgtctaccttgtgtagcttcaggacttttcggattgctggctgagcaggcagattattacaggtggttgcaaaggctttgttttattgttgccgtgcagcctcgctgggggagcatgttggaacgctgctgtgaagtgaccttcaggtttaactgtttgtaattcaggttcacgctcatagttggggggtggagaggggggaagaaaagatgaaaattatttaggtaggccagaaccaagaaatcagagaaggtaaaaagctataaagcatgctttgaattatgattttgtctttcttttaaaaagtgctgtgagcttcctgtgttcttgcagctgaattgtttaagagccggggggttaaatctagtgactgtaatggcattagatgtgctctgtgggatacctgaccatcctgtgcatatcaacaaatgattttcactggaaattggtgatactgattatacaaatcgtcagctctgggtgggctggttgcttcagctgcgtgggcgctgctgtcccgctgttgtcaccccactgacattcacttgctgtagctaatgagcctctgaagttgagcccaagtttgggagatttaccccttgtcacgaacagggcattattattgagaaggttttctgacactgtgttcattcagcactgagccggccagaccagctgtggaattccagttgcataatttaagtgaattacatccttggttaacattttaagcttacatttcttggagaaagaagtccaaaaggaaagtgattgcctttgagaaaaaataattaagaagcagttaagacaacctaaaataggaatcttttttttttttttttaa

SEQ ID NO: 5420 - DNA, 6000 bp, Homo sapiens
atctgttttggtaccagtaccatgcagttttggttatggtagccttgtagtatagtttgaagtcaggtagcgtgatgcctccagctttgttctttttgcttaggaacgtgttggctatgcaacctcttttttggttccacatgatatttaaacttttttctaattctgtgatgagagtcaatggtagctctgtggggatagcattgaatctataaattactttggtcagtatggccattttcatgatactgattcttcctatccatgagcatggaatgtttttccatttgtttgtgtcctctcttatttccttgagcagtggtttgtagttctccttgaagagatccttcacatcccttgtaaactggattcctaggtattttgttctctttgtagcaattgtgaatgggagttcactcatgatttggctctttattattggtgtataggaatgcttgtgatttttgcacattgattttgtatcctgagactttgctgaagttgcttatcagcttaaggagattttgggctgagacgatgaggttttctaaatatacaatcatgtcatctgcaaaaagagacaatttgacctcctctcttcctatttgaataccatttttttttttctcttgcctgattgtcctagccagaacttccaatactatgttgaataggagtggtgagagagggcatccttgtcttgtgccagttttcaaagagaatgcttccagcttttgcccattcagtatgatattggctgtgggtttgttataaatagcttttattattttgagatacgttccatcaatacctagtttattgagggtttttagcaagaagggctgttgaattttttcgaaggccttttctgcatctattgagataatcatgtggtttttgtcattggttctgtttacgtgatggattacgtttattgatttgcatatgttgcaccagcctttcatcccagggatgaagctgacttgatcatagtcgataagctttttgatgtgctgctggattctgtttgccagtattttattgagaatgttggtatcaatgttcatcagggatattggtctgaaattttcttttcttgtgttgtctctgccagggtttggtatcaggttgatgttggccccacaaaatgagttagggaggagtccctctttttctgttgtttgggatagtttcagaacgaatggtaccagctcctctttgtacctccggtagaattcggctgtgaatccatctggtcctggactttttttggttgctaggctattaattgctgcctccatttctgaacttgttattggtctattcagggattcaacgtcttcctggtttagtcttgggagggtgtgtgtgtccaggaatttatccatttcttctagattttctagtttgtttgcatagaagtgtttatagtattctctgatggtggtttgtatttctgtgggatcagtggtgatatcccctttatcattttttattgtgtctatttgattcttctgtcttttcttattagtctggctaatggtctatctattttattgatcttttcaaaaaacctgaacctgctcctggattcattgattttttgaagggttttttgtgtcactatctccttcagttctgctctgattttagttatttcttgtcttctgctagcttttgaatttgtttgctcttgcttttccagtttttctaattgtgatgttagggtgttgattttagatctttcccactttctcctgtgggcatttagtgctataaatttccctctaaacactggtttagctgtgtcccagagattctggaatgctgtgtctttattctcattggtttcaaagaacttatttatttctgcctttatttcgttatttacccagtagtcactcaggagcaagttgttcagtttccatatagttgtgcagttttgagtgagtttcttaatcctgagttctaatttgattgcactgtggtctgagagaccgtttgttattatttctattcttttgcatttgctgaggagtgttttacttccaattatgtggtcaattttagaataagtgcgatgtggtgctgagaagaacgtgtattctgttgatttggggtggagagttctgtagatgtcttttaggtccacttggtccagagcttagttcaaatcctgaatatccttgttaattttctgtatcgttgatctgtgtaatattgacagtggggtgttaaagtctcccactattactgtgtgggagtctaagtctctttgtaggtttctaagaacttgctttatgaatctgggtgctcctgtattgggtgcatatatatttaggatagctagctcttcttgttgcattgatccctttaccattatgtaatgcccttctttgtctttttgatctttgttggattgaaaacacggttcttaaaccccagtatgcagaacaatcactagaatagctgttagtaaagattactgtgcccaatcttcagaaattcttctcattcaatacatcaatagtaaggcccaggaatggaaatatcctcattttcccatttaaatattgtggataaaattccttgtttagtcttatttgaaagttatttttctaactcctgaaatcacttaagtctgtgcttctcaaacctgggtttaagccccctctagggtttatgatatgtgccaggggatgggtgaagtcataaaatcggcatggcatatcttcctggagtgtcagttttatacaaagatttaaaagtaagagaaaattaacatttaaaatgtaacatggagctgggtgtggtggctcatgactgtaatcccagcactttcggaggctgaggtgagtggatcatgaggtcaggagttcgagaccagcctggccaatatggtgaaaccccgtctctactaaaaatacaaaaattagctgagcgtggtggtgcatggctgtaatcccagctatttgggaggctgaagcagaagaatcgcttgaacctgggaggcggaggttgcagtgagccgagatcccgccactgcactctggcctaggcaacagagcgagactccatctcaaaaaaaataataaaataaaatgtaacatgaaacagaatgcaaaattcacatgtatttttaaaataaagaaggaactacaaagaaatttttcggttaggtctataccatgtacttccaggtctctacatttcctttcctttactgtcatagggcacctttggtagaataccttaattaggacaacttacattttaacccctgaaaaatgctggtataaacagctattggtatagaaagtgcaaatacaaagtgcttttataaagatgatgatgtgaatgattaacagttctttaagcatgctcttttcttatttagaaaagtatttctatgttgcagatgaactgtctcattgtgttgagcctgagccatctcaggtgccaggtggcagttctagagaccgtcagcaaggtaagccccctcctctcccggctctaaaagctaagacatcttcacgttctggtccatatgccactgagataaagaagtcaactgatgattccatatttaaagttctagactggtttaaccgaagttcttattcagatgacaataagtcattcctccaacatccccgaggaatagagtccaaagaaaaaacagactcaaaatcacaggttgctgttgacttggtgacagatgacactactttaagagaaaatggctcaaagaccctatcacccagcaaaattgaattgaagcctgtgagatctgactcaccattccaagcagagggagatatgctggtttctgaaagttgccaagataataatgtgaatatcaaatccaaattcatgaatttgtcccaaaaaggcaccccaaaggaaggcccaggtatattgcaaccatttgaaagctatggcaccccaagtcaagggagtaaaaatatggactatagccaagattcaaaaagcccaggaaaagggaatggggcatctccttcaaatagtaactattcctacagtgttctcaaggaatctgatgcagaaaaccaagttccatgcaacactaataatattggcaacttgggtgaagaagaacccaagtttcatgctcatgaagaaaatagaggacactcagaagtgaattttgactcttcaacagttgtcaaagaaccaggtttgaaagataacatgaatgcagagagaaagagcaaagtaggaaatacctatatcctgaaagcctccttagagccagagaatattaagtcaacacctggggttgccaacaatggctctccttggaagaagcctgaggtccaattccagcaagaagctggtgaggttcccaagaaccaagtgcagagagagaaatacaaaagagtgagtgacagaatatccttttgggaaggagagaaagctggtgctaagataactcatgaaaaacccacatcttcatgtagccaggaacaaccttctgctaaagcatatcagcctgtgaagaagtcacagggtgtatcatccatggacagtttatctacagaccagagtgaatataatcaggccattcccaaacgagtggtcttagatgaggatgatcaagcatcccagctctccaattcttattcctcaaataaatctaaagagaccaagccacaaatagcaggtccatccagatactatctttcagctgagcaatcagataaagtgtctctgtttcagaataagaaaaatgagcctataaaaagatcacaagtggcagacagtttgccttctagaagaaacattactttaccagcactgcaacctccctcaaatgtcgggagtgaacgacatgctccattggagaaagacagacctctagttcgtgaatcaaatgccaactttaaagttatgtccctaaaagaaagaatggatgaacccaatgcagaacaggtctataatccctctcagtttgagaatttgagaaagttttgggacttagaagctaattcaaacagtaaggataatgacaagaatattaccaccacaagccaaaaaaattctgcaccttttaataggcagaaacacaaggaattcagcgacattaaattatcaggtaaaaatacccatgaagcagaggtgcttctaagcccaaaaaaagttatggcaagagaggaaatggagaaattaaattcaaagggcatactccaggtgctaccagatgaaatcacatttcctttgagtccacttagaaagtatacttatcagttgccaggaaatgagtcatcaaaggaaaatgtggaaaagaatacggaagggattgttactccagtgtttaaggaagaaaaggattactcagaacaagagattcaagaatccataataaaaaccaatgttttgtctaaagactgcaaagacacttttaatgacagcttgcagaaactgctttcagaaacctcaacaccagcaattcaaccctctggtggaaaagttcatggaaaacaagtgcttgaaccaagtgtttctgaaaataggacatggcctcaaaaaacagattttgctgatactgaggaagaagtcaaaggacctgagaagatcattaatgagcatgttgacaaaacagtagttcatccaaaggttaaacggaactctttgactgctagtctagacaaactcctgaaggaagcaactggaacttcaccctctcccttgcaagccaagttggcgcctgttatcactggaaccaactctaagctggaagaggggagattttttggaaaagggatagaacagagtcacaatacttcagctgataagagagaaatactagctccttttccagtgagagatgaaacttttggaaatacagctctcctcaagaaagctgaaagtggtgagtgccagctaagcacacagaatttgattcagatggctgcagaagattctcatccattggatccaacttcccagctttccagaaagggttcttttggggatgtg

SEQ ID NO: 5421 - DNA, 6000 bp, Homo sapiens
ggaagctatcttttttaaggcaatctcatgtcagttatcttccatggagtttgatttggtccatgggaaacaagaacctttgctgttagtggaggtgtggtctactcccagtgcagccttttaaacttagctgatgggtagatagagctcagtcacagtgtctcatgtttgttaaggcttgaatcaaatcctactgtctgtgtccatccaagtccagtagatgcttgtccagctcttcaggtagtgccctagaagccttcccaggctggtgtaaggtggaggatggcattctcctctttacccccatagacagaggagggagtggacaccctgcacactgacaccctccagcaacatatgcgcctcagattcttcaaccttagcttatcggaggctggaggagactgagtggctaagatgggcagacttagataaagcttcaccccttgcaagtcccacagggatggtccattctgcatctctttgcaggtgttaactgtgccactcctagaggtgccagtcagcatttcaacagttaagggagagggaagaagaccagagttgggatggtatcatttgcagaggaaaacaagtgactatttacttattacagaagaagattgggtcatccaatgtgaatttggagagcatccttgcatttcatttatgcttaaaagcatcaggaaacacagtttaatgcaaaatttccttttgcctgttttgtcaattcatagaaatcgacaaagaaattgacatagaaattgacaaaattttttgtttctttagcacatttggattgacttagcggagaactaacctattatagcttcctattttggcccatgtgactttgtacagtatctttgaagaatgttttattataccagagggcagggggaggggtgtgtgtgtgtgttgaatccgaaagcagcattgtgttcattgttttattctgcgggatcattctattctaaagataggatataaacgttggttctttgctgtatttaatttcattgcaatagaatccattcagcatttttaaataaaaggtgattattttaatgttaaattctattacttatatctctatagaacattcagacttgaataagaaaagattagttcaagttcatttgaacttagtgcatttgtattacctacttggatatttattatttatttgcctatgtagtataaaagcgttaattcctttggccttattaagaaaatagatcaggccgggcacggtggctcacacctgtaatcccagcactttgggaggctgaggcgggcagatcacaaggtcaggagatcagatcgagaccatcctggctaacaaggtgaaaccccgtctctaataaaaatacaaaaattagccaggcgtggtggtgggcgcctgtagtcccagctactcaggaggctgaggcaggagaatggcgtgaacctgggaggcggagcttgcaatgagctgagatcacgccactgcactccagcctgggcaacagagcaagactctgtctcaaaaaaaaaaagaaaaaagaaaataggtcatactcagtagaagagatcacagagacccaaagttgaagaaagtagtagaaattccagtagtaaaacccgatatgcaagtaagcagcactattaaaaccaacttgttttgacagttaagtcaaaaataaatatagctggggccgagcatggtggcttagcctgtaatcccagcactttgggaggccaaggcaggcagatcacctgaggtcaggagttcaagaccagccaggccaacatggcaaaaccccgtctctactaaaagtacaaaaattaggtgggcttggtggtgcatgcctgtaatcccagctactaaggaggctgaggcaggagaattgcttgaacctgggaggcagaggttacagtgagccgagatcgcaggcaccggccctccagcctgggggacagagcaagactgtttcaaaaatagtaataacaataataaatacatataggggccaggtgcaggggctcacacctgtagtactagcactttgagaggctgaggtgggcggatcacctgatgtcaggagtttgaaacgagcctggccaacatggtgaagcgctgtctctactaaaaatacaaaaattagccaggcgtcgtggcatgtgcctgtaatcccagctactgagtaggctgaggcacgagaatcgcttgaacccagaaggcggaggttgccctgagccgagatcatgccactgcactccagcctgggtgacagagtaagactttgtctctaagttaaataaataaataaatatcaatctgtctgtctttcaagaataaggccaaaatagttgtggaagataggataatatatgaagtatcacttttggtacttgacaacagtggcggggcaaggaacctaaggcattggtactgctctcactgggggaaaggagaaagcaggtccagtggttaattctgtgtaccttaagtatgtggacatatataataaaatgggagtataaaggtgtcttagtacattttgtgttgctataaaggaatacctgagactaggtaattgataaagaaaatgtttatttagctcaaggttctgcaggctgggaaagttctgcaagccctggtttctggggagggcttttataaagctgtgccacaacatggccgagaaggtcaaaggggaagtgggtaactgcaaagatagaaaacccgaggagcatcctggctttataacaaccccctttcatgggaactcatttccacaggaactgatccagttttgccagaatgagaactcactcactaccacgtgaagggcatcaagccatttatgagggatctgcccccatgatccagacaactcccactaggccccacctcccaagaccgccacattggagatcaaatttcaatatgagttttgatagggacaaacaaaccaaatccaaaccatagcagtaggcaacataggaaaccaaaaaacctgaaaataaactatgagacaggaaatgaatacagaaatatattacatcatattaaatggacaaagacatattaaaagctttcattccctagacattgtatcctaataggtacctatagttgtaaacgttagttaaattgtcgtgttaaaaagaagatgcagtatgaaataaaattaacacagaaaggtttgcttctggttataggccatattttatgcaaaaagaaggaaacctttgctggatgaaaacaaaagtaatcgaagtttattttaaggagtattggccgggcacggtggctcatgcctgtgatcccagcacttggggaagctgaggcgagcagatcacttgaagtcaggagttcaagaccagcctggccaacatggtaaaaccttgtctctactaaaaatacaaaaattagccagcatggtagcaggcacctgtaatcccagctactcaggaggtcaaggcaggagaatcacttggacccaggaggcggaggttgcattgagccgagatcttgacactgcacttcagcctgggtgacagagtgaaactccatctcaaaaaacaaaaaagaagttaaggagcattaacaagatctgtacctatatgtttctgtttacattataccccccaaaaaagaaaaactcagttgcaggtatgagcaaaggtattgtttgagttgtgtattttaaatcactaatttttcttttcatacaaaattggcttttggacttgtaaaactttcacagatagttttagaactgtccttccaactatgggaaattattattaccagtatgacagctagccacattctgtgatggtatctcacttcctaatgcatagtgggaagttggctttacttttacaaaaaataactcacttggacttcccattctaccaggagggttagaaacatgcagctactgatttattgtcctcaaagccccttggaaggtatagcagagaactggaaatttaaaaaccatttttatattcattagtttatccatccattcaacagatatttgttgaaagcctattatgtgatatgaaatacgttgagatgttcagacagagatgattaagacatgtccctgcactgagggaactctgtcttctgggttgtttttttttttcttcatatcttccccaaaatttctaactttatataaatttagacttggtttctgttgagtcttttactagtttgagacattttattgcagtatagtgcaaagtattaatgggctaagtatgttaaatgctgctgtatttgtaagatctcttgctttgtctgtgaccatgaaagtctcagtgaaatgggatcttattccctaaatcatagctctggttttaatgtttcttgatattattgcagagactctccaacatgtgccttctgaccatacaaatgaaacttccaacagtactgtgaaaccaccaacttcagttgcctcagactccagtaatacaacggtcaccaccatgaaacctacagcggcatctaatacaacaacaccagggatggtctcaacaaatatgacttctaccaccttaaagtctacacccaaaacaacaagtgtttcacagaacacatctcagatatcaacatccacaatgaccgtaacccacaatagttcagtgacatctgctgcttcatcagtaacaagtatgtattaaagctgaccttttttttcctatgctgcaagtagttaaatgccacatttaagtcattattctgtctggcaaaaataatatagaaactttatatgcctagatttcccttaattcctaattaaatgttcttaacacagaaaatcagagagctttaattacaatgttaaaaaaaaaaaaataacgctaaagcccttttttgttttcttttgttctagtcacaacaactatgcattctgaagcaaagaaaggatcaaaatttgatactgggagctttgttggtggtattgtattaacgctgggagttttatctattctttacattggatgcaaaatgtattactcaagaagaggcattcggtatcgaaccatgtaagttttgaatggccaggactttttaaaaaaaattgttggtgcacatctttaattatgatagaatatcaagccagtgctcatctcagggatgaataattgatagatttatgagttatattcccattaacccttttggcccaaagtaaattgtttatgtacaagcttgtgattataattatttgcaaatgaaaatggatgtatatacttaaaaaaatgtattttactagtgtcaaacacactttacaggagaccaaagttaacctaccctgaaattttcacttactcataccaataatcgtaagaaataccagttcccagcaggcttttgacttagtatgtctgtgtctgttgtggtactaaatagcatccttggtaaaaccatggcttttgttttccacgacaaagacaaaaaaaattcctctgacagcctcattatccctgaaaatttaaatgagtggttagtataaataatataatttatcattttacctgtagcaaaactctctttttagatgtgcattatcaacaagacctaatccatgtttactctacatgtagctctataggtctgatggtttgaggatatatccaaacttttgttgctccaatagtcctttttgtttttgtttttttgagtcttacgtgttgtcttagttcatgctgacacaacaaagtatcatacagctgggtgccttaaacagcagacatttagttctcacacttccggaggcttggaagtccaagatcagggtgccaccatggttgagttctagtaagggccttcttcacatggcagaaagaaggcgagctagttctctgacctctaattgtaagggtattaattctgttcacgagggttccaccctcacgacctaactaccttcccaaggccccacttcaaaatatcatcacactgggattagggtttcaacatactcatattgg

SEQ ID NO: 5422 - DNA, 6000 bp, Homo sapiens
tggaaaggaaggcaattaggaaaatttcaaaggaaatgaaaataagacctgttgaattaaaattattcagtttgatggtcagaaggcagagatataagaagtttgtctatttattaattaattagaacaatggtgaatggttctccaataagcagagaaaataaaacttataatataaacaaataaccattcattcaacatttattgtggcagtttagatttaaataactttatatcaagggctgtatgattctgaaacaaataattaaaaatcccggaaagtcttttctcctgaacacatttaagaaactagaaatcactttgggtatgatttgtttagaagcaggaagatgaaaagggtagcctgtagaagaccttgccaccccaagaaatcactgatcttattgcttggtccttgggggactcactctccttctgtgccaggacacgggtacctgcctctttttttccctagatcattggaggtatcgaccactcgctgtacacaggcagtctctggtatacacccatccggcgggagtggtattatgaggtgatcattgtgcgggtggagatcaatggacaggatctgaaaatggactgcaaggaggtaagaaaaccaagggagagcctgggaacataagggggtaggcagtacaatgtgaaggaagactctggttatcatgttgggaggatgaggcagaggtaataggacctgcagaaagggttggaagttgagcctagaacagtcaggggcttaatggtcacacagcaggatctgcggtttggggcctagggactggtagtgaaaaaaaaaacatggaactagttctgatgtctggactctagtcactgccttgcttcgtagccttgggcaagtcttttgtgagacagggtgatagaatgaagagtcttgtctttggagtcaggaagacccagatctgaatctagctctgatttgtactagctatgtacccttaggccagttactattctgtgtctcagtttccttatctgcaaaacaggtaaaaacaactttctcagaatatcagagataatgtgtaaagtgtttatctctgtggttggcagtactcaataaaaggtaactaaatcatttatgtcttccttccctagattcttatgtatgttaaattagaatagatataaatgtactaagaaaagttaaaagcggccgggcgtggctgtaatcccagcactctgggaggccaaggcgggggcagatcatttgaggtcagaaattcgagaccagcctggtcaacatggtgaaaccccatctctactaaaaatagccaggcgtggtggcaggcacctgtagtcccagctacttgggaggctgaggcaaaagaatggtttgaatccaggaggcagaggttagagtgagccgagatcacgccactgtactccagcctgggtgacagagctaatactccatctcaaaaaaaaaaaaaaaaaaaaaaaaaagaaaagaaaagttaaaagcactaaacaaggtatttttattttcaagtttggagactacctgcccacccaagattaacaagaataaacatttaccaagtgccttctctctgctgggcacgattctaagtgctttacattgctgatttatttaatccttacaataaccctttgaggtaggtgctatttttatcctcactttagagatgaaggaactgaggcacagaggttaacttgtccaagcaggtacacttaggaggtgccaaagccaagatgccaacccagctggggccccagcagtaaccccctactgcccagagcccagcatcaaaaaccttttgactcttttaactctctcttttccctcttagtacaactatgacaagagcattgtggacagtggcaccaccaaccttcgtttgcccaagaaagtgtttgaagctgcagtcaaatccatcaaggcagcctcctccgtgagtggactaaggatgggggtaaaagagatggtacagtgtcagagggaggcggtgagagtcacattcttcagcaacagccaagatgtctgcacttagacccttctactcagagctcttaaaacactcttcccctagccaggcgtggtggctcacgcctgtaatcccagcactttgggaggccaaggtgggcagatcactaggtcaggagttcaagaccagcctgaccaacagggtgaaatcccatctctactaaaagtacaaaaattagctgggtgtggtggcgcacgcctgtaatcctagctactcagggggctgagacaggagaatcactttaactcaggacggtggaggttgcggtgagccatgattgcgccactgcactccagcctgggcaacagagtgagacactgtttcaaaaaaaaaaaaaaaactcttcccctttatggctgtcactttgctcatcacacaatcccccggtacaaaagtttgacatcacactccctctctcttcctgtaatcctctggttggtttacccctccccactttagatatttcactggaaaagcaaatgaagggcccagttaatgtatctgaacatgggaggggcgagatgataaagaggcttttcctcattgttatccccttcttgccaacacagacggagaagttccctgatggtttctggctaggagagcagctggtgtgctggcaagcaggcaccaccccttggaacattttcccagtcatctcactctacctaatgggtgaggttaccaaccagtccttccgcatcaccatccttccgcaggtatgtcccagcctgagtcagggggatctctcttaaaagtacacactgggagacagtgagcaggtatggcttgccagaacttggaagacaaaacagatgagtagtgtccagcagtaaaggggtctcagaaaacccgttagagctcagggatggtaaagggaagggcatagatgcctacaaggcagagatggggtgaaggagagtgaggaagacactcaccctgtgattgcttacccctagcaatacctgcggccagtggaagatgtggccacgtcccaagacgactgttacaagtttgccatctcacagtcatccacgggcactgttatgggagctgttatcatggagggcttctacgttgtctttgatcgggcccgaaaacgaattggctttgctgtcagcgcttgccatggtgagagtgccagggctgagggtttggggtcagtctctccatattttccttgtcaaacaacagttagtatacctgggtccctgtcagtttaggggagggtagtaacagttgcctcaaacccaagtcaacagttgtgcaaaagctagtgtcaatgctcgtcctttttttgtactgcctgccataatgaccactgcctggattggtaacctctgttggaaacccagagcagcaagagttacctgggtaccttgggaagctcttgatgcaagggtagcagactgagtctatagtgaccctgtcagctgccacatggtgaggctgaatgctacttcagaaaggtggcagggttttgcagttggatttcagcagcagaaagttaagtttactagatttggcttttggtcaagggggtggcttttggtcaactcagaactactgacttttagttatcactcctaccagctgggtatacaaggaagggctgctgctcccagtgacttgggaagggagacaggcctctacctggtgctggcttcccagcctgctcctaaatatctcctgggaaggagattagataacttctgcatgggctaatttcaaggcctcactatcaggaagttctttttgttaactcctctatgacaatgagagctgtccattcacatttgccctctccccagtgcacgatgagttcaggacggcagcggtggaaggcccttttgtcaccttggacatggaagactgtggctacaacattccacagacagatgagtcaaccctcatgaccatagcctatgtcatggctgccatctgcgccctcttcatgctgccactctgcctcatggtgtgtcagtggtgctgcctccgctgcctgcgccagcagcatgatgactttgctgatgacatctccctgctgaagtgaggaggcccatgggcagaagatagagattcccctggaccacacctccgtggttcactttggtcacaagtaggagacacagatggcacctgtggccagagcacctcaggaccctccccacccaccaaatgcctctgccttgatggagaaggaaaaggctggcaaggtgggttccagggactgtacctgtaggaaacagaaaagagaagaaagaagcactctgctggcgggaatactcttggtcacctcaaatttaagtcgggaaattctgctgcttgaaacttcagccctgaacctttgtccaccattcctttaaattctccaacccaaagtattcttcttttcttagtttcagaagtactggcatcacacgcaggttaccttggcgtgtgtccctgtggtaccctggcagagaagagaccaagcttgtttccctgctggccaaagtcagtaggagaggatgcacagtttgctatttgctttagagacagggactgtataaacaagcctaacattggtgcaaagattgcctcttgaattaaaaaaaaaaactagattgactatttatacaaatgggggcggctggaaagaggagaaggagagggagtacaaagacagggaatagtgggatcaaagctaggaaaggcagaaacacaaccactcaccagtcctagttttagacctcatctccaagatagcatcccatctcagaagatgggtgttgttttcaatgttttcttttctgtggttgcagcctgaccaaaagtgagatgggaagggcttatctagccaaagagctcttttttagctctcttaaatgaagtgcccactaagaagttccacttaacacatgaatttctgccatattaatttcattgtctctatctgaaccaccctttattctacatatgataggcagcactgaaatatcctaaccccctaagctccaggtgccctgtgggagagcaactggactatagcagggctgggctctgtcttcctggtcataggctcactctttcccccaaatcttcctctggagctttgcagccaaggtgctaaaaggaataggtaggagacctcttctatctaatccttaaaagcataatgttgaacattcattcaacagctgatgccctataacccctgcctggatttcttcctattaggctataagaagtagcaagatctttacataattcagagtggtttcattgccttcctaccctctctaatggcccctccatttatttgactaaagcatcacacagtggcactagcattataccaagagtatgagaaatacagtgctttatggctctaacattactgccttcagtatcaaggctgcctggagaaaggatggcagcctcagggcttccttatgtcctccaccacaagagctccttgatgaaggtcatctttttcccctatcctgttcttcccctccccgctcctaatggtacgtgggtacccaggctggttcttgggctaggtagtggggaccaagttcattacctccctatcagttctagcatagtaaactacggtaccagtgttagtgggaagagctgggttttcctagtatacccactgcatcctactcctacctggtcaacccgctgcttccaggtatgggacctgctaagtgtggaattacctgataagggagagggaaatacaaggagggcctctggtgttcctggcctcagccagctgcccacaagccataaaccaataaaacaagaatactgagtcagttttttatctgggttctcttcattcccactgcacttggtgctgctttggctgactgggaacaccccataactacagagtctgacaggaagactggagactgtccacttctagctcggaacttactgtgtaaataaactttcagaa

SEQ ID NO: 5423 - DNA, 6000 bp, Homo sapiens
gatttgagttcccccatctcctccaggaccctgattcctggaccggtatgctgatgaggaggagctgccacactccttggtgccctgagggaggccattagctatcaggaagctgccttgtctgacagcttccctgtccactgctctgcattcacttcctgtttgtgggggctgtggagggtgggaagcagagttggtatctcccaccaaaaggttctagtgctggctgcagactggagagtgggatcttgtgtctggcttctgtccctagacctctgggggagatggggcggaggagggcagaggtaaacagaaaggcaggagttctatggagtgctaagccctgatagcagtgtttttcttggagagtgtggttggtcacagagtggtggaaaggggctaatatctgaacgctgcttattccactcactgggtgtgtggccatgagcaaggtaatctttttaagcctgtttcctcatttgtttattgggaataaaaatagtaacttataggattatgatgagggttaaatgagacagtgtatataaaatacctctcctatcctatagtaactgctcagtctcaaattcaccatttactctgtggccctgggcaagtcaactctctgagcctcagtttcatcatatataaaatgggaacattatacctgcctttgagcattctaataaaagtcgtagttagtatgcacaaatcctctcgcaccgtggttctcaaagtgtggtccctgcgcacagcattccctgggaactttctcgaaatgtaaaagctcaggctccactccagacctgaatcagaactccaggggctgggcggagccagccgtaactgttctccaggggattctgatgcgctctcaagtttgaaaaccatggctctagaacaaatcctggttggccacaaatcctaggagctggccaaaaataaaggctaattgaaataacttcccagcactaattggagccctggtgggtagatctgggtctcttaggcaagttacataacctctctaggctcagttgtctcacctacaatgtggacctataatagtacgtgactcataggacaggccgtgaggatgaaatgtgcctggcacatagtagatgctcagttaatatcagctagtactattgttagcgacaatggccgaatcacgatggggttactggaccacggggtgtgattttagggctgggggatataagcacttcactttgtcatcagaagctaagggcacaggaagaagctgagcaagcagggctgcctgctgtccttggagatccttttctgtcatttgaaaagcattgctcagacgcattatcatccggtgggggcaaaacaagaggtttatgatgcagaacagggaattaagttagacaacagagggccttcctgagagtggggttggaaggtgccagtgtcctctagggaggaggtgaggcaggcatccacttccagacaccctccccgcccccgcctccaccgaccttgaggcgagtggggtttccttggggcatctgcaggactgggggtgggtgtgtgtgtggggcggggtggcggggaaccaggcccccttacaaggactccggagcgggagtttggaggccgtgagtggagaggcctagtcccagcggagggggccgcatcggagtgctggggcggaggttcgaagcgtgagaaagaagcctgggggcgctcggggacgagggggcggagtgtggcgagaaggccgggctgcagggctcaggaggggaccgcgggtccagcgccctccccgtcccgcccccgcgcgcgtgcactcgggctggcccggaatccctccccagggtgtcttctgccactgactttcccaccctggctgcgcccgcgcgcccccgcggctgccaagctccaagccccgcgtcggtccccacccccgccgtgttcccccctgccaggccgtcttcctgcggttcccagggtcccgtttggcggccagagggcgtcggactcggctggcccagcgaggtccagcccgaacgtgtccttctgcctctctgcccctggggaccagggaggagcctccagggcgggggaacgagaggctactggacggcggcccgggactgcggcggccgcgtttctcttcttcaccttacgggacccggctcttccccctcctcgaccgccccgcccgtcagtcctgaaaacctggcgagaggcgcgtactgtcctaggggaattcccctgcaaacagaagggagcccgccctgcgcgtcctggagtgggtgcggcaggagcgcttccaggcactgcgtccccaggtgaggggcggagccggggcgcggttcgcggcagtggccaggcctttgtttccttgggttggggtgacccctggtggtcatccagagcgcaacaagggctactccctggtccagaattcagtcctttccaggggagaaatggagaatgatggagggtggcccaggcggtgctgattggagtagacagccatcctcccgaggttggcactgagggtgatagagacctacctgcctggccaagctactccgccctgcctaagcatccccttccagagctccaggctggtggggttttattaagggaggcggtgctccttacacaggcctcttcctgctccccgtaaccctgtcgctggaggtgtctgtgggaaaggccaccgacatctacgctgtcaatggcacggagatcctgctgccctgcaccttctccagctgctttggcttcgaggacctccacttccggtggacctacaacagcagtgacgcattcaagattgtaagtatttggaggaagaacagtacagcccagcctccctcacccatgcctcgcctcctacgctctggtcccttctggactgagacccactgcgatggtccccagaacccaccttttgccaccctttctcccagtattcttttcagagcctgccaggaaggatgtaactgggagagatgcttagatcgtgttgccagaattcggggactgttggaattcttggctagagtcctctgtctggtcttaagaaacacccggagcttggattgcttgtctaaaaatcaatagtttagtctaagaaacaggagagagaaaggccttggaaagcttggagagaaggaatgagaagagtctgaatgagggaagggctgagaagctggactggcagggaaaagagagaggaagagagggagagctgcaggagcattggcgcggctgcggtgggggtgggagtgaactcactagattgtactcactctacaatctagtgggggatccaacctgagactttcacagggaagccacaagagaccaactctggttataattaaatgctgacctcagagggtgctgacgggcagagctgtgggattgatccaggtcttgacagggggccaaaattcagttgggcaggtgacatggtgtcagcaaaggctgggtgggaggtgacagagggagatgagtgcggtgcttgcaggagtcattaggtaaaaggcttttatgaagagagcagtaagagctgtgctgcattccagggagaccttaataaaaggaaatgggtttagcctgaaacaagtaaaattcaggttagacaggcagagctattgacgctggaagaggaaaccatggggggaaggagcagggcgtgactacaggctcttcctggtcctggacaggggaggcatccaaggagtgggctggtgtgatgtcatgacccttgaggaccccgattctttctcggctactttctcaccccaactcccttcctccaccagctcatagaggggactgtgaagaatgagaagtctgaccccaaggtgacgttgaaagacgatgaccgcatcactctggtaggctctactaaggagaagatgaacaacatttccattgtgctgagggacctggagttcagcgacacgggcaaatacacctgccatgtgaagaaccccaaggagaataatctccagcaccacgccaccatcttcctccaagtcgttgatagacgtatgcagtaggggctggcacagggcagtggcgtgggaaggacttgggaggcacccaactcagcatcacagtgaaatggcaaaatggaccgtgttggtgttttcttttgctttacactttccagagctgctggagttacatctaaaagctagaagagctcagcttgaacacttattctgctaccaaatagcttatgaaatactctctaagcctcgttttcctcatctgtaaaatgggaatatggcttcattttcctagagttgtggttagagaagctacctggtagtgttttgtggctagtagggttttctccgtatatactgattattaataccattgggtattccattagcaaaaattgattgaatgtcaggcattggactaaaaagtgctatgagtgatacattacattcttccttgaggaattcacagtacaaggtaggacagaagataaataaatagctagaatgggcagaacatgatgcatacatctgtcagtagaggtgaaaacaacagagatggagtaagacatggcccttgtcctctgggggcttacatcctacctaggattccagtctgacacaggaggaccaatcatacaaggagggtgcatatgaaaaggagccaggtggtccctgaccagacctggtgtggttagagaaggaggatatgataaccagggctggagaagtgaggcatggccccactgaggggaggggcctggaagactagggaagtgcagaagcagagagaaaaagggaaggggacttgcgcaaggatcctgactctgctgcattttgtgtgtaccgggagtttgctgctctcctggatgacactgagtccctggagagggagacacccgtgagttcaatctcgagtatgcaagggcggagccagaggttatccaatcagcttttctgagcctggagtcataggtctgcctatggtgtcacctcttcctttctgtctgggcttctgtcacccagcttgtactcagccttttcagaaggaagagaacgggcatttgtggagcgttttctgggtgccagatcccgagttagttgctgtcattgattttagctcctttgctcctcaccagctcccttgaggtggatcgtctctccatctgtatggattcattcatccatctgttcaacaaatatttactgagcaccttgtatggggcagacgttattctagattccgaggatgtgatatgaacaagatagacaaattcctgcctttatggagattaccttcctcctcttctgtgtatggagataccaatagaaaataaagaagaaaaatgatattgtaaaagagaacatggctagtgttaagaagaaaaaataaagcaggaaagaaagatggggtgccagcagggtgaatagggaagggctctctggaaaaggcgatagagtggggatatttgaaggaggtgagagaggagccatgagggcatctttgggaagatagggagggaacagtgagtgcaaaggccttgaggcagatgcgtgaagaatcacagcaggctagtgctggagcagggcaaggagtgagagatgagtcaggtcaagccagattgtgtaatcaccctgctggaagggtgagtgaggtgggagccactgggagcagaggagttagggcctgaacaggttcactcaggcccctatgccaagaatagatgatagagggaggagatcagttaggaagctattgcagacatccatgcaagaggtggcttgggccagggccagggagattgtgagccatcagattctggaatattttaaagttagagctgtcaggattctcaggtagcttggataaagcgtttgaataaaaggcatcaaagaagactccaaggattgtggttatagcaattgggaggataaagttgttctcagtggagaggaggaagactgtgggtggagcaggttccggaagcagtcaggagtt

SEQ ID NO: 5424 - DNA, 6000 bp, Homo sapiens
tgggtgaaggcctgagcaaggtggattggtagaccattcagtcaggaggaacagattaatcttgtttagacaaataaacttcagaaaagctttgctctaaaatattgattactttctcaaatgtggaggaagagcatagtgtggcaaagacacaggctcggatccaggatggctgggtttgaatcctcgctctgccacttgctctgtgttcttaggcaagtcacattgtcattctctgcctcatttcctcatctgtaaaacctcatggggttgttgtgaggattaaatgagttactgtgtaaagcacccagggcctggcattaaccttctctgctttattacacatcaactactgatttctagtgtgctgctatattaagaaaaaggtctgatcttttaatattgaaaacaaggcccggtgattttcccaaagatcaaagagttggttaaaggaagatctgagcccagaagagcatttaaaaaaaacttttagtaatttttccgctaaaatcattgcttctgtcttcacggagttctagaggtgcatccgagtatgtaggactgacaatgagcgttttccattcatgatactcatgtttcttagcatttgtttgaagatggtttggatgtggctctgagttactcggctttagtgccaagattcagaatctttttagagtcgctggcttcctcttagaatagagtggagcggggactgctgcaagatgcctttaagttgatttcaacttaatggtcacattgtcagctatgagcatttatccagtatatgccaggcattttgccggtgctgccccacggtaacaggacacacatctaaataaggcacgtatggtgctgccttttagagtctgcagacttgagttggtggcagacatataaattagtcattactcctccatgcggttggtgagctgcagggggaatgtcccactgctaagtgctgttttctgggcagaggagggagcacaaccaactccctggggaaggcaacagatgtcccagatgtgatgaacttatgttaggacacaccataaaggaagccccttatgaccttcatccatgtatgtatggggcaaggtgggtggcacggagcaggaatggggttttgcttatgttgagagaggtctgtgttttcactagaggttcttttgtttaggggaatctatgtgactcctgatatatctggctcagtgtaattattatccccattgttacaacaaggttcaaaaatggaaacttaagtttcctgttcattctgattcatcatttgccattcttagaaaggtagaagctcagaacctgaaatctcccctaaagctacaaactctgtttctgactcttatctatataaagaatcttccatggtaatgcttcctattttcaaagcactgttatctacgttatactattagatcctttcattatcaatcccttttaaaggcaaggaaacaggttcagcaagatcagctgacttctctgtgtaagtgggacctgaggtaggaacctccttgaatagcttgactctgattttccaggtagaggattttgttgattggagaatacgattaaggaatgtcttaagtaatcaatttttttttttttttttgagacagagtctcgctctgtcgcccaggctggagtgcagtggcgtgatctcggctcactgcaagctccgcctaccaggttcacgccattctcctgtctcagcctcccgtagctgggattacaggcggccgccaccatgcccggctaattttttgtatttttagtagagatggggtttcaccgtgttagccaggatggtctcgatctcctgacctcgttatccgcccgccttggtctcccaaagtgctgggattacaggtgtgagccaccaggcccggccaagtaatcaatgtttattaattaaaatggctaccgtatgtgccagatgtcctagcagagctgggtggggtaccttgctgttaatgcaaaaaacatatctttcctcttagcagattctgaggtggaatctccccagcggcagggtggccaggggtaaagaccacggctgaggccaggagcagtagcaggtgggaactcaagactggttgcactgtaactcctgagagtcagggttcttctgtttagctaagaaaatttgggggtgtttggtagaacagtgaatccttttccaggggctggtaaatgcaatgaaatgaatactacagagataacatgcatatcaaacacatacttttgtccaatgcacagcccaactctcattctagccacactgccctgcctttaaaaagttaaaaagaaaaataagataaaaagtgcaccatgggccaggtgcagtggcccacgcctgtaatcccaacactttgagaggctgaggtggaggatcactggagcccaggagtttgagaccagcttgggcaacacagtgagacctctctactacttaaaaaaaaaaaatagcaagtgtggtgtagcatgcctgtagtctcggctactcaggaggctgagacaggaaggttgcttgagccctggagatcacgtcactgcaccccagcctgggcaacagagtgagaatctgttccctcccccaacctcttcctcccaaaaaagtagtaattctaatttaggtggagagatggggaaaaatttcaggctggatatcctataattttttgtttgtgtgaaacatacaggtagtggaaaatctagggttgtcatctcaagggcatcctgcaatcatttgctttttttctcttgaaaagcaactttcatctaatcttcccttatggccaatctaaagcagcccccaagtgactcttcaaacactactctgttttgtttcatcatagcacttattgacatctggtattttcttattcattcattcatttatttgcttcttttttctccacctcccgctgcatacaaactgcaaatgagctgggacctcgtctgtttttcttgttcaatgctgcataccagtgtctcaaacagaggctgctccgtatagtccttcactattggttttttaaattaatgagcttctcttgacatgattttgtgatttttgttcttttatcttaagatttgaaagttgagagcagcatgttttgcccactgaaactcatcctgctgccagtgttactgggtaagtagaagctaagggactccgtggggtatttgatttctcctgagttctgtgcattattaaaagccaattttacatattttcgattcccttgggtttgttgaagatggaaaccctaatgtggaacttcacagttttgttgaagcagctgttgttgaagccaactagcttatggtttcttgggaagctgaagcttcctgtttccattagaaacagaatgcatttgggtcctaaagggtgttctgggaccctcttacgtgacaaagggaaagtttctctgtggcattcctgcactttaaattgttatctttaaaaccacagttcgccttgaatcaggaactgaaattaccaaagagagacccagagctgtttttcatactgtggccatgtcagccttcttgtggttcctcaaatggactgagctctttcccaatttatggtggtttcctttgcctggaaccttcctcccagcacttcaacctagcaagcccgcccgatgcttccttacccttcaggtttccccttatgctccacttccttctgaggagcctgacctggccatctcctcagaccagattggtctcctgtttatgcctccacctaagtgctgagcttctcgttgctcatctccactggtttctaggttttcatccttttcccccatgcctttttctttatcccatggatgtagttctggaaggagaagaaattaatcaggtgctttgctctcatagccttttctttttctctttattattattttttgaactttggacagtaatttaaaccctgactcagcaaagtatacaacaggattgcctttgctcctattccaggcaatccagagtgtgtacaaacatgcacacaggcacgcacaccaaaatggtgttcattagataatttttctcaaagaagcagggttataatgatctcagaaggtatttagacattttcctagaggtctgtggagcagcctgcaggtttttgccctccgatccagagagctaccagtccaacccctgtatgtggtgacttggtggcactgggggttttgtagttttttgtggagaggttttcctttcttgcagaaaatctcatcttcttcagctgtttctctaccaagattgcccttcaaacatcagtttctctttgctttggttgctgttgttgcttcctagcagtccttcatttaattctacacacagtgttcttaatattaaattcgcttattacactttcaatcacacatggagctgctcaattcttccttacaggaaaattccaaatatttgttggagctaattttgatttctttcaaaataattccctctgaagggtttagagtcgatgttttcttttgtgtcctccctgctgtgtgagcctactgttggggcaggaagttaactgtcttctctcagggaaacagcttggatgaaaagactggcacattttctgttcattcccatcacttggctcttctctgatatgaactgggcagcatctaaatgtatctttcttgattttgttgtctctttgcatagagcatatcttgtgaaaacagaaatatccatgtaatggttttttcttgtagtgaccgctcgaaattgcttgagcaacatagagataatgggcaggggtccctgtgtgaagcacctagaggctggaaagctgatggcaaagctggaggggtgaggcagggagaggataaacacagtggaaatgcaggaggaaagctgtgctctgtggtggcctaattacaaggacctgccctacagccagaatcagccagcaaatgcttttgtaaaggaactaaaagaaagggaaaagaggaagtaaacaaaaggtcccttttcagagagggaaccagtgggagatttaagagcaaggaacaacccatttcgtcgttatggtaagtggaggtgagtttctaaattgatgatcagaaaggagagacttctggggtttcccttatttctttagaaaggttgggaggaagaattccagaaaagtgtaaggggctggataggaggagggagccagatagcatttattgtagtatgaagattgcagaatccttctgatgagccatataggtaactagaggacagggatgccatgctgcctttgaacatgcctccgaggactttgtctatgttggatcatccagggagaggggtgtttagtactccatgattggaattgatttttgttgttgagagtatttgtctaaatgatgtgtcctcttgcctttgacttctatagattattccttgggcctgaatgacttgaatgtttccccgcctgagctaacagtccatgtgggtgattcagctctgatgggatgtgttttccagagcacagaagacaaatgtatattcaagatagactggactctgtcaccaggagagcacgccaaggtaacgcgggggaaacatcactatgtaatagaagcccctgactgctggtgtcaggacagagtggtgtaagagtcaggcatcaggtgccaccaggaggtgttgcaagagccggggctttggagattatcagaactgggcctcgtcctagctcaggaatttggttatgttatcagctgggtaagtaagttactcaaccttgctgatcttagcttcctgagctgtgaagaggaaggcaattacaataatggtaatgcttacctttcaagtagttaaggggctgatgggagacacaaacttgaaatgagaggttccttgttcttgcacatgaaattctttgagtttccttcctttatctctaccctttgttaagtagcagaagcaggtgagaggggtaaattccgaggttctaga

SEQ ID NO: 5425 - DNA, 6000 bp, Homo sapiens
caacccgttaaagtaatattattatggctgggcatgatggctgtcacgcctgtaatctcagcactttgggaggctgaggcgggaggatcacctgaggtcaggagttcaagaccagtctgaccaacatggtgaaatcccgtctctactaaaagtataaaaaattagctgggcatggtggcacatacctgtaatcccagctactcgggaggctgaggcaggagaatcccttgaacctgggaggcggaggttgcagtgagctgagatcgtgccactgctctccagcttgggtgacagagcgagactccatttcaaaaacaacaacaataaaagcccaaaaacacaacaaaaaagtaacattattataaccgttctgtaaatgccaagccgactcatagcagcttaccaaggcacacagatggtaagaggaaaggctgagatttgaacccaggtctctctagtgctaatgtccatgctctttctatctcattgaactgtttgctttataccatggagctcctcaggccatctgggcactgccctttgctagcaaaggagctccaagcaacatgttatttcccctagagcctggcagcgcttagatgtccagagtggggactctaatcctctaaagtccagcctgtaccttagccatttgctcagagactctagtcacttgagggtgagcacatttgagaaacggtggggtctgtaagaacaaagagtcttaagagatcatgctggctggttgtctggggaaaggaaagatagaaaaaacccacagatttctagcaacattgctgaggcaaaccgaaaacagtctaggctattaccagttagaaatgtttgataaagaaagcatcattttggccgggcgcggtggctctcgtctgtaatcccagcactttgggaggtcgaggcaggcagatcatgaggtcaggagatcgagacatcctggttaacatggtgaaaccctgtctctactaaaactacaaaaaattagccgggcatggtggcgggtgcctgtagtcccagctactcaggaggctgaggcaggagaatggcgtgaacctgggaggcggagcttgcagtgagccgagatcacggcactgccctccagcctcggcgacagagcgagactccatctcaaaaaaaaaaaaacagaatagaacagagaatggaggagagacagtgttcagagacagaacggctgagggagggatgactcttcagattcaagaagcataatatgccctgagcaggatgaataaaatacatctacacctaaacaccaagcatctttaaagtgataaatggcagctactaagagaccctacagcaaatatcatctatgtgttgaaacctcaagtgcctgtaatatcagggacatatcaaggagactgcctctccctgtttctatcaatattgtgttggaaatcctaggtgaagaccaagtaaatacaaggaagaaaaagacttggaaaggaagaaactaaattatcattatctatacctactatttacataggatacctaagagaatctacaaaaatactattaggacaaggaagaatattccacaaaattgttgatagaaatcaaaatataaaaatcacctatattccagcaacaaatttagtaacaaatttaaatatttaaaatattaaaatgcttttaaagttacaatagcaagaagtactccccagttccggggataaatttgacaaaaatatacaagacatttaaagaaaaagttagaaacctttactgaaagactttaaacgtaactagatggagagtaaaacctcacaattgtaaacaattttctcccaaattgatcttcaaattcaatgaaatcccaatcaaaatgcccattagatttctcaaagaacttaataagctgatattaagtcacatggaaggctaagtagccaaaaatagtcttaaccaagggacagccagataataagtgttttaggctttgcaggcgccataggtccctgtcatgtattgttcttctatttgtttgcaaacaaccatccttagctcttaggccacagtttgcccaccctcggtctaaaccatttcaaagaaagagcagtaaatttgcaagaggttggtaggatttgtcttatcggagatgaaggtttcctttgttttctttttttttttttgagacagagtctcgctctgttgcccaggctggagtgcagtggcgcgatctcggctcactccaagctctgcctcccaggttcacgccattctcctgcctcagcctcccgagtagctgggactacaggcacctgccaccacgcctggctaattttttgtatttttttagtagagacgggatttcaccatgttagccaggatggtctcaatctcctgacctcgtgatgcacccgccttggcctctcaaagtgctgggattacaggtgtgagccactgcgcccagccagatgaaggtttcttacagagctatcagaatacagagtttgtgatactgcacaggcatacgaaatggacaaacaaaacaaaaagccaccaatcaggttaatgcatgtaggaaaacctgatatgtgagagagatgacgttacagtgattgaaggaagaatgaactgcccagtaagtggtctagggaaaattcctaatctatatagaaacaaagaaaaacacaaaacaaaattagattccccatctctcatactaaaccaaaataaattatgaggggatttaaacacaaagtaaaatgtcaaacttgaaaattccattaagggaatataagagactctctttatcaccatgcaatagagaggatttcccaaataaaatacaaaaggcacaaatccaagaggaaaaataattttgatcacattatatgtaaagaatcagctgttcattagaagactccataagcaaaattcctagacaaacaagagattgggagaaattgtcaaaacatgaaagcatcaaaggaaaatcaatgagaaaaagacaaagatctcagaagaactggaaagcagatgaacaaatttcagaagcagaaacccaaatagcctgtaaacatgtgaaacaactataaaatataatttcacagctgtcattttgaccaacattttattttatttttgagacatggtctcactgttgccaggctggagtgcagtggtgcaatcatggcctcgacctcccaggctcaggtgatcctcccacctcagcctcccaagtagctgggactacaggcacgtgccaccatgccaggctagttttttgtattttttgtagagacagggtttcaccatgttgcccaggctggtcttgaactcctgggctcaagcaattttcctgccttggcctcccaaagtgctgggattagaggcatgagccttggccaacataataatctaactaaatgctgaagacaacctggataaatgagaagctatacactcctggtgggtgttcgtgtacatatatgggggaaatgattattttaatctgcagaaaaggttgtttttctcttgagaaacacagcagaaggaaatgcagagctgttctgtagatccttgctcctgtgccctgctccttccccatcttgtgttcccacgctgggcactgaagctctgattccctttccctgtgtcctctataggtctgactaccttgccatcccatctgagaacaaggagaactctgcggtaccagtggaggaatagaacaggagcagtgtgacatgaggtgacctacaggaacatgggaggggaaggcagatgtggatggcaggttgtacaagtgactttgttgcccacaactgaagtgactttaaatttggtcccttaggtcactgtctaccctgcctggggtccccgccctcagggtaattctttaagtcagaaagctctgtatgatgtcagcgcttcggaaggtgaactgctttgacctgagtgtcgaggcaatctgaacttgcccatggtaacagaggcacaggattctccaactcccttctttggtcaaagaatttttgggctgggctgggctggactgggtgggaaattctcagtgagttattttatctttggtaggtggcctgaacacctgagggactggacatcccatgttcagcaatgtcaatggcatcaggagggcgccccaagggccccatcgcttcccttcatgcatccattgttctgttcattcattcatccatacatccacctgcctctgagctttcacctctgactccctaactccatcagacctctacgcaccataagactctgccagaactgagaagccaacatttctacatagactcaacctcaccctctcctagttttccaacaagacactccaaagccaactggatttctcccctgtgctccaaatgactttgtacaagtgctggagttagcacctccctctgcccttaactggctggaactggttcattctccattactgcaagagaatggaagtcttaatagaaggaagcaggagtgattagttcgggttaaagcaaaagtgtgtcatgaacttggattccctgaagtcagttttgtcaggttcatggcccactttgctacagcatcagagtgaagcacgcctgtctaggttctccagtgacagaaagatcctgaagcatggactaacatgctctctggagcttagtactccagagctagatcctgatgggtctctaaggttccctccaagaagacaaggacaggagacttgggaaggaccaatggtaatttaagtggctcttaaaaagtcatgcaacatgtttctggacacgttcctgatcctattgcgataatgtatgtgtgccctccctgtgggcacaccacctgggcattaggactgaaattcctgagttcttcctctcaaaatttctgtgcaccagtattattcctcattttacatacaggaggcaactaagactcatacagggctcaactgaataagaggcttaagaggataaactggagcagaaataagccttaggtgctgcccagtttacacttcctgggatggatgtttttgtttgttttgttttttgttttttttgtttgagatggagtctcactctgtcacctaggctagagtgcagtggtgtgatctcggctcactgcaacctctgcctcttgggttcaagcaattctcatgcctcggcctctccagtagctgggattacaggtgtgcaccaccacgcctggctaaattttgtatttttagtacagacagggtttgactatgttggccaggctagtcttgaactcctgacctcaaatgacccacccacctcagcctcccaaagtgctgagattacaggcgtgaggcactgcgcccggtggataactttgtttctgaaaagactgacattgaacttgtctatggcaatgcttctttcacaagcacggactgggctgaggtcaactctgatagattcagatgactagaaattggccaaaaaagcagggagaagaacatgaggtagacttaaagaacttcctttatgtaaagatctgtgactctgaaatatcctccaaaaggagagtgcatctgagactgatatttaaactaagaaaaatgtttagtctgagatggatcataagtaaatgagcagtgtgagaggggagggatgggtaggtgctttccaaatacttcgcctatgaatgcataattttcagatttttttcccctagattttgagggagcagagaaactggaaaaaactttagtcaatatctcgtgtttcattttaattaagtgacaggtccaagtgtgacatccttcagcacccagggacaagagaggggaaagatgctttatggaatgtaagaagatgaaggtgactgggattcagcgagagagaggtccctcagacctgggacctccctttatagggaaagaccatattccataggtttagggctttaccttaaaagctcatttttttcattcttccatccctaggaaagtacttaaaaccagacttttaa

SEQ ID NO: 5426 - DNA, 6000 bp, Homo sapiens
gcaaaggaccaggggaaacccatgattgaagttttagctgctgacccctcccaccctgggtgttgccctggaaacaggccagccacgggaccaggagggctgggagggggagcacgggctgagccctggctgggattcagctgaacttgcactctggtctgggatcccagcccacgtttccctgtctgtaaagctcaggtgggatcagaaactgcccgcccggagggctgcatccctcctgccgctgaggctgggcatgaccttgactgggagagggtgttgaaggtgtctgtccccagcctcgcccccacacctgtgctctctggccctgtccatgcctgggacagatgtgtgctcacccccagggtgctgtgggatggggtgggtgcacacggcgccacgagcacacgtgcccgacacctcagcggtgcacacagccaaggccactgcccaccgtacccacgccgtccgtgtcctctctacggtcctgggagactggcgttgtgagcagtggggcctgtagatggggccgggtcctctctacggtcctgggagaccggcgctgtgagcggtggggcctgtagatggggccgagactgaactgaccctagcctcaccactcatatgtcggggctggtgatatttgggaatgtcactgcctgccatgcagctgcccaggcctgatgtgcccccccagactgttctataggggtctaggttgcaggggccagggccagggctgtggtgggatggcacctgaggtgcggctgctcctggagcctggggggtgtgggaaggtgccccccacccagggtcctaagtctgttgccttcacccccgactcccagcagataaatacccaacagtgcaggaaaggattacagggaaggcctggagtgtggggttagcctcggtggtcccaggaggaaagactgggggacctctggactatctgtccctcccctggggctgctgggggtatcagagtggtgtctccagcctccagggctcaggtttgggtgggaggggcctggtcccacccagactctgtatgtagcccccagtccctgctcctctgtgtgcatgagggagtgccagcttgcttgggaccccccagggtgagggcttgggacgggcactggggccccgcaggggctgaggcagccaggaagcccacagcataggctgtttgtgttggcgggcctccctacctcctcaaagctgcctcagagcccgtgggcctggggggccagggtgtgtgggcttggctctgctgtctgtcctgagctgcccctgctgagctgtgtggagaccccgaggtctgggctgggccaggactgagctgctgccctgctgctggggctcagagaggctgctccacgggcatggcacccaggctgctgcagacaggctgctttatcatgtgggcaggcccctctttgggttggacctccgtctggccttgtgggtgtctgagatctccttgcagctcagtccccagggcttttccaacctgcagagctctggatgtctcttttggggctctcgctcagccagggttggggtggaggctctatggttccctcctgcccttgggctactggaaggacagttacctcactccagagagctagttctgaggggcgaggtgttgcggggttgagccagcagggcagggagtagtgggcactgcgtttggctgcccaggtgggtttggggcctctccctggccagaaatccctgagtgccaggaggaggacagactccccagcctggcacccatggtggaggagggccttgcgggtcattgctggcagctccatagggagggcgtgaggccccttcctgagcctgggtgtctgctcagagcccaaggcagggtggggtaggggtgcttgtgcctggtaggaagcagacagcaggctggtccaggggtccaggaccccagggaggaggcactgctgcgtgtctgtgtgggtgcaagcatgtgtcttggcctgtgtctctgcatgtccgtgctgtgagtacgtctttgaacatgtgttctctgcacaccgtgtctctgtgagtgtgagtctgtgtccctgcctggctgtctcagagccctgaaggagcagaatttggtgactcagtcattgattcagagctttcctggttggggctactcctcagtggtcttcttctccgagtctggtggtgtatcccctgcccaccccgactgcccctctgccctgtagggacctggccccaggtgggggttccctgcccttctctgggagcatctctggctgtacagctgagggtggaagccagggctccactctgcccatctttccttttgcagagcttggggcttccttggtcgcacccaccacctgcctgcccactggtcagccttcagggaccctgagcaccgcctggtctctttcctgtggccagcccaggtatgtcagggcccggctgggctggatggttgtggtgggcagcagtgggcttgcctctgggtctcactttgccagcccaggggccttgccagcggacactttgacaccacacctgagtatctaattggagctcccgtggggaggggctggactttggagacagggtcccagaacaccccgactggggtgttgaaggaccctccccgactgagctctgacactgtgccttgcccgggcccctgactgcgtctgggcaacccagtgtgaatcttgaacttggcaacagaagcaagcccagctccccgcccccacccccccccaaccccgctcctcctgaccctcggtggccttgtgaggtttttgatttcttcttgaataggcttcatctgctcacctgggcgatgtgtgcagagctttgtagatgggaaagggggtgggaggggtcttaggggacactgggactgcatcctgggcgctgggctcagtgcaggcacccagaccagctctcccttcgccctcccacccgcctgggaccctcgagccttgcctgccacttccccttccacccccagccacagagggacgcaggggagatggggcaggggtgccactggctagcctggcggcggatgctctccttggggtggctcgggtggtgtttttgactgcaggtggggtctggcttctcccagtcagcctggggtcctcccgggtccccgtggcacctgcccttgcctggcccacgagtaggtgctctgagcgctgcccaggtcacatgtgagctccctggaggcgctgcacacggctgagtgtctgccctcaggttgcacctgcgtggccaggggaagggggccgggcgccatctgctctctgggcagagctgcgggtgagggtttctgtcagggttggggtcccagggctcctggggtctctgctgggccccgatgcgtggccgccgttctgacccattcctggggcccagacccaccaaagaacccccaggggaaggacagggtaggggccatgggaagccccaggatggccttgtgggccttcaggggacctccaggccagcctcctgttctctgggggccccctgtccccttcccccagcgaggacctgggcatggggtgctgccctggggcttgggctgcagttctctacagagcccttggggggcagcagaggcttggggcacccagcccaggtcgtcaggggtgggcagagctgcgggacctccctgggcacccggggcttccacggcagccctccccagacctgccacctcccacatcagtcactccaggaggacccaggcctccagagctggtcagccctgccatggagcacccccttcccctcccttagcttcctctccctcctcttcctcctgcccttcctcattccccacctctgggcttcaggtcatctgccaggaatctgggccacgtgctgatatcttcccaacaccgcagggcccttgtgccctgtggtggggctggggcttcagaggcgtggggtaggctgcagggcacagctgggggcctctgtccccatctccggctgtgggaggtgtgtgcgcatccggcgtgatgacacccaggagtgcaggcacatctgcgcacggggccggtatgtctgtacctgtcaaggggtggggtggggtcttttacaggctgacttccagcctgggctggagcaaaatgaaattctgggccccttgtttaaaaattaccaagaatttcaagacgggaacagcagagcatcaagccagctggggtgggtgcgcgcgactgcccttgaagccggccccgctcccgcattggggacagcacggggcggaggccgagccgggcccacctggagcgctctgggtctgtcctggggctgccagcctcctgcggggctgcctggtggagggggggtgggtatctcaggaatcacacctgcgcttttctgtgttctggaacctcccatatagtcaaagactcaacgacacctgctccatgcagtgcaggctgacccagccccccacccgccgccggcactcagggcttccccaagggcgcccggggcggagccgcttcaagttgccaccagacagcaacggggtcaccctccatttgcgtagtgctttgagtatcgttctcgtggttggaggtctccaagcccggcccggggccagagtccgggcgaggtaccgtggggggaagggctgggggtgtcggtcgcgggctaagagctgcccaggtttcatccccaggccccggccccggcctccagtcccctcaggcgcccttcgcgagcatcttcctcccgcgcgcgaaggtgggggggctggggcgccggcgcgggcgaaggggccggggtcgcggctggtgcgttgccgggggctgcgattggtccgcccaggcggagcgctggggtttgccgggcggtgcggcgaggaggggaggggtccgcgcgggggcggagccgccggggattggccgggagggcgcggggcggggcgcgcggggtcgggggcgcgggggccgcagcgcgcgggccgggcagatgtttgggttccgccgccggggtccgagcggatccgcgcgacccgctgccaccgcgggggccagagcgggagcaggagcggggccggagcaggcgccggccggcgggatggggcgttccggggcggcgggtgcggggcgctgagcggcggccccggcacacccgggcgcgatgcgccgctccagcacggacgagtccacgtaccggcgcagcccctctccggagggcaaggagccggacttcgcgcgcggcggccccttccggcgctacagcagcctatacgggcgcgcgggcggcggggacgccgggggctccttcttcggcctgcacgcgaaccccggccccaaggcggcccaggcgcgctacacgtcgcccaagggcaacaagtacgtggttttctacctggacctctccttcatcttcctcctagaactgaagcgctgcggcatggcgcgcgcctgcctccaggccgtcaagtacctcatgttcgccttcaacctgctcttctgggtgagtccgggggccggggtgggggcccgggaaagacccggggtccctcccgcggcgggtcgcggggtctggggagtcggagtcgctgccccggccaggcgttgggtgcggttgtggggatggtcccgggaggacccaagaccgctgctccggctaggagcctggactgggcgggtggggaaggtttgcaccatcgcggggtccgccccctgcactcagagcggctgccccacgccctggtcccctctcctctcctctcctctcctcacttgatgagacgggacacgttgcacacgtgcgcgccggacagggccacccgggcactgcgcctctcctagggtcggggttcgagtccgggtcgtggccagttttgcgcggggccccggtgcctcctctgcgcccgctccctcctcggtgcagccgttatccttgcctcggccccgcccctccaggcaggcgacctgtcgggcccagggactcacttccgag

SEQ ID NO: 5427 - DNA, 6000 bp, Homo sapiens
cagtggggcctgcacgcagggcgtttgctcacggcaggtgcgtgcatggtggaggcggtgccgcggggctttggtccagcctggtcaaggtgtggaaaagcccccgtcgcacctgcaagtcccccacctgcttgaagggagctcctggctcatcctaccaggaaccccggggggctccgaaagccaaacctctggtctgcccctgagctgggggtgcctggagagtgtggggccagcagccgtgggaacgaggctggaatcccgagcaagtagaaagggggcggggcagggaggatgcagcaccaggacaggtgggggccccggggctctccaacctgggggtcaactgcgacttccgggtcctaagtgtggggaccccacagggtgggacccactgccctcctatccagggatacaaaccaccctgcccaccacagagcctgaattaggcctcctcttcttccccagaaaacctgaacagccccccatccacctcccagagagcccagacggcccctgcgtatcccatagcctgcccgctcatctctcccacgggggccctggtgggtaggacccagctcgcactcacacagggcttggaaagctggggcagctccagggtgaccccaggaatccccaggacaggagacattgcatgcacaccacgtcattttctgacctccagggagcgcactgccaggaaacttgggaggctgagcgaagggccttcccgcaaagagtcagagtgggtgggggcgcgggtttcaatgggctccaatgggctccctccctgggccacagcctcacagcacccagcgtcccagccaggtttggagcaggggcaggggtctgcagcccccagaggtgtcacacccctactgcctgcctctgtcccccacttctctggccttgggaccctgtcccaaggcgatgctgacacatctgacagccaggccgccatgtgtcccagcccgggcagccagtgggtgggtggccaaggcagcctgggcaggaaatggcaacgcggtggagggccctggaacattcctccagcctgcacactcgctggtccctctggcagctggtccaggacatgcctctgtcggggactgggctcccacaccccgacaccccctgctctccaggcccctgtgtgtacagggaaggctttgagcacacggctccaaactgtgggtccccattctcccctcgtgccccacctaggtcagtccctgcgtctgcccccactcggtgctgctagtgccagcagtatgagggtttgcattggcttttggccaaaccctggaatgtgcctgctggctgcacggcagctgttcttggaacagggcgacaatgcacagactgtctctgagacgtgggcggatggggtgcagactgcccggagctgcgcatgaacccaggccccgagacaagggtgaatgggctcacacaggccgagacaccggtgaatggtgtccaaagatgcagcaggacctggaaccggcactgggggccctcagcctgggactcggcctgtgtgaggtgcggggcacaggtggctgacggcacacactgctaagaacccctgatgaatggggagcagagcaccccaatactcagactcacggggacacgtggtccagatgctcaggaggggtgtatgagcgacggcaccctgattccagatgggcatctacagtcacaggcaaagggcatgtcgctggctgtgcagggtcgtggggggacaaggcacccaattttagggtcagtggggttcatgtctctcagatgcttctgggattgtgaggacttcaggcctctgaggaaggggcacaaacccctggaggcttaggtgatgaagctgagaattcgtgaatagggcacaggggtgtctggacagggatgaatgtagctcccacggccgagacagccgctgatgaaagggcagcaggcgtccaaagaaacaggggaacttggaactggcactggggccctcgacctgggatatgcatctgcgttcgaggcaggcagtgggggttaggctgctgaagaccctgacggacagggtacaaggcatcaaagccctcaagcagctagagaagaggggggctcgagggcttggaatgtgggtgcacagctcccgacgctgcagggggcgaggtaagccgtcgcacagagggttggggtggagcgtcccgagacccgaaaacccagggcagagtgcccgtcagggtgatggttgaagtcctcactactcagatggtcggaggagggggtaggacacccagtcagctgccggacactcaggtaaggaggtactggagccaaactgtctgagtgactgggtctgcaggacctgaaccttcacaataagagggccccctgcagtgggaccagaagggagggtgtgtgtccagacacgtgggtgaataagggctatgctttctgtcctcaggggactgggggcacctttgcagatgtgtgcaatatcacccacactctcagaggattccagacacacaccactcagaaatgtgggctaggagcacccgctgcacctgcgctgagagagctgcagaaagggttaccagcccctcgggtggaaggagacagccggagctctcagggtaagataacctcacttctgacatatagggcaccacgacattcagagtcctgggatccacgctgcccagatactcagacaagtggggtatcagggcccgtttctctgtcatccaggtattcgagtgattagcgttccggctccagaactgtcaagagggcggatggacagaaacttgcccaagcctccaagcaatggggtccagagacccagacgctcaggctgatgagtgcaggaacccacacactgacagtaatggggtccagagacccagatgctcaggctgatggggacaggaacccacacactgacaccaatggagtacagggctctaggtatttagaataatggggtacacgtgtctagatgtcagtgaattgaggtggaagctcagctcctcagaggcacattacagagccatgggaatgagcagctctcagacagggcagacacgagggcagaggaggtgcacccagcagtgagatgcctggagcacaggacgtccaaaaccacaggaatgaggcaccaggctcccggccctgggctgacacccaggcttaagtaccatgtgtcatgggggattcagagggttcaacaggtggggggcacgctgtcgtggcaccctggtgacaacaggagaccaaggaggggcaggtcacctggccctgggcatgagggagggggctgcacaggcactcaggtccccaagctgtgtctcccaggcactctcaggcgtggggtgtaaagatgctgatgccagggttccccatgaacacagacccccctaaacaaggtaaatggggtccacacaaaagttgtgggggatcaggcccctgccatgaggtccccaaggcccttgggagatgaggtcaatgcggggaggaccgggagaacccccgtcctctgacatggtggctgcagtaccagccatttgaggagtgggttacatgcccccagacttccaggtgacgggggtggccacccagacacttcaagacatggggttttcatcaccaaaatccagatgcagattctcagaggataggaactgagcccatggaatcagcaccagccatgttcagagggtgcagacccccatgcccaagacggagcagagcctcccagaggctcggtgatggggtgcagcctccacggaggctcgatgatggggtgcagcctctctggaggctcaggtcatggggtacagcctccccggaggctcaggtcatgggatgcagcctcccagaggctcggtgatggggtgcagcctccccagaggctcaggtcatggggtgcagcctcctcccagaggctcggtgatggggtgcagcctccccagaggctcaggtcatggggtgcagcctccccagatgcctggttgatggggtacagcctcccgggatgaagaggcacagacagtatgcatgaaaggtgagtgtggcacacacaagctaagacacagagaatgggcatagggcatcccaaagcacagagaactgtggcaagctgagttcccccatccccggccatcccgggccccagctgatgagggtgccccagccctgcagggctcagcagctggggtcagagtgggtggggcaaacacgcgctcacccagcacacttttctttgtgtgccagtgactcctggctccccagagccagcgcttgctttgcagtccaacctcaagcattccccaggcgacctcagaggaagcgtccccatccaggagccccaccagggtctccatgaggctgctggctgccaagccaccgtctcggggcctcgggactggcctcgggctccagctctgtttggttttctccttcctgccctggaacctcagacgccagtctggctgtgaaggcgcccatatactggggaaagtacaaagcccctacacagctggctgcagagaaccgcgcgcagggcacgtagctcagctgtaccctggggccagcgtcgagccaccccctgcatgtgtccccttgcttgcctaaaagccccactagggcagcctctggcccttctcatcccagattgagtcagactaggagacagacccataccctgtgcaaacaccagaaggacgtacaagtccccacacgcccagggccgcgtgtgaccggacgggcccagacgtgcacatgcatgcccacacgtcctcctgctgtggcccgaaagcatcctcggagcctgggctatgtcctccacacttgctgcctgaccagccccgtggggccggccccgctgggacaggttttcccgttaagcattaaccaccagcagataagggctctgagggaacgccctgacctgggatggctgctcctcggtaggcccaagtcatggatctgactagagtgaccagaccagactaactggcagagcagagggagaggagcttaggctataggctctgctcgggggtccaactgaagcaagaggcactgaggttagaccagagtgaggacttccagccactcacccgggggccagctgataagaggatcactcattaggaaaccaagaactcaagggattgggtcagcccagcaggagacaaaggcacagaggggaatggcccgaaggtgcctggggctggaagcagaggcagtggcggagccaagccggcccacctggctctctgtgagccccctgccccacactgcccagggcagcccccgcccggcccctaccctcctcacacttggttccccccagcccacagcacctgaggatgccctcttccaagccaggcagccctgcacctcaggacccctccccgtcgtgcagaacctgctcaaaccaggttcagccaggccacctcctgctgcccctcaccaaggccagcctgacgggcccatcgccccctcctgcaaagctaggtagggctcagggtgcccccagccccaagggacccttggaaataggctggagcccagatgctcagcctctgcgtcttggggagaccttcctcccaaagggagttgcccagctatcacgggccagcagttccggccacaaggtggggttcctgcagccctggcccccgcaccccctcctaccccaggagagagttccccgtcaccagaggcagtgctgtccgagagctggacccgccttcgggtgtctgagaggaaggcctggtggctggccggccacaggaagtggtgggcgtcaggtgagagcatttacacctggggggctgccagccccagcactcggggaaacgttgcttttccagaggaagggctcacggaaaggtgttcccacggaagcagaaaccattccgtatagactcaccctggagggaagcattagcaagcctgaaatggtgcccgccttgggctaacatgaagtctaaaggaggg

SEQ ID NO: 5428 - DNA, 6000 bp, Homo sapiens
gggccctgtatttgggtattagccatggcagcctggcagatgttgctgagggtgtctgggcacctgggcctgggcttggcggcctgagcagtgcctcctcctcaaatgtcaaattgaggcctggactaagggtgtctgatttatggcctcacctgtctgtccgtccattcagcaatatctccctgggacctcaggggcaactgtgccttcaggggcttccgggtgggcaggcagaagcagaaataagtatacaaggcagggtggtgcccaggttgtatgatgaaggaggggacgggggattttcagggcaacgacttgtgccaagatccaaggatggaagggaagagacgtacaggcaaggggaccattccaggcaggggacacaggcagagacccatccaaagatgagtgcagggcagacagtgcttgaagctggagctctctatctctcatgcttctttggtttgcaaaatgtggcatgatccagtgggggctgaggggccagggctccagggctggctgccccaggaacacagcagtgtcaccagaggtccagggtgggaaccaccagagttttagaaactcacccagccatgtccagggtgcctggagcagggaagggaggctgctacacctcactgagatgccagtgtggctgcccccggtggaaaccaaatagccaggctccctgaagctgccagcaagtctaggggcagggaggacaggtgagagctgagaggcctccaagggtcagaagtaattgcatgggttttgcgacttctcctcttgcttcttggaaatccttcctgcttctttctggattccctactgaattctgaaggttctaaaagacctggaggctgggcactatggcttatgcctgtaattccagtgggaagatcacttgaggccaggagttcaagaccagcccaggcgacatagcaagatcttgtctctataaaaaaaaaaatttttttttaattagctgggtgtggtggtattcatctgcagtcccagctaccagggagactgaggcaggaggatcacttgaacccaggagttcaaggtggcagtgagctatgatcacaccactgcactgcagcctggatgacagagcaagaccttgtcttatgaaaaataaaataaagagaacatggatgtgggttggatggtgagagcttggggctgtcctttgttcctgggtgggggaaagggactgggaccaaaggaggctgcggttgagggagacgtgtgtacctaagagatgggcagtagctaagctccaggccctcgggcaggtgcctgtggggggacagaggcactggtggccatgccacccatcctgcctgagtttcccagttctggctggtgagcaggtgtgaggctgctctctcaggaccccgttcggaggcacatctcttcctgatcccacgatgcccttcacatgcacacacatgctcacatgcacacatacacatgtgcacacaccccaccacagcccttgccagcctgggaccgccagctgctggctcctccccctgcctccccggatggacatccgtcctttgcaagggctgttcttccttcttccttcttcctgagtcctgaggtcgggcaaggcatccctcaagggagtccacaggttgggcccaccaccccgcagttcccagttcctatgccattgcctggctacctccccaacctccaccatcgtcccttcctgcctccaggtcaaggaccggagagagtccctctggcctccaagggtcctatgaggggagggtgacccagtttgtccggagctgtcccaattttggcatgggaagtcctacatcccaaaactcctcagtcccgagcaaaccaggtctcccccaagcaatgagtgagcttcctagagcagggtcccagctccaccacccatctcctctggtcccttggcctgtggtatgagaaaggggacgtgggctactccagactacactctcactgtcccccaaaggcctcaagggctccagtcttcaggccccacactggacgcctcccccatgctgccatctgggcctttatctccttcagctgtggctgttggccagcgtgaacacaaatacgtgaaccacagcccaccatgttggagccccaggtccaggcccacagtggagcccagtgaggggagagtgctcacccatccaggaccacaggactctccccaaagcccatagcacgttgctgccctccctccatttggacactggtgtcagggactgggcccttggccctaagcccgtctgggttccctggttcactagaggccagtggagaagcccctgttggcagagcctcctccggggccctggccctaaaggccacaattccacacacctctcatgggatgtgtctgagcccaatgcccagcccggcaagaaccagccctggatgaggtccagcccctgcccctcctcctagaagtctctgcccaacctccaatcccagaagcgcattcagagtccagttctagaaggttcctcagcacctgacagcccacttcctcacgtgcacctgcacagccggggcctagcagatgagagacagcatgggcaccaccaggccccccgcagggctacctggcaagcctagcccctttgggctgaaggctgacccctgggtcccaaggataccaggtcagggggtgaaggacctttgaacccagcctcccagactcttaacctgacacctcccagatgaagccgaggccaggcacccagtgcccacagcaggctgaaggcccctcataaggctgtgattcccaagacaacacatacaaagcctggggtgctgggacagagccccagcagggtgtcagacacagatcccactgtgggatccaggcagcccccattgaccaaggtctgcaaccgcacctcacctggctgagaaggtgtaaggtgggcgggaaccgaggttcgggcgggcaggagtcacatccaaccctgcctccgctctagtcccgccccaggcaaaaccttgttggctttattgagacaggtccttggagaatcataggagtaagagtacaaagcctcaaggagaacacgttcacttcacccatggagtaatggcgaaggccagagccctccccgctccttccagatcacccttctgtcctctgcagcatcatggagtaatggtgaaggccagagccctccccgctccttccaggtcacccttcagtcctctgcagaatcatggagggatggtgaaggccagaccctccccgctccctccacatcacccttccgttctctgcagcatcactcttttaaatcttaaaattgtaaacaaaggttctctctcttcatcccacttcccctccagccacagtcccatttctcagcccccttttggtgcaaaacccttcagaagggtgtccagcccattcctcctgcttgaatcccgagggtcagcccccatgctcatgacgctcttgccaaagccaccagtgactccagctctcggccccagggaagctcccaggccttcactcgcttacctgcctctctctccagacccagctcctttatttttccctccctttccctggtcagaaccctgggcacctcctcctcatgctggggtccagccttggcccttggcccctctcctctctagccccatccactcctggtcatctcatccagggtgggagctctaaacaggacatgagtgtcaatgacaccctcacgtccagctcagaccacatgccgcaaactgcacactgcacactctgccctctctgctggcccacaggcccctcccgtggatggacctgcagggttgcctcccctcatgtcgcccccagccgcacctgaaggccccctcagttggccctctcagcccaggccccaaccagcaggaagcctgtcaggcctccttccagggaggttccaaacctgcccctcaaatccccccatgccccatccaagtccacaccacctctcatctggaccacagcagagacctcctgcactgcccctcccctcaacccctcatcagcacatcagccagaggctccttggagaacagaaggggctcagaaccctgcagcggcgtccactgcacacacaggaagaactcaagtgctcataggcagtgagtcatttccttaggcattgtggtgacccgggatcatgtgcctccccgaagcctgcacatgcactctaatgatgcaagctaccaccaggcggtcagctttgccagctgacgtcccaaacagctggcatggggcatgcacacagtaggtgcttaataaatgtgtgtcgggttaagataggcccaaagccatttcaaatgtccaggcagtggtgtaggcaggggtcagctctgaagctggcctcctctcattcgggagacccctcagaggtcccagcctccaggatgcagtgttcagagcaatacttctcagtgcacgtctggctgtgtccctgcccagcgctcccagggtcacccctctctctagactcactttctgccccgtcaccccactgtacacccttggtcccagccccttccagtggctcagcttcctgaacactccaagcctgggctcacctctaagccgttatctatgctattctctcagccaggatgcccttcccatacccaaacaatccgtgctcacctttaagactggctgaggcatcacctcctctgagaagccacctctcccaaacctgagcccagatgagccaaagcccttccttcctccagtcagcctggatcctctcatccggcagaactgtcgccttgcttctctgaagcggtgaatgccctggggctggggacgcacaggctcgctggcccacaaccaaagccgcttcctctggaggaggaagtccaggggtgccagggttccacttgctttcttcttcacccagcctaaagggcaattttcccacattccctcagaaccaggaagttcccccattcacactgagcctgttcatgacaaaaaaaaaggtctctccgatttcctctgctcaaccagttccctggctacctgaggccctgcttcacctggaggaagacagtggtaagtttccagcatctccaccacacctcagcgccagaggaccctcagcctccctcgcacacctctgggcagtttggtaactcatcccatctcctcctgccgcttcatcctctaagccctccccagggaacccaggaggcgtctggaacctgttggggacagtccctcacacctgccccattgagtaagggttcatgtggatgcccatcctcccccaggagtcccaaatctaagacactctgagactcctgtcacccacccccaccttacacagccggcctttctgtgcagtccttccaggaaactctggctggacctgggctctcggcttgactgcactctccccaagtccccagggcggccagtggtgactattcttgaaaacgagcttggcagaggatctggggacacgcactccagatgcaaacacgtttgcactctttgggctggaatcccctcgagcggtacactgcacccgtgggcttgctaagaaaccacctcacagagggcagattgattggacaaaaggcatttggtccccaaattgattgacgtgtgtgaatgggagttttcagaacaaagacccaaagatatgggggaaacaggctgggcgcggtggctcacgcctgtaatcccagcactttgggaggccgagggggggcggatcacgaggtcaggagatcgagaccatcctggctaacacggtgaaactccgtctctactaaaaatacaaaaaaattagcgggggctgtggcgggcgcctgtagtcccagctactcgggaggctgaggcaggagaatggcgtgaacccgggaggcggagcttgcagcgagccgagatcgcgccactgcacttcagcctgggtgacagagcaagactccgtctcaaaaaaaaaaaaaaaaaaaaaaaaagat

SEQ ID NO: 5429 - DNA, 6000 bp, Homo sapiens
actaaatacagttggtgccttccattgggttaagtggaccttctctccaggactattagtgattgtgagtcatcttggtttttcccagaacacatcagttttagttgcacaaaagtggaactaaataaaataacctatttaatgttgcatgatgttaaatatcataaaataaattgctgagtaaaagtatgtttaatgacagttaatttggtgtaaggtagttaggatttttctgaagtaaagggagctcatatctctcacattttttttttttttttttttttgagacggagtctcgctctgtcgcccaggctggagtgcagtggcgcaatctcggctcactgcaagctccgcctcccgggttcacgccattctcctgcctcagcctcccaagtagctgggactacaggcgcccgccactacacccggctaattttttgtatttttagtagagacggggtttcactgttttagccgggatggtctcgatctcctgacctcgtgatccgcccgcctcggcctcccaaagtgctgggattacaggcgtgagccaccgcgcccggctctcacatttctatcaagagttttagaaaacagatcaaaggtgacacctacaagagagcaatcatggtttttagtgttcattttctgagctctaccaaaggaagagagtaagtcgttttctcagctggggagttgtgtgaaagtcagtatacatagcactgataaaacctgtaaggctatttagttatttacataatgctgagtccattagactctccagtgaaaatgggtactttctaaatgactaaccaaagatcgtcgttttgattatctgtttaatcattgttgggaagggaggtgagagagtgatgggaattgttaagaagatgcatgctgagttgaatataggctgttaaaaagtatatattatttatttgtttatttagagacgcagtctcgctctatcgccaggctggagtgcagtggcgcattcttggctcggcacgctgcaacccctgcctcccgggttcaagggattctcctgcctcagcctccccagtagctgaaagtacaggcacacaccacactacacccagctaatttttgtattttaagtagagatggggtttcaccatgttggccaggatggtgtcaatctcttgacctcgtgatccacccgcctcggcctcccaaagtgctgggattacaagcatgagccactgtgcctggccgaaaagtacatattttaaattttctttttctctagaaacacttgaaattgaaagttggttatgttaacatatattgagccgggtatggtagctcatgcctgtaatctcagtgctttgggaggctgaggagggaggatcacttgagcccaggagtttgagaccagcctgagcaacatagacctcgcctctacaaaaaaattaaaaattagtcaaataaaaaagttagcttggcagggtggcatgcatctatagtcccagctactcaagaagccaaggtgggaggatttcttgagcccagagtttgagactacagttagctatgatggcgccactgcactccagcctgggcaacacagtgagaccctgtttcagaagaaacaaaaggtcaaaatggaatactatctgtctgaggtctagagtatgaataatgccactttattgtacagctttaaaagtcttttttcatggcactgattatttgttagtgcattctattaacattttactttacttttggaaaaaacaagatgaaaccaattgtgaaagtaaactattaaataataaccactgccggtaaaccaaaatgctcacttgaaagctaaaattttatctgcatttcccaatttactttcatgattgctaaaaagtttatttatggtttggctatagaaatttacctttaattgctgggcatggtggttcattcctataatcccagcactttgggaggctgaggtgggcagattgcttgagcctaggagtttgagaccagcctgggcaacatggcgaaaccctgtctctactaaaaatacaaatattatccgagtgtggtggcacacacctgtagtcacagctacttgggaggctgaggtgggaggatcacttgagcctgggaggcagaggttgcagtgagctaagatcacatcactgtactccagcctgggtgacagagtgagacactccccccccccccccccccgcaaaaaaaaaaaaaaaaaaaaaaagcctttaatagcgaaataaaaggtatttagacgcgtctctctaaaaatttaattttgtttgacaaaaatgttttggtcacctttgcagttcattctgaatctagacttgctcagcctaatcaagttcctgtacaaccagaagcgacacaggtaagagtgataaaactattttcttcagggccaggttaggtggctcgtacctataatcctagtactttaggaggctgagatgggaggatcacttgaggtcaggagttcaagaccagtctgggcagtgtagcgagacaccatctctattttaaaaaaataattaaaaaatattttttcacttttgttttaattggttccttggtttctttcttagcttatgaaagaaaataagaatttcatcagtgtccaagtcttctgttggaattcagcaaatttattgttgtggatagctgtcagcctttatttttatgtttaggttcatttttcctcttgatgactttttaagtttttcttaagtcttgcattttaaataatgtattataatataataagccttttttatttagaactgagaatttcagaagacatagtttagacataattctaaaatttagtgcagatttctccatcttagaagtacttgtggagggcttttataacgagacttgggtttatttaacgtcgagcttcaaaaatatatatatttttgcaatttttaggttttatattatacaaatttaaagagagatggtaatattaatttctcccttctttagcagttgtatctatttcttagccttatgcgtcttagaggtaacttgtttttttaacagtcaattttgtaagcaggaagaagcttttatttctttacttatgtctaggttcctttggtatcatccacaagtgaggggtacacagcatctcaacccttgtaccagccttctcatgctacagagcaacgaccacagaaggaaccaattgatcagattcaggcaagttctgttaccgggtcacatacatttgatgaggcacttactcatgaattgaacagatgtacattaccattaatataatgattcttctttttggacctactttgctttcatgaaatatttgagtttgttaatacatataagtttgagattaatttaccactttagtacatctgttcactttttgtttggctaagtttagtttaccgctaaagtgcatctattcactttgtgtttaggcaacaatctctttaaatacagaccagactacagcatcatcatcccttcctgctgcgtctcagcctcaagtatttcaggctgggacaagcaaacctttacatagcagtggaatcaatgtaaatgcagctccattccaatccatgcaaacggtaagcaaattaactaacattaattgcctagtatgtaatatgaatcatggtagattttcttttcttttttaaaggtcttcatttaactgtgcttgagtctgcatctttcattaactgtagggtatatttaattgaacataaactgattattccagagattaactgatactaacggatattctagagataaattttagccttatgagtgatgtgcctgtatcatcttaatttgtagttttacccttttgatttgattaacaaaagcttaaacattcagagaaatagactaatataacatccatataatcattacctagatttaatagttgccctgtttgcttaatcttttattttactgaagtattttgaagtttcagatgttatgctttaccttgattcttgagcaagcacctttagagaatttctagaaaataataataatactataatctgtggggtgcagctaaatcggtgctgagaggaaagttcataagattaaatattaaaataacttttgattaatatgttaataaaaatgaaaaaacattcaaccctgttaaagttcatagaacaaacttctgtaagtggtactgcatccaggagtttgtcttatttatttattttttgagacaaagtcttgctccgtcgcccaggctggagtgtagtggcgtgatctcagctcactgcaatatccgcctcctgggttcaagcgattctcatgcctcagcctttggagtagctgacactccaggcataagccaccatgcccagctaatttttgtatttttagtagagacggggtttcaccatgttggccaggctggtcttgaacttttggcttcagatgatctgcctgcctcagcctcccaaagtgctgggattacaggtgtgagccactgtgccaggccagagtttgtcttttaaaaagatttctcatatatgtaaaagcatttccaaggctgctgattgcatgtctttttattttttttaattccctacttccatttcacagcatattatactcccctttaagtactatatggtatatatgtctttttccacattgaatcacttggagggatttttgtatgtgtgtgtgatgtttttgtgtttgagacctctgtgatgtctttatttatgtctgaggtaaaaccaccattgagtttggccatgttataaaccagagaataaaaggatgaactaatcatttactttatttactaacaggtgttcaatatgaatgccccagttcctcctgttaatgaaccagaaactttaaaacagcaaaatcagtaccaggccagttataaccagagcttttctagtcagcctcaccaagtagaacaaacagagcttcagcaagaacagcttcaaacaggtacgaaatccagtgtcacctcattggctccttgctttccagcacagttattgacagtgttaggacagtttagacttcagagtggtggtgtccaagagtttctgttttagtagcagaccatatgaatttttcatttcagatcatgagttaaattgagtctgtacttgtatatgtgaattatgtgcaatttttggaggctttatagccattttccttttgtcactgaacttacataatatccctgttgcattgtataatttatatggaattaaatttgttacttgaattaccataaagtgtacttttttttttttttttgagatggggtctcactctgtcacccaggctggagcgcagtgccgtgatctcggcttactgcaacctctgcctcctggacacaagcaatcctccctacctcagcctcccaagtagcttgggaatacacgcatgtgccaccacgtccagctaattttttgtatttttggtaaagttggggtttcaccatgttgcccaggcttgtcttgaacttctgagctcacgtgatctgcccacctcagcctcccaaagtgctggaattaaaggcgtgagccattgcacctggtgataaactatacttttaattgttaattgattgaaggcttttagcatgatatctggcattgagtcagttagacaaagttaagaaaaaactcatggtggctgcatttcgtggactgggttgaaacataatctattttgtcaagtaaggtcataatttggctagttaccatacctgtcacgatagtaatgtaggtagggacgcttttatgtatttgagacaggttctcactttgttgcccgggctggagtgcagtgatgccagcataactcactgcagcctcaaactcctgggctcaatgatcctcctccctcagcctcctgagtagttggtagttgggactacaggtgcttaccgccatggctggctaattttttttttttttttgtagagatagggtctccaggagctca

SEQ ID NO: 5430 - DNA, 6000 bp, Homo sapiens
gagggaggcaggtagcagaaggcagagattgagagaagtgccatgaacagccatcaagtaagatgaacaagataagtttatatggtggtaaacatgaagaagaaatgagagcaagatgctatgtgatggtgacaggtgtgggggagtgatgaagcagtttagattggatggtaaggaatggcctcgccaaggaggtgatacttctctttaaagaaatctgagaaatcttttaggacaggctttgcaagaatggtgtttcctaaaactttctgtttttttccaattgaatgtataaaactgccagttagttccactaactgcccaaagaaatgggcaggttaaggttatcctttttatctgtgggaaaagatgctcccaggtactaggaagcaaacaaaacctgttttgttcaacttgtgtttctatccacttttataagtacacaaaaattatagcaggacacttaaaatacttgtgataacagcctttcttgtgatagcagtctgtctgtctgcctgcctgtcttcctccctccctctctccatccatctatccatccatctccatccatccatctccttcttcctctttgccaggagcaattctgggagaaactaacctaacaaataaatttccattttaatttaagtatgcacacacacacagaataaaagctgtaatgcacaaatggacttaacctttctataaaggcaaaaccagtttaaagctctctgaggttttagagctcaatacaaggtatagtcacagaataaagcactttggcatgaatagaaggttgcttcagctacactgcagtctgcttttaagacacaaggaatggaatgcagggtggaagtttcagggcctgttatcagaccgcttgagacagtgctgctcagagggctaccagtaacatctgtggatgatcagtcaggcccaagattcaggcagaaatctttattcctaaagcaagggatgaaagagtagaggataaaacgagaacaagagaaaaaaaaaaccagaaatgcccatgatgagatatgccaaaacagtaaccttgaaaaatattctgggcacctaggccaaaggtggtcaacctcagaagcaacatgctgagaagcagtctatacagagtaagcacctaaaagatcagctaaattaataaatacattattacattaatgaaagactagagattcatttggtttttaatatttcaactgagtaaattctttgttgtgattatgttattttaaccttcagattgtcatgctgttcatgttgataaacatttgattgtgtgtctgccatgttttctcatcatttctgtggacttcccagattataaatgattttctcatgatagttcatactttacttttaaatttttttacaatgttcctgcattacttttgtaatcacaaattttaaaaatcctccctaatgtgtttgcattagagaaggagccgtgtctatcttatttaaaattgtacccccaggcttccacagtgcctgatatagaatgtatatttattaatgaatgaattcactgtggtgggaaaatttccggaaacttcataagttccagaaatttatgaaatcaggtaaaaacggaaaatccatcaggaaaggcagagaaattcctagccaacttaggagtttcggaaaaagaaagttatttggaataagttatagtaaaactccattctaactgactaataaaaatgagggtagattttcctcatgtttttaaagggttctcatcctttttttcctacctcatagctccacctgaagaagattgtacatcagtcacagacctgcccaatgcctttgatggaccaattaccataagtatgtctctcttctaatcttaattaaattttcctattttggggaaagggctcaggtgtgttctctgtggtatatttgaatagaatattaggccaggtgtggtggctcactcctgtaatcccagcactttgggaggctgaggtgggtggatcacttgaggtcagaagtttgagaccagcctgaacaatatggcgaaaccttatctctactaaaaatacaaaaaattagctgggcatagtggcaggtgcctgtaatcccagctgctcaggaggctgaggcaggagaattgcttgaacccaggaggcagaggttgtaatgagctgagatcgtgccactgcactccagcctgggcaacagagtgagactccatttccaaaaaaaaagaaaaaaaaatattagtcatttccctaagactaagtaaggacagttggctttaattcagtgtcccttcctttttttctgcaatgacttgaaactgctctctggtttacactcatgcatcgttcctcaaacttcagtcatttgaaaaccactttcacattttttttggcatctctatatgtacaatgctctcatttacttgatatttttatttaaatgatccactgttttctaattaaaatacacttatttttaaaaagaaattgcacatggaaaaccaacatcacatcgtaaatagaaggcaaccttaataataaacttaaatgtaagaaaaattaaataatgttcttaatttgcagctgctgaaagctctgggtctgagtcatgttctctcttataaagagggattaataagtgtcaggtgtaggggcattttggccctaattagcaattttctgtttgatataactgaagtattgaaagataatcatgaaggatataaacttcctgatacgtgttttgacattgtttataccacatccatcttaaatcatcctgatatatgattatccacagatgtatatattcgggcactttttaaaaatagacatgggggtctcactatgttgtccaggctggtcttgaactcctgggctcaagcaatcctccttcctcagcctcccaaagtgccaggattacaggcatgagccaccatgcctggcctattccagcactttagaaatcagaaaatctcaaccagaactttcaaataggctaactgctaaccctgatcttacggcctctgagcttcatttaatgggaaacagtacagtgttgagaggtctgatttctgcttcctcacagctggatactgacagtgtgcacaggcatgatgttggcagtggcagagggatgagaatcttcgtagaccatacaaacccagccccacattgttatgtaaggaattgtccctgacctgtgccttgcaataggaaggggaggcttcacaccatgatggctacgacatgagatgtgctgtctcagcaggcctggtatgaaatcctagttccctcaccatgtgtgagattttagaggagtgactgatcctcagttttctcattcatataatggaacaacctatgagaatattcaggaaatttgtaaaagacactatgtctaatgtatgtccagcccatagtagaggtttaataaatgccctgtttctttgatgcccacagttctcttttgaagtccagacatgtaagagtgtggtcaacaatatttccttgtcaaatcctcacctgcagagattaccagggtgactgagaccttgattttttttttcatttatgtattattaatagttccacttgaggcttgccacagtggctcactcctgtaatctcagcactttgggaggctgaggcaggcagatcacctgaggtcaggagttcaagaccagcctggccaacacggtaaaaccccgtgtcaactaaaaatacaaaaattagctgggtgtggtggcatgcacctgtagtcccagctgcttgggaggctgaggcaggagagttgcttgaacccaggaggcggaggctgctgcacactgagattgcaccactgcaccccagcctgggcaacagagtgagactccatctcgaaaaaaaaaaaaagtttcatttgagcaagctaaatatgtggccaaaaagaacctttagtcccatcaatgcaatacagcagaaaataatttcatctaaatgcacacctgcatagtgagtggcccagacttgagagcagcaaatacttctagggaggaataatgaatgaatgcattcaggctttttcttctccaattcattctagtcatttgttgaaaccacagatgttgatcttcatgtatatctgtgcttgttaatttccaggttgaatttcacagagaacggcaaatgctcttctgtatttagacctgctggtttcctagccagaagtgggtgtttgcacaagtggacaaaacttgccccttaaaaaagaaaatcaaaatcttcatcattttgcagatgtatcttccctgctgaggctattagtctgctacttcaaatccttttcggaggaatatatggaattaatagcaacacattttatatgtacttcagaagggagagtagggaaacaagtgggagaatgattatttattgagcatccactgtattttgaatactgtgctgagcactttacttacaatgtatcacataatccccattttacaaatgaggaaactgaagctcagagttgccttgtccagagctctatgaagctaggattcaaacacagggatgggactctccagtacttccttgtttcctgcctcatccccagggtgtgtgggggatgggagggtgcactttcttagtgcatctgccactctctcccaccactggatagataggtgtttctcattacaaaggaaaatagctttgaagtcactatgttaaacgctaatccacatactcaaaatatgagctgtgaagttctgtaagtaccttttctctctcccagctattgttaaccgtgatggcacccgctatgtccagaaaggagaatacagaacgaatcctgaagacatctaccccagcaaccctactgatgatgacgtgagcagcggctcctccagtgaaaggagcagcacttcaggaggttacatcttttacaccttttctactgtacaccccatcccagacgaagacagtccctggatcaccgacagcacagacagaatccctgctaccagtaaggagaataaatcactgtgcttcccaatagcaattccctggcaaaatgtctctgaccttcctgagcattgcacactcacgtgctgattttctcgtctctagacagctggaagctggtgatgccattcagggaggtgggctcttgtggttgtcagtaaactgcctgcattgactactactgcctaccttttttcctcatctataactgtttttcttaccttagcataagaagtgccatattggaagttttattttggggagagccctccttattctcttatccccaggtatacagtaacaattcaagcctgatatgaaaactgttttcattttttcatgtttccttcttgttcttatccacctatggataagattgttttcataaagttgggatcatagagtttgcataccactccactagcaccttttaaaaaacccacttatgcctgaggttgcaattttttgaatttttgcaatcagaccttggtgatgacaatgagcagtaggatataaataactcccacatgcttagctttccaataatggaacagtaggcatacgtgggtcaactgtggctttttatgttttaacttgatttacattcatactattgatagtgtaatattcagtgattttcaccaacgataatttactcaacaattcctttgtttttagtccaaggaagcatatctggaagagttttctggtgaaattaaatcagcttaagagctctataatccagcctgttggggaatgttctcaatacttacttggtgtgtgggggtaattcattacttagggttgcaagagtggaagtatgtaaacattgcgttccattcctttggagtttgcccctcgcgcttcagctccactggaaagtgtttacatctctcttgtctcctgtttccctctttgcttttcttctatggtttgttttgaaatgggctcccagatgggccatgttcctcctgtggaggat

SEQ ID NO: 5431 - DNA, 6000 bp, Homo sapiens
gtgttggggctgcaggaggtgggattatgtccctgtggctggcaggcacgtggaacactgaggggatgatgggagggccgaggcatcccctgccagggctgatcccaaaactatacaactcacctctctttccttgctcgcagagcaggttagtttttctgctgttatagttctgcattttagggttctaatgcttcaaaatcgcttcacatgggaggggggagggatagcattaggagatatacctaatgtaaatgacgagttaatgggtgcagcacaccaacatggcacatggatacatatgtaacaaacctgcacgttgtgcacatgtaccctagaacttaaagtataatttttaaaaaactcgcttaacaaaggatttggggctccaacatgggtctgctggcagatccaggatggaccctgggcctcactgaatggagggccagccctgaacggacccccagccacactgatgtcctggcctggcctggcctggggtaggaacccctgggttgcccttagggctccatcccagtcatacagcccttaactgggctcccagtgccacagcagagacaaggcctgaaggttcaattaagaccttttctccttgtcatctctgggcttgaggtctttcaaagcctggccacagcctgatcactagaaattaccttgggtatcgtcctataatgctgatacctgggctccacaccagacccactgatccagtgttgtggggcgaggtcttggcatctgcattgccaaccacttccccgattattcccatgcacactcagtcctgagagtatcatggacccagatcgtcgtgccggtggggtctgtttctatctgggtatgtcctgtttgctccatggggctccagggagggcttctgggggacttccctgcccagctcctggtcagcctccaggcaggtactaggacaccacctggccactagtcccagatcaggccctgctgtccacctgcctgggtgcagcctcagtcctacttttggccaaaggggctgggcttctgcacgatggacaagagaagtgagcatgtcagcacccaagaatccccggtctcaacagagcccagaaatagcaaccgtcacccaaaaagggctgggcatgatctctccacccccatctggggatttgttcccttgcaggttctcagcctgggcccaaagaatatgcaggctcctataaaggaaggaaagttctcccactttgaaaatacgtgtcattcaaagcaagtaccatgcatcagtctctgtggtcagcatgggggaggggagagttatgaacatgaaaatgacagaggtgtgaggtgcttggggtcagagggggcagcagccatggactggcagctcctggcttggcactagcttgctttttcctatctctatctatctatctcgatctcgatctcgatctctgtctctgtctcagtttatgtatctctaggattgcttaagaaagcagtaagatcatgggaattaagtccagggcctgtggactgggctggttcagaaagctgcccgaaggaggtggcatgcgagcagggatttgaaggctgggctgtgtttccttggggaagtggccgaaaaccaaaacaccttctgcagccaggcaggtcacgaggaacagtagagcgagtgggtgtgaaacaatagggaattgtgcgggggagaggggtggagtgctgtggatccccagggaccacctgttggcacccgaaggcagcagctgctgatgtgaaaaggaatagctccccttgctggttcttctgatttctccagagcagcaggaagtccaaatatttatgggaaatttcccaatattccaatcactgtagttgcaacattagacatggcctgcacgctgtcagttctctgtcccaccttaggggccgggtggcaaagagggtctttggtgcaatgctgccaagtcgctgtttctgggtctcctgccctgcaccccctccccactgtcctgtctcagcagccgtgtgatagggtgagagctctggggacacctgccatgaaccctagtccacatgctggactctgactccaggactctcaaccctggccatagcttgacctctcatccctccctcccagggctgttacacggtgatcctcaacaccttcgagacctacgtctacttggccggagcccttgccatcggggtactggccatcgaggtaagtaaaggcccccacttctgccgctccccaggatgaagcctcacgtggagcctaggcagatccccccagcctcctttcctcttcatttccttcacctgggacccaaggggcccccactgtgggtgctatggggtggtaagcccggctgtgtctgtgctgcctgagagtcattcttgaactctggagatgaaacatgggagccagtgtcccagaaatggggatgggcaggccctgagtgtcatccccactccctctcactcttccatcctcatccccacctccgccccagctccatggtccagagagatttcacgcttgcagaggcatcagcacggctgccttgaaggacaggctgcagcccgtggtttgagatcaggccttttctctgtggggtgttcagggcctacagggccttattcatccacaacggtggccttagcctcctttatctgagggccccagagtccccttgaaaggtaagctcctgcagaccgtttgcaatcaccactaggtggcgcctcagccaaagggaggagcggccgcctcccgtttctgtcctctgggatctccatcatctgggatctccgacttgctgctcctgggggctggacagagcgttgcccacatctgaccaaacccaggaaggggcactctggggcctcagtcagtcctcggcctgcgggggaaggaagtcaggcagcccaatcctcagcttccccctccagcagcctgggcacctggcaccatgaacttcgccttgcctggtttcccactgtgcctgcagcgccacggagtgcagtttcgtggaggctactgcagatggcggagagggaggggtcattgattattcattcatgtattcaacaagcacacactgagccctattcttcgccagcactgttatagttgaacaagtcccctcatggagggcaacaatgaacaagataaatccgcagcaagcccagggaaatctcagggacgtgtcccatgaaggaatagcatgggccctagagtccggctcccagctctgcctctctccaaatgcaggatgtctaagtcacagtttcttcatctgcaaaatgggctgatcaccctgctcccagggcacagagggattacagatgacggggacagcatgctactggggctcaggaagcagcattcatatacttgatctgctgcctcactcccagcccagcccatgagcctggctggccagccccatgggaggcagaatcctgctcaagacggagacctttacatggccccgtcccggtagcccctccccaccccagtgagcctcctggtgatttggccatgacctgtggtctagggactgttccctcagctacttgcaatgagctctggccgtgagaacatcagcaaatctggtcagagtccctgagctagggtctccctgccccaccaccccaggccctcagacaggtgttcagggatggagctcataactccgggaagggctgcagctgcctgcctattcatagcagtcctggtaaccttttactgagcaacttctagataagaggcacattacatcattaggtaattgcattacacttaaatctcaccaccttcctgtgagctggaggcgagcctgcaggggttgtaagcatgggctctggggtcacaatgcctgggactgaaacccaagctcccctgctggtggctctgtgacctcaggtaggttacatacctcccaataaagcacttaaaactgttccttggctgggcgctgtggctcacgcctgtaaatcctagcactttgggaggccgaggcaggcagatcacgaggtcaagagatggagaccatcctggccaacatggtgaaaccctgtctctactaaaaatataaaaatcagctgggcgtggtgacgcatgcctgtagtcccagctactcaggaggctgaggcaggagaattgcttgaacctgggaggcagaggttgcagtgagctgagatcgtgccactgcactccagcctgggcaacagagtgagactctgtctcaaaaaagaaaaaaaaaactgtgcctggcacatggcaagctctggatacatactcaggcccagtgtagggaagtgctttgcctaaggacaaccctgctatgtcagggagctggatttgaacccaacactcgtttctaaagtcttcctggtccatgactccaccacataaaggaagccaggtaggggctggtgagaagggctggccccaggggaatgtcaggaatccttaggggaggagtgtgctaagagtgacaggcattcactccccttcccctggagtgggccaggcagcccacaaagggcccagcctgataagccagttcctgctctttttctttttttgcagcttttcgccatgatctttgccatgtgcctcttccggggcatccagtagagggtatggcctgaagcctgaagactcgccccacccaccactgcccagcacccagtgtcctcccgtgcccctccccgctgtcctcttggccccaggggagaagatgaggccatcagagatggccaggagaagggccaggggaatagagctatttttttaacaaaacaaaatgaagacaaaaatatggactgatgtatcctcgcctggactcagggcaggtgccgtgggttctccagagaccccagcaactggcccaggatgcaggctgctctagagaccaaaggaacaccaggcccagcgccctctttggtccagccagaccctgggccctctctcctcactgcaccaggacctgatgccaagaaagtgaggatttaggcaacaaggaggcaaaagcaaatctcagagaagtcatcaaagcccaggggctgcacggagattcagctgccatgtctttgaggactcggaacccacagcgcaatccctggtccactggaggatggactgttccccccttcaggccggggccaagagtgagctgctaacacggcatccaagaatggcccagctggtaggatccttgctttccccatctgttggaccaaataatctcaaaggcccagagaggacagtgaccatccacagacacacagcacaggcgtgacagttctgaaaagaagctgagttgtctccaggctgctgtcactgcatccaggactctgtcagctctgctgcccacatgcacccctggcctcagcatcccggttcccccagacaagagagggcaagtcagccaggaactgcctcctccctgctctacagctaagaaaacaccattccatgacttcccaccgcgccctcgctcctacctccccacacctctctctgagtccccaggaacacacagaggtgcacatcacattcccttgtccacactgcccgcctctcccacatgccacccccttccctgtccttccccaactccccagctccaagagtggaagaaatccccaagatcatctgggtctccctctccacacccagaactgaggcttggatatcttcttcaacatccttgccaagacttctccaccctcttgcatacctccagggacagagagcttactacctcccaaggcagcctcctgcctttggactgctctgactttagcatcagcttaatacacagaagaggtttctgtttttctgtggctctgtccatggcatcccacttgcccactctccttcctggagtgttgaggtcacacattgactcccctgagccctcttctctccaggctaaagaatcccgaaggcatcgaggccatttctgctgcaacaaggtttcctgtctcttcact

SEQ ID NO: 5432 - DNA, 6000 bp, Homo sapiens
ttccaggcattcctacccatggtctgacttccattcattccacaacgaggcactaggcacctactgtggcaggcattgtgctaggtcctggataaggacaggatggacagacggatggatggatggttggatggatgaacagttggatggatggatggatggatggatggatggatggatggatggatgggaaactgtgagagataaagcaaaagagagagagaggaacagagaaattagactaagcaatttcatgccttctcaattttgcctagaaaatatgtgtgtgaggaggaaatgccattccagtaggcatgtgggtaaaggccttgttgctgtagcaaagagacccctttagaactgtgtaggtatgcaggaacataagttgatttcccacagtccacagtggcaggtatctctgctccacagaatcagggacctcggctttttccatcacattcctccacagcctctaagacgttgtccttgtcctcatggtcaagactggcttatagatgcatttggtttccaggttatgggaagaggaagaaaaagcatggaggaacacactcctaaagttttaaagacctagaaagtagcatatctcacgtgttgctatagactggaggtatccctccaaaatttatatactccaatggacccctaagccccaatatgatggtatttggggatgggtctttggaaggtaattaggtcatgagagtggagccctcatggtgggattagtgctcttataagaaaagacatgagatcctccccccactccacccccatctatgtgccaggtgaagacagaaggagaaagcagccttctacaagctggaagcagccccttgccagacaccagatccacctgggccttgatcttggacctcccagcctccagactgtgagaaataaatgcttactgtttaagctgctcaatctatggtatttttgttatagcaggctgaactcaccaagacacttcccttcaccatccactaagtcacatggttcatctacttagaaggaaggctgggaaatgtagtctttggctgggcaaccataagactagctacaatccaattattttggatgaatgggggagtgaattttggtagacaactaggagtgtctatcacatagggtaggctcatgagtccttgttgaactcagagtgagacagtcaacatctgtgtgttcccagaagttctcaagccgcacaggtacagatccactgacccctgaacctgggaagttagttctgttcactgtgactggcagaaataatttcctgctgacattattagtggctcccagccaaggcaagaaaatgagactacacccataaaggaactattacagcccttcagctgccacgttgatgatcttatgctctacctcacaccaaattcacaccctggataatcactgttggcaagacctaaaatttcaccctttgtggatggtttaaacaattaacattccttaaagaaaattcaaaagcaaaccatttatgcaaggtacacaattcccaggggccttagaccccctaagaaacatccccacccctcctttccctcataagggataaaatgattagaatccaggaaacttgctgtactggcctgttaacaaccttaatccaagggagtgacactaatgacagaatttcaggtatgatgtgagagattggagacaggggtatactttggcctccatagagagcccacactgtcccccacacacgcagcactgactgcccctgggcctctctcagcgaagtgcatctggcctatatacaagatatatctcttccctccagttcaaggtggcagcagtcatcagacaagttcctgctaatgtgctaaggagaaggcccttccagatcaccagggcctctcagggacaagtttgccctgtctgtcactaaattgtttgtcatggtgaactctcgggcataagagaggagagactggaacagatacgaattgctcttaatgaaccaaaacccacagcttcaaaggaaaatcccagaggtagactctccaggtggggttgaggagaccagctcagtccctcttgagtctttctttccccaaagggatattttagttccaaaagtgacaaggtaaccagatggtatcctccaggtggagaacagcccacaactaggaagcagagtctcattccttgaggaggaagaggggagtgctagtacccggggctagtggaagagggtagggtgtgggcccggctcgttgtggggcagctgtttacttcactgcagcctgcagccctcccatttccctacagcccacccagggctgcgctcagctccagtgaaggtttgtgcagttaggatctgagagtttaagcgtactatataggttttacctttttattctggaaatttgcaaatgtacacaaaagtaaggaaactcttataatgggtccttgtgtatctacgcctagctacaactatcaatggcttatcttatttaatctatcaaccttttaaaaaaaatctttttgaggtcaggcacggtggctcacgcttgtaatcccagcactttgggaggccgaggccggcggatcacctgaggtcaggagttagagaacagcctggccaacacggcgaaacccggtctctactaaaaatacaaaaaataaccgggcgtggtggtggacgcctgtaattccagctattcgggaggctgaggcaggagaatcgcttgaacccgggagacggaggttgcagtgagctgaaatagcaccactgcactccagcctgggcgacggagcgagactccgtcccaaaaagaataaataaataaaaataaaaaatatttttggtaagtattcttagtattttaaaacaaatcccagccatgacatcatcttacccgttaattaaatggcactaattaaatggtgcttgaaatattacaaacatctatgttcgaccataccacctagagttctgggcaagaaggttgggacccacaggtcaagcctagccccttagttttaccatgaagataactcaggccgtcggagaaagtggcctgcccaacgcaggtgctagagcgcgaaccaagagaagtcgatcctcctggtctccccggctgcctggtgagtggcagaccacaggctagacttcccaggccccggccctggaaggggcggggaaccctccccctcactgccagctggaagaatccgagcggtccccgcacgcacttctggaagtgcaagccggtagcgcggcgggccagggatacagccaagtcccgggacgtgccagctgcggtaactgaagccgggtcccgggcgggcgggggtaccagggacaggagtagccttggaaagaggagagggcctcctcccacgaccgtccggatcaccgcctctccgccggcacccccggggcccatgccgcgaacaggccggcgaggctggcaaggtgcccgggcccggggcggaaagcaggaagtcgatcccgcgggcgcggcccagggtgcggcgctgcagatgcagcacggggtcgcggggcgggcgcccagtgcaccggaggaggtgagcgccaggtcgccttcgcggcccggggacacaggcagggacgcgggagctgatgcggctggaccggccggggaaacagtattttctggaaggggtaagagatgctgtcttgagcctttggaatctcggatccgggccgcccagaggacctcgacaggagcacagggaggacaaactgaagtccgagagaggcggcgtggcctccggcctcggggagcgctgccgggggtctcgggcttgggagagggcctgggggcggtgaaaatggggggaaaggaggggaccacaacattgttatggaagagtgagctcggattggcagagggacgcggggctgcaacgcgagtctccggaggtggaggggtccaggctgatgtagcgccgcccgggtcctgggtcggggttccgggaagtggacctgcgagccaagcctagccaagtcgggggacggaggctccggggcggacggagctgagggtgggcaggcgaggttgatggagcccttccaggaagcagggcgaggctcaagcacccagaaaaacctgtggctgccgaggtcccccgccagcagcgggcagcggagcgcaggggcggggctggggactggcgaactccgcctctctggggctgtcgctttaagggcaaggcggggcgtgcgggccctttaaggccacgtgggggcgtgtcaggaagtgagtccagggcccgcctcccggggagtcggcctcggatgtccggaggctcctgggctgagccggcgacagagcccgggaaggcagcgagacgtgggcgccggcccagccccctcccgcgtccttcagccccaagccccgagcccctctgacccttccgcagccctccctccagccgcgcccggcctccggcagctccctgtacgcctccctccccctgcccgcccctccctcccacagccgcccatgacgccctctcggcacctcttcccactctgccacgcgtccttttcctgcaccttcgccccgcgtacctactcctgccccgccctgccattcctctcccctcccttctctctgcgacccctccctgttaggccccagcctcttctcccctcacaggtcttctctgtcctggcctcaccgccttatcctattcctctcccttgccctgtgtcttgtctcagagccccctcggggtgggagtaggttgtggagcagcacaactgggctcaccccaaagcagaacttctcaatccatgaggacaatggggaggcctttaggccagcccacatgtgacaatggagggctgcggcttccttgcggagagcacaagtgagctcactgccctggactccagggaatcagagttctggccgcggggtgacccagctcctctgctaccatgaatagggcccctctgaagcggtccaggatcctgcacatggcgctgaccggggcctcagacccctctgcagaggcagaggccaacggggagaagccctttctgctgcgggcattgcagatcgcgctggtggtctccctctactgggtcacctccatctccatggtgttccttaataagtacctgctggacagcccctccctgcggctggacacccccatcttcgtcaccttctaccagtgcctggtgaccacgctgctgtgcaaaggcctcagcgctctggccgcctgctgccctggtgccgtggacttccccagcttgcgcctggacctcagggtggcccgcagcgtcctgcccctgtcggtggtcttcatcggcatgatcaccttcaataacctctgcctcaagtacgtcggtgtggccttctacaatgtgggccgctcactcaccaccgtcttcaacgtgctgctctcctacctgctgctcaagcagaccacctccttctatgccctgctcacctgcggtatcatcatcggtgagtggcagctggggccacgggggatagagtggtcatggggactgaagcagtgaagaacaactcttctaggcatcctaggacttcatctgtcccagctcctttggtgcagcagtcataggagaaagagcctgggggcacagagagagcaagtaacttactaaaggtcacccagcaagttaggagcccagccggggcaagaacaatagtaataataatagtaacaacagcagcaaaagcaactgacatttgttgagtgattaaaatgtgccaggcacatggatcttagccatattaactcagctaatcttcataacaagatgggattataatccacattttacagagggaaaaaccaaggcacagagaagttaactaacttgtccaagatcacccagctaataagtggcagagctgggatctgaactcaagcaatctggcttcacagttcacatgcccgaccactgtactttattgtttctcaagagctcaggtgtcctga

SEQ ID NO: 5433 - DNA, 6000 bp, Homo sapiens
acctcagcttcccaaagtgctgggattacaggcatgagccactgtgcccggccaaggtctgtacttctttatatgtctcatggatgtttcttttaaaacgcaatccttatatgttttatattttgtcattatgattggaggttctccagtactcgggaaagcagtggatattggggtagttatcttaattttcttttttttctaaatttttgtttgcatggccttccaatgaatgggatagttatcttttgtcccgctagtgtccacttacgtctcttcgtaattctagttgtgtttcggttgattcttttgagtttcctgggtagatgatcatatcctagaaaataatgaaaacgtagtctctcggcccagcgtggtggctcacatctgtaatcccagcactttgggaggccgaggctggcggatcacgaggtcaggagatcgagaccatcttggctaacacaatgaaaccaccgtctctactaaaaatacaaaaaattagctgggcatggtggcacacgcctgtagtctcggctactctggaggctgaggcaagagaatcgcttgaacctgggaggcggaggttgcagtgagctgagatagcaccactgcactccagcctgggcgacagagtgagactccgtctcaaaacaacaacaacaacaacaacaacaaaacaaaacaaaacaaacagaaaaaaagtgtagtcactctttctttcttctctttctttctttctctctctctttctttctctccctccctcccttccctccctccctcccttccttccttccttccttccttccttccttccttccttcctttccttctttctttctaatctggatgttgaagtagtctctttctttctaatagctccactctgttttctgctttgggttttattgcattgacgggaaatttcagagctgagtttaatagcggtgatattggcagcagccttgttttgttcttcttttgccatatccccgttttctgagggggctggtgagaccattatcccggtagcagtgtaaaggggcctcagaagccgtgcggtgcctgagatcctcctcctcctcccatccgggaaaccacctctgctgctctgactgtctgaagctaacctcctgggcttcctgcttgaggcagaccttcatgaacaggcttaagccacccatcccgccttgggacacacatgccgccctctcggggaccttggactgggaccttgccattctgctcctgctggggaggtcgtgccgcctgtttctctctgtgtgtgagtttgcaggttcccagaggcagagactgggctttgcgacagctcccctcccccaaccctcgatggacaaggagggcccttgtcattcctcagacattttgttccaaagctgaaaggtcccctccacatggcccggcatcccccaggccctcatccaagcctggccttgaggtgcatggagaggccgaggacaggagagtcagccccgccgccagggctggctgcactccctcccttgcccctggcctgcgtctctgcctgtcaaccgcagcctgggaaggcactgttgctgatcagggggaggtccatgtgtgccacccacacccttggccgcagcccagccaggtgaaagtcatgtgtcttccttgcctcttgggctttctctgtgtgtgtgacggggactcctctggaggaggagatgtgtggggtcctccactccccacacttggggctctgagcccccagttgggaagaagcctgactcttgttgagtgagtctgtggaccgggcactgtgatgggcagtgtgcgtgcacaacgtcacttaatccttgcttaacccgtgaggcgggagctgtcatcgacccatttcatggatggaacagctaaggccaagagacatgaagtgacttgttcaaggtaacagcaaggaaaaggcaacaccactgtccgaacccaaaccatctggctgcaaaccacagcttcggagtcctgggggcccttgtgaaatatgtttgttgggtagccccagctttctgatcaattaaacagccaggcactcacccccctagcttgctacattctaaaatacctctccctcccttccctggtcccatgacttaaacggcaaagctctggcaaagaactgagcgtgggaaagatgagagcagagagttagccacagggcagggcttcgtatcccaaacccacagttgtactttctggtttgggaggggagtattggccatcccccagcagagccgctgcagctgaggccatcgagatgggcacagatgtgtagtggtatgtcaccatacgcatgtacatacacgtgcgtgactgtgatgagcattttgctcaccgtcccacagaggcccactctgaggcctgctgctgcctggcaagcaggaccccctggctcccgagggtcattctggggcattgaagggacgcacactaaagccagcagtgcttaccagcagaggcagcccctgtaacctgtgttgtccacccacaggccaccatcacccatgagaacagggtgcctactgtgcacatgcagctccaaacagactccccaggtgcctcccaggcccccacaacagcgtggccagccctcagtccctccataggatgccctggcccctgctgacctgcctgggttgccctctgtgctcacttccgagtacagccggcccagcccgagagggatgggatgctctgtgggacagagatgcggtggggaggagctcttgagcagagctggagacactgcatgccaaggctggggctatgagcctgctccctggcctctgggagaagcttagagcaggactcaggggcctgttctgtgggccactgcaggccccgagactggccacctcgagagcaacgtctgcagtgctggctcctccagcaactccgtccactggagactcatgaaaggctcctgtgaggcctccctggctcggacctctccatggccggcctcagccctggccttaataatagtcttcctgcaagtggccgtcctttctgggaatgagtgagatccttgccaaggctcaggaggccacacagaacaaagggactgtttctgggggttcttcagctggttgtgccgtgaccatggccattggcgccaagatgcaagccttggggacagggtggacctggttcccacccacagcctcttccctcaggaatccatgctctccctgtgatttggacaatcattttactcacctggatgagaggggcactggcctaggcatcatccaaggtcccttccctctgtaactcactttgacctcctgactgcaataagtatgactggacactataggaggaggcatctctggccttcggatccaggggtatagggagggtgacgggcagtgtcctggggtcagcacttggcattatgcccatgttctcattggctcctcttaccaaccactgattcaaatgccagacaaggctcagcaaggctaagcgactcacatagtctcagcactggtgagaggcagagtcggctcaagcgcatctgctggctgcaagcccagcctccccacactgcaagggagaggagcaggtgtcactcagtgagcggcatcttttggtctcagtcctggaagtgcagggtgggctggtccctaggggctggaccatggaattaagggctccagggatcccctggggccgtggttcctatgcctggcattggacaatgacgatgcccaggacccagcccagccctcctccattagagcctctgggcatcaggctgcccaaggtgcaggctctgatggggaagaaaccggtgccgtcatggggacctcaggtagccagatgtggcctgaggagtctgtgctgtggcctcctctgtcctcaaggttaggctccagctggggaggagtgattcactcttgtaaattacagggaggctccagggaggcagatgctcccagcctgatgactggcagcaattctggggcccttacctaggttctccctgccactgcgggctccgggagctctccatggtgacctaggaactcccctgggtgcttatgctccgccgagagttgctctgttgcacattcattcaacaaacatttgtttagtgcctgtcacatgggctcagagtcagctttttgggttctgatcccagtcagggccacttcctgtggccttgggccatggcttaacgctgagcctcagcctcagaagtgccggccttgtagaggatcgatgccatcgggccagtgctcggctagggctgaggaagcgttggccgctgctggctgtagcatggggagcccagagggctggaggggccccaggcttggtgggcccagggtgcagattgacaggaaagggacagtggtgtgccctgagcagatagaagggatggtggctgcaggatgggttggggaacatgggaggctgggagctgaggctactgggtgctcatgatctctcctctctcctcagtacggcaagaagaagctgaaatacctgccctacaatcaccagcacgaatacttcttcctgagtgagtgctcggcgccccgaaatcactctgggaccctcccctccccccagagtggcgtgtctctccctcctacctgacatctttttcagatccagaaagtgacactaaacttgttagaagcgggggccacagcagccttgctgtgcagacccctcagcctgtgttacaggcctgatggggacacagaggctcagagagtcccaggggtgacacacgtcctcaagggctcccagccttctctgcaggccccggggtccctggctgcttctgcccacgtctgcagggctggcccctgcactcagtgctgggcctgggttcccctgaccttccggcacaggcagggtggaatggatgcctctaagcgcctgtctctctcctgcagttgggccgccgctgctcatccccatgtatttccagtaccagatcatcatgaccatgatcgtccataagaactgggtggtgagttggggacacagctggcttggcatggggaggagggtgactgggacagggggacccgggggtcctacgctgcctcctcgtgtgccccagtggagcctgtggggccccaggcatctcctccctggggtagctgcctctcaggaaaggactccctctggggccaccaggacctagtcctaaagatctctactctccctcagacatagggagtccactggggcagcccctgcttttgcagagcccccgagaaagttctcaaaggcagcaggatgagaggcaagtgtggccatctcccttccccgctccctgtgggccctgagtcccatgaactgggttgccccacaccctggtttgaagttggagcagctgggcgttggctgagatgacaggtgtggtcgtttgcgaagaccgtatgacaaagcaccacgaactgagtggcataagcagcagcgatgtgttttctcccggttctggagaccggaagtccaaaactgaggtgttagcagggtggattccttagggctctggaaggctctgttctgggcctctcatcggctggttgatggctttcgtcctccctctcggtacatcatctctctgcatatttgtatctgtatctgtgtccaaatatccctctttaaaaaaattattttgtttatttgtttatttattgagacagagtcacataggctggagtgcagtggtgtgatctcgactcaactgcaacctctacctcctgggtgcaagcaattcttgtgactcagcctcccaagtacctgggattacaggcaccggccaccatgcccagctaatttttgtatttttagtagagatggggtttttccatgttggcgaggctggtctcgaactcctggcctcaagtgatctgcccgcctcagcctcacaaagtgctgagattacaggcatgagccaccacgcctggcctattttttaattttctttttttcttcacc

SEQ ID NO: 5434 - DNA, 6000 bp, Homo sapiens
ttttattttggttgaacagttacaagtcttggtttgttttcctgcagcaacaggtttatcttgatatgatacagcgttatttaaattccttttcattttcctgcctttgtcttcacatgctagtttttttcagttgtttcttttttcttcttccttttctttttttttttttttgagagatagtcttgctgtgttgtccaggttgcagtacagtggtgcgatctgggctcactgcaacctctgcctcctgggttcaagtgattctctcacctcagcctccggagtagctgggattacaggtgcccaccaccacgcctggctaatttttgtatttttagtagagacagcgtttcaccatgttggccaggctggtcttgaactcctgacctcaattgatctgcctgccttggtctcccaaagtgctgattacaggtgtgatccaccgtgcctagcctgtttagttgtttctaagaagggagatattggttttgattgacatagttcatccacttatttaccaaacacttgcgaagtgcctactatatgctgcctccgaataggcaggttcgtccacaatagcacaaggctcctgccacttgtcttcaaggacaaagagacatccagacaaacaaatgtaataaacaaatgggacatgattgtagcagaggcagatgcatggtggagggaaagtaattttgtctggggagttgagaaaagctgtcacttgagctagatcttgaatgaataggaactcatgaggttgagtggacaaacaggaagggccaacagcagaggtatggcatgtacaagatgcagagctctgcctgaaaaagcctggtgtgttgtgagtctggcaggtgtttgaaggctgatgtggctggaggctagtgcctgtgaagcaggtggtggctgataagattggagaggcaagctgttatcctctttatgcatgcagaaggaattgacttcaggctgggcacagtggctcatgcctgtaatcccagcactttgggaggctgaggcgggcagatcacctgaagttaggagttcaagaccagcctggccaacatggtgaaaccctgtctctcctaaaaatacaaaattagccgggtgtggcggtgcacgcctcctataatctcaactactggggaggctcaggaagaagaatcgcttgaacctgagaggcacaggttgcagtgagctgagatcgcgccactgcactccatgctgggtgacagtgtgagaccctgtctcaaaaaaaaaaaaacaaaaaacaaaaggaattgacttcagccatttggagccatgaggatctgtgagtgagatactgtgtcatgttggaccatctcaaagacagcttctgaccccacagttctcaaccttgttcttacttatttttagagacagggtctcgctctgtctcctaggctggtatgcagtggtgccaccatggctcactgcagcctcacaaactcctggactcaagtgatcctcctgcttttgcttcccttgagtgttggcatctcatgggactccaggggcacatcaccaattacagatgataattttttttttttttgagacggagtcttgctctgtatcccaggctggagtgcagtggcgcgattttggctcactgcaagctccgcctcccaggttcacgtcattctcctgcctcagcctcctaagtagctgggactacaggcacccgccaccacgcctggctgattttttttttttttttttgcatttttagtagagacggggtttcactgtgttagccaggatggtctcggtctcctgacctcttgatccacctgcctcggcctcccaaagtgctggtattacaggtgtgagacaccacgcctggcctttttttttcttttttgagacagagtctcactctgtcacccaggctggagtgcagccgcgcaatcttggctcactgcaacctctgcctctcgggttcaagcgattctcatgcctcacccctccaagtctgggactacaggcgtgtgctactatgtccagttaatttttgtatttttagtagagatggggtttcaccatgttggccaggctggtcacgaactcctgacctcaagttatccgccaccctcagcctcccaaagtgctgggattacaggtgtcagccaccacacctggcctgttagtttttttgaggcagagtcttgctctatcacccagactggagtgcagtggcccattcttggctcactgcaacctctacctcctgggttcaagcgattctcatgccacagcatgagaagtgggattacagggattagtaggtgggattacaggtgtgagccaccacacccagccaggcccagataattttaaaatttatttttttatttatttagaaatggagtctcactatgttgccccgtctggtcttaaactcctggcctcaaggaatcctccctccttggcctcctaaagggctaggtgacaggcatgagtcacactgcgcccagccttgagcttttgtgctcgagatatagtccattcagaacctctggttggcacttcttatctggcacatgcagggcaccttggatctcttattatctttgagcactggtctgaacccacttgcttgccttctcccaggggctgccccgtgcaccccttgttcctagggtggggatggggttggatgcctggggttgcagaggggactagcagagggtgacccttttctctatgctattacttcagatcttggcttttgctttcttccaaatacacagcaatcttggcttccagcctaggtgggaaagggagaaagaaccgatttcctccagctcctctctgaaagtagcccaactggcactgtttaggaacaaggagttcctgagagtgttggcaccccacggtgttgatgtccggtagttccctgctgtgaaccctgtctctgccccacttcaatccaaggaccctgtggagggaattctaggcttcttcaaagcctctgcagtaccagctgcctccaaggcctaacatagtgaagtgatagggagacaggaccttgggggagtttggggataactgtgggagttcctgcaaggtgggtaagagtctggccatggcatcttctggtctattccacaaaaaaggtggatgcctctgagacctagctctgttatgttcattacagccctatcagtctcttctggatgtctgattcctagctgccaaacatccaggtgctagcagctgggggtggggtaggataagaaggggggtgtctacctcaaccttcctgcccaaaccattcattttaaagtactgtgaagaaggctggattagtgttaaattcaataaagttaacaaagcaaagtattgtagtgagtacacaataaatagttgctgcatgaggaatttcttgaaatgaattcaagatgagtcttgaaaaacgagtgggagtaagccgtgcacggaagcagaggtctagcagaggtctagcgccaagtcccagaggcctgagagggcaagccttggtgggggaaaaggcagaagttgtgactggctgcctctgagagtgcaagtagccatgcaaagttgggaaaaccagacggcggccggagccgtgaaccaggggcaaatggaggatggtgttggggtagtcactagcctgccggaatggaagaagaggggcgtttgggggcggtaaggcctaaaggacactggaggggcctcgggatttggggcaggatcacaggcctagtccacttaaaggtggctccgtgccaggccttcccagaatcaggttgaaaagaactttagggttagacaggttggagatgagaaattggaccatgcaggaagtactgtcggaggcgtgttcctgactttactaccctgagccgcccacggctggggcagtccccgaggttccaccttaaggggcgggccggggcggggctccgctgccccttcccagaggccgcgcctgctgctgagcagatgcagtagccgaaactgcgcggaggcacagaggccggggagagcgttctgggtccgagggtccaggtaggggttgagccaccatctgaccgcaagctgcgtcgtgtcgccggttctgcaggcaccatgagccaggacaccgaggtggatatgaaggaggtggagctgaatgagttagagcccgagaagcagccgatgaacgcggcgtctggggcggccatgtccctggcgggagccgagaagaatggtctggtgaagatcaaggtggcggaagacgaggcggaggcggcagccgcggctaagttcacgggcctgtccaaggaggagctgctgaaggtggcaggcagccccggctgggtacgcacccgctgggcactgctgctgctcttctggctcggctggctcggcatgcttgctggtgccgtggtcataatcgtgcgagcgccgcgttgtcgcgagctaccggcgcagaagtggtggcacacgggcgccctctaccgcatcggcgaccttcaggccttccagggccacggcgcgggcaacctggcgggtgagtgcagcgcgcccccgtcccgggtacctccggttgaatctggtggcttgcaccgaccccctcccctgtccccagacggatctagatggttcttccctccatcccgtaccgacgactgttcccccttcccccaccccctccccggcacattgtccttccctcctttctttgaagaaagccgacccgcccctcactccgtcacgagggtgggtgactcagcgtcctccttccccgcggcgccagaagccagttgcaaccggtttctgaagtaatgtgcaggactccttacatcagctcctctgagtctcgtgattcagccttgcctccctctctccccctttgccccctccccgtcccacccttaggcgctgggagaagggagggtggggaggtcaggggcctctcagaggggcctcacttgttaacccagcccccatttcaggtctgaaggggcgtctcgattacctgagctctctgaaggtgaagggccttgtgctgggtccaattcacaagaaccagaaggatgatgtcgctcagactgacttgctgcagatcgaccccaattttggctccaaggaagattttgacagtctcttgcaatcggctaaaaaaaagagtgggtatcctggggttcccaaggaaacagctagaaaggacttggccagaggaaaagtaggctagaacttttgtctggtttcctgctaactggctctgagttttcctagggcaggtagaggggagatttgttagtcttcagcctaaaatggatttgtccagtcgtctgggggctttctacttggctgtggaatcttgagcaggtcatttaacttctgggcttcagtgcccttatttgcaaaatatagatatttactaaaccagtggttttaaacttgtaaaacagtaggtttttttggggggggggaatcccaaatattgttttacgactcgatatagacacatgtttaaaaaggttcactttgggagtggggaacacaggggccacttctctgcactataaactttctgccttccaatatctttttttttttttgagatggagtctcactcttgtcacccaggctgcagtgcagtggaacgatctcagcttactgcagcctcctcccccagggttcaagcgattctcgtgcctcagcctcctgagtagctggtactacagccgtgtgccaccacacccagataatttttttatttttagtagagacaattttcaacatgttgaccggtctggttttgaactcgcctggcctgccttcccatatcttaaggcccttccttgctcacatctgtttcaatggaatgaattttgcccgggttcaaattcaagcttttgtaccaagtaatacataggaaacactcagtgacttgcatttgtgatttccttattttcccttaactcatagactgtctcatgattgcgtcttcctccgttgttt

SEQ ID NO: 5435 - DNA, 6000 bp, Homo sapiens
agtgcctgccaggaactgctggttgttgagcacattctgcaggaaggcgatgttggtctgcaggacagaggcgggtgggagggggtcaccatgcagcacagacagggaaggcagaggagaaaaggctgaaagagaaaaggctgaagatgctgccctgggccagcacagcttctgggcctccctgcagaggggcacttccccgtccctcagccctctcctcactccagcagagccccctaagctgtcacgggctgggcctgctccctccatacttgtttacaccaaagcatgtgctgaaggccacccttcctgcctccccgcagcctagaacagggctcagcctttttctccagcagcgtggcccacagcagtcacccttgcccctcgtccacgcttctcgaaagagggccttgaccgcaacagaccacactctggcactctaagtcactcctcccagctgagtccagcgggcatgctcccgccttgctgctcgttccctgggcttccaagccatcttgctctcctgtcctcttcctccccagctcctcacacaccacatgctccccaggaggccccgtcccggggctgtggcgccagtgacaggctctgcctccagggcaagacccagaggtgcaactgcctcccgggcctttccttgttcacccctcgcataagttcagcaagtccacggccagcttcctgcctatgcacccagtcctcctgtgcccagtgggtgccccactgtccccccagttaccaaaacctgcatcccatcaccctcatcacccactcctcccatgccactggtcaagccagaggattcgaccacggccattttgggaccttgtgacctcttctccatctccaggccacaccctccaccgccttcctcattgtggccacctccagccacatcaaacttgccttgcgctccacacctttgcacctgcctgggaagctctccctgaacttctcaagggccttcgccctgtcctcacaccctcggcagagctgacactcacctttccagcagtcccctgaggaacccgctgtgggcaagcacacccatcggcttcatcctctgcttgtctgcctgggaacccttgggggcagggtgctgcctgaggcatgtgtcagtgcactttgtgcacaggggccctcggttccactcattaaatgcctgggtgacaacatgaggctgggccagggtgagtatgacttaaacggggacatgcgagccagcactgtgacaggtgctccaagacctgtgaaagcatggcctgtggctgtgtagcgacagccctggcttccaccgcgaagaaaacacctccacgcgtcacttattcatgatccctgtcggcaccttcaacagggactcaaggccacccagactcctctgagctctccgtctcttaggctcctattacctggaggcctggacaggaagggtgcctcccccaccagcctgtcaggtgctcaccacagagtgggaccccgccagcagtgctgtgcctgtctgcccctgagcctcgcccctgcctctcctgaagagatgctgacatttcagctgggccaaggcatggcactggagaagggaggcagctaatgaaaccatccaaagagccccgagcgcgcagagtgagaaggacccttggaggccttcgccctgtcctcacaccctcggcagagctgatgctcacctttccagcaggccgctgaggaacctgcacgggcagggctgagcgcagacccacactgttgctgggacccttgtgttcacagacacacgctgaaggtcataaccgttctgcatcaccgagtcatgtggagggtccccactgagtctcccctttgtgactgtcgggttgcccatcctctcctccatactgtaagctctatgggggcaggaaccaggcccatctggttcctgatgaacccggctcccagcactgggtggccatggtggatgctggtaaacatctatatttagagtgaatgaaaactttttttttgagacaaagtgtgtcgcccaggctggaattcagtggcacaatctcagctcactgcaacctgtggctccctggttaatgcgattctcgtgcctcatcccaacagacatgcggtaccacgcccggctaatttttgtatttttaatagagatggggtttcgccatgtttgccaggctggtctggaactcctggcctcaagtgatccacccgcctcggcctcccaaactgctgggattacaggcatgaaccactgcacccggtggaaaacatttttgatggggagaagaggaacaaagacatagctggtgccactgcacatcagagttgacctgcaccaggactgaatccccctcattttacaaacgccacagctgaggcccagtgagtggtgacagaatggcttctggctgcctgtaagcccctcacaagctgcagctgtcctcccctctcgcccctaggaaatgcttatgtatgtaccatccaactctcctggcctacaggaggaacttgttttcagtggtcaggtaacgtgcccaggactacactgctgtgctgacaggatcagaattccaatcttgggtttccccgagtttcctgccacctggcccatggggatcagggctggagggagaacgaggatggctgaggtttaggtggcttaaggaccaggagacacggggaggtggtgacttcctgtttcccaactgggcagaccactggtggtggcgggcacagctggaaggaaaccaggctcgccgagccaccgaagccccagctttctcaaccaggaagcaaagaacctcccccacctcacgccgggagccctttctctgagaggagctggttccgagccgctcttccagggaaatggcccggcggcgacagagcgggagggaggggccgcaggcgctgcgaggacgcacagcttcccaatgcgtgcccccggcggttgggaagccgcgccgcgcagaccaatccggcccgaggcggaggccggttggctccggaacgcctggcccgcggggcgggcggggcagctggggagggagggagaggcgagaggcagctggggacagggcggggcggcgggggcggggcgcctgcccggaggccaagccctctcggccccaccccgcagcagccctgccaggggcgccgccccagccccccccacggccgaaccccgtgccggttggggaccctccacgtgactcggtgatgcagaacggttatgaccttcagcgtgtgtctgtgaacgcaagggtcccagcaacagtgcgggtttgcgctcggccctgcccgtgggtgcagggacgtgtgggtgtgtgggcatgtgtgggtgtgttggggagggtgcccagcgacatgtgacaaagacgcccgtctccgggagatggtgaaggggcccgcgagcaggcgctttgtctggctgtctgcagagtgaggttcgcgccgcggcggcgggcgcccgtgcggtgcaggatgccggggcgccaggatggccgggggcgcgcgcgcctgtgccagggtgagtgcgctgcggcagcgccgggggacagcgcggagggcccgcgccggcccgggcctcgggcgtgactgggcgccacccgtgggcgctgcagcggccgcgtgtccccgtgacctcaggagccggcccgggcccgggtggatccccgcgcgcccctccccgtccgccctccacgtgcgtgtccgcggcgcgcgcgcccgccggcgcgcacccgctcgcctgtcgccgccgccaccgctaaccgcgccgggaaaaggtgccgggaaccgagcgagccggggccgcgggcccgagcgccatgggcccgagggtgggcggcgggcggccggtcatccccgggcctcgtccccgcgggagagcggccaggagtcggcgggggccggccgggctcgcagggaggccggcccgcgccccctgagcgacggacaccaggtgagggggccgccgggcgcagcgcgggggccggccagggaggggccacggactccacgggaggttcggggggcgccttctctggcgggggagggtatggcggggagtggggaggcggctggcgattcctggggacgcctgggaaaggaagttccgggaccctccctgctctcggtcctcctccgcttcctgcctcatgcctcaccttgtccccagcgcctggactcccccttaactgcttgggaaatgtgacctttgctctggggggcctggccctgcaggccccaaccttccctcatctctggcggccctcttgggcctctgacccagcccctccccgggccaggctcacagaagctggcttctgggactgtcctgggcccaagtgggcacctgcgccagccccacctgtgcctgggctgtggccccttcctacagggcgctcaccatggccccgccgctcctgctgctgctgctggccagtggagcggccgcctgcccgctgccctgcgtctgccagaacctgtccgagtcgctcagcaccctctgtgcccaccgaggcctgctgtttgtgccgcccaacgtggaccggcgcacagtggagctgcggctggctgacaacttcatccaggccctggggccccctgacttccgcaacatgacgggactggtggacctgacactgtctcgcaatgccatcacccgcattggggcccgcgcctttggggacctcgagagcctgcgttccctccaccttgacggcaacaggctggtggagctgggcaccgggagcctccggggccccgtcaatctgcagcacctcatcctcagcggcaaccagctgggccgcatcgcgccgggagccttcgacgacttcctagagagcctggaggacctggacctgtcctacaacaacctccggcaggtgccctgggccggcatcggcgccatgcctgccctgcacaccctcaacctggaccataaccttattgacgcactgcccccaggcgccttcgcccagctcggtcagctctcccgcctggacctcacctccaaccgcctggccacgctggctccggacccgcttttctctcgtgggcgtgatgcagaggcctctcccgcccccctggtgctgagctttagcgggaaccccctgcactgcaactgtgagctgctgtggctgcggcggctggcgcggccggacgacctggaaacgtgcgcctccccgcccggcctggccggccgctacttctgggcagtgcccgagggcgagttctcctgtgagccgcccctcattgcccgccacacgcagcgcctctgggtgctggaaggccagcgggccacgctgcggtgccgggccctgggtgaccccgcgcctaccatgcactgggtcggtcctgacgaccggttggttggcaactcctcccgagcccgggctttccccaacgggaccttagagattggggtgaccggcgctggggacgctgggggctacacctgcatcgccaccaaccctgctggtgaggccacagcccgagtagaactgcgggtgctggccttgccccatggtgggaacagcagtgccgaggggggccgccccgggccctcggacatcgccgcctccgctcgcactgctgccgagggtgaggggacgctggagtctgagccagccgtgcaggtgacggaggtgaccgccacctcagggctggtgagctggggtcccgggcggccagccgacccagtgtggatgttccaaatccagtacaacagcagcgaagatgagaccctcatctaccggtgaggatgcgtgccccacacccggctgcactcccggcgcccttcctccgccctctgctccccacaaggctttgcttccacccctcctctctctggggctgacaccccctccccgaccatggctgctggactcttggaggagcagtggcctggcctggcctggctgcctgagggggctggagctcaaggggcggcagaaggaccccaccccgagatgtcccaggtgtcactga

SEQ ID NO: 5436 - DNA, 6000 bp, Homo sapiens
ttgtatgcggttagtgtgcggtatgtgcaaggtgtgacccatggatcacagtgtgtgtctgcctgcaagaagtgtgcattgcaactctctatagctctgagtgactgtgctggggtaacacaggggtccacggtgcatgtacactctgtggcgggagccatggcagggtggtgcactgggtgtgcgttgtgtgaattgtgaggtgtgtgttttgtgtggcacatccgtggcccctgtggtgtgctgagctgggtgatggaaggtggggcacatttgtgcaggggtgacactgacagaatgttttccgtggtggctctgccttttccacccagtgcccgggagggcttgggagagtgaaagctcacccggatctgggtggagaaagtatgacaggtcccaggctcaccctctcacacatacaaacacatgcacatacaagagaagctgctccgaaatctcatttttttatcttccaaaattcctgtggattttgcattcttctataatatttctgcatataaaaacactgttctgataaattaccatccaatgagttggctcaagtcttggaggtaagctgggtttatcttgtggtgggaatcccctgcctgtctcccaaactgagatgtaagaacttggactcagcaggagtgaggcggtgatgttgggtatgtggtgtgtgctgcagggcggggtgggggggagttgtttgggtcactcctggggcaggggcaggagagctgggcttctgaggaggaaccctgaccatcagtgaatttcttgcctcttctccactgcctgggcaggaaggggctgcaggaccctggggaccacgaagaagggggttcccctagcaggctgcctcctgagacagttaggtgtttgtgtcatccaagcttggttcaaatttgatttaagcaaacgcagaaatattagagaggcttcaaaagggctctggcactttatctgcagaactttgggcaaaacctcactgtgtctcagtttcttcctttgtaaaatgtagatgtggatagtatttgcctcataggttatttttaggactgactgagtgcctggatattaagtggctggcacaatctctgatacatagaaatcctaacagctggtgacaaaactatgatgatagtaatggtgacccccacacaactgggtccctgcccaccccaggaactctcagttttcacagagccagtgattccaataagctgtgtgggtaggaatcagagagtccctatttgagtatctctgagggatcctttcccattcccagactgaatccttgttgaattctcagtgaccacctgcttcctgggaagatgcagtctgggagaggacaatgcaggtctctgtcaaagcctgggatggagcgtgggagagaggttgggggagaaatgcaggggcagccatgggcttggatggaggcttctcagtcctgacaaaccctggaggaaccgaaaaatgctggccctgtgtatgtgtgtgtttgggaactggcaggggcaggagcctgggttgccctctgcctggaatgaggaaagtccagtacaggatcaggaatattagtccctggaccaagacaggccctgagagctgaaagggaggctgtgaggtcagcattgagctgcaagcagaagtggaccaggaggctccccgcaggctgagccttgtttctggggctaaaacttctgcattggcagagcaagtgcccctgttcctgttgacttcattgagtcagtttagaggagttgcccggaggccttggaggacaaggggacataaaaggcagtgttgggagctgtggaaacatctggggagggaacctaaatatatctcatggtgacggggtgccatgatgggccagtgcaacctcgggcaccacagaggcaagccactgtccccactgtccctaacagggagtactgctgccccagaggccctgagagcttctctggaaggtctggacagagccctcctggggagaaggaggcctggcccagccctgactttctgagtgataaggccagctgtcttcttagctgtcagggaggtgggaccaagtgatgctgtcgtcacttctggccctgatttcctttaatccccaattctggctataattgtttataattccacacccctagccctaagagtctataattactcaaacattctagaagtctacaattcgaactccaactttctacactccaaagctgtaacattccccaattctggctccaatgttggaggattctggccctggctttggcagtctgactcttgtaaacttataaactcccaaggaagaggttacttcagcagaatcatgtgagaagccccagaaaaggtctcctccctgcctaagccagcctggagtagaggcaggtgcctggtaaaatggccatatgctctctggggtggatgacagtgaacccagaggcccctcctcatcagagcagcagagttgctgggagtacctcacagctctcaggggacggtggccctagagcagagaaaggttcagatcttggattgtaggcacccctcaggatgagggaattgtggagtcactgggcaccttgcaaggccatcaaaaggaaggagagagagaacaagaaatggggctgaagagacctcaaaggcaaacctcattctctctgagagacctcaggttgtagaaaagactcctgtggagccagcaggagcagcatcgttgatgcacagccatgtctgaactcagcataggctggggggtggagagctccaaaattcacagtgattagcttaaaaccttgccttgagctggcgacaagcaggactggtagctgactgagcaagctggggacaatcctcccatagaaacctttgcctactttctgtgagtattctgaccaggacttatgtgggatggctgaagagggtgagccagacaaaccatctgtgttcttggggaaacctgttagcttctctgggaggggcaaaggaagggcttgggcatccaaggactcagctcttcctctcccatctctttcctggttatgaaagctcttcacatgcaacttgctgctgagctaagctagaacactatgtaagctggctggaagtgggtccatgcatgtgatggtgcctgcgtgcctgccgtgggtggtgtgttcccaagtgtggcaggtgccagggcacgtgtgcatatgtatgtgtgaacctgtgtgagttatgtggagctgtttccggggctgggtgtgctgtgcatgcaccagtgcagaattgcacccacaggcatgtgctccttacaactctgttaggtctctgtggcctctctgtggtttcctatgatggaaggcaaacagcagaccccagactctggacagtatgaggggctcaggctgcagagagggaaaacctctgtggctcagcaagaaggcctagccctggccagacatggtggctcacgtttgtgatcccaaaactttgggaggctgagggaggaggatcgattgagaccaggagttcgataccagcctgtgcaaactagaaaggccctgtctctacaaaaaaaaatacaaatttagccaggcgtagtagcttatgcctgtagtgccaactacttgggaggctgaggaggatcatttgagcccaggaggtcaaggctgtagtgagctgtgtgtttgcaccactgcactccagtctgggtgacagagtgagaccctgtctggaaaaaaaagatgtccagtctcctcctgtccaaggagaccaccaaccatgcttcctgcaagcttgaagtgggccaactctttttaggatctgatctgaatcccagagggaccacatctcctcccacggaccagggctaggcagcctcctgtttcagtcaagagggctgaaggtggtgttttccctcctgactcctgggagcagcaaggggccaatgggcggtggccagggatgtgcacgagaccattcctgcctgccaggggcctcattacaggctacagagacccttctcagcccttgactcatgtggatcggaacagctccattccacagctgagaaaaccaaggttcaggaaggggtgagacccacccaagggagtagccagtactgaactgtgagcccagcccagagccaggaaggaagacactaggactgagctagcagtggctgcctggcggcagggcctcgggggtaggacgtgaaggtcagcctggccagctagtggtgagcatcacccagcaagggcatgtggggtgtaaactgtaaagcacctgatttattgtaaaggacccaggggcttcctgctggtgactgagtgcaggagggtggctgtggaggggtcagtgcccacaggcaacggagggtctaaggggcttcaaccttgggcactcctcccctccccgtgaggagcctacaccctgggctgagctgggagagcctgcgcctgaaagttagcccctaaggcttcctcctcatcttatgtaactgcttttattcctggggaaaatcaagagcctgggaaccccacaaatctcccgtgacatctgggacagtttgaagattatgataaggatttcggagcctgggaaaataaggcctgtggactaggggtttgcggggctccccaggagcagcatgtgtgtggagcacatgcagaggcccgggcctgggcaaacaggtatgtgaacaggtgtacacactccagagccactcacagaaacacacacacacatacttaggcacaattccaaacacctgtgccttgtgaatgcatgcgcatcttccagcacaggtacacatggctgacaagcccccaggcagacactgtgcaaccagcattcatgtcctcccccagcctgggggcctgactggggttggtggctctcaaggctacctcagggctatgcctctgcctcccggaacaagctttcccaggcctccttcccagccttgtctctttcccgtctctccccccacaccttcttaccacaaggacagaggaggggcccttcctgtcagctggctgggagcagaggtggctttgtcttttcggaagaactggttctgtggaatttgtgcttatttcccatcaaggatcaaggacctgctctggggctacctcagggccccacaggatgaggggctggttttcagatgagttttctgcttgcctgtcatctggatagtgtctaaaaatttgcaaactgccttcttgtcagtgtcttgctcattcttcatgacactcctgatatgtaagtgccttcacttcctctatttggcagatgagggagctgaggccagagagggatgggactgcctggactgcctgaggtcacacagcaagctgaggcagggttgaccaaaactctcatgagctggggttgcaaggaaaatgccttcagcttcctggggcttggggtaggagaatttggctgtcagagcctggagggtggggcaggctggcactaccaggtgggcctgccacagaaacacctcacactcctttaccaggagctgacggggggcacagccagcccctcacaggccagcactgtgctgggaggctcacccctgaacctacctttgtggacatgccaagagagggcaggagagggagctctgccttgctgtgtgacccaggcaagtcccgaccctctctgggtccagcgccctctcgcctactgggatattgggattggggattggttgagggatgtgctccctctctggaccacagaggaagcagagagcttccccagggctgggagtggggcacaagctcgggatgctccctgccaaagcgttggtggccctgagttgctgcctgtgcccagggagtcccagtcttcgcactagcctgctgctgagatccactgaggcagagcctggcacagagtgggggcttggggcctgggggagggtctcctccaggctaggtggctgggagagggtgatctggcaaatctagatggggcctgtccacctgtccg

SEQ ID NO: 5437 - DNA, 6000 bp, Homo sapiens
gggtgataaaaatgttctgaaggccaggtgcggtggctcacacctgtaatcccagcactttgggaggccgaggcgggcagatcacgagctcaagagatcgagaccatcctggccaacatggtgaaactccatctctaaaaatacaaaaattagctgggcatggtggtgcacgcttgtagtcctagctactcgggaggctgaggcaggagaatcacttgaacctgtgaggcggaggttgcagtgagccgagatcacaccactgcactccagcctggtgacagggcaagactccatcaaaaaaaaaaaaaaaaatacccactgaattttttactttaaaagggtgaattttatggtaggtgaattacatctcactaaaattatcactttggccgggcgcagtggctcacgcctgtaatcccgctctcagggaggcaagaggcgggaggatagcttgagcccaggagttcgagacctgcctgggcaatatggcgagaccccgttctccagaaaaaggaaaaaaaaaaaaagacaaaaaaaagcgtaaaattatcactttaaagtgttttcttttctttttttttttttttttttttgagacggagtttagctcttgttgtccaggttggagtgcagtggtgaaatctcggctcaccacaatctctgcctcccggttcaagcaattctcccgcctcagcctccctagtagctgggattacaggcatgtgccaccacacccagctaattttgtatttttagtagagatggggtttctccatattggtcaggctggtctcgaactcccgatctcaggtgatctgcccgccttggcctcccaaagtgctgggattacaggcatgagccacagcgcccggccatttaaaatgttttcataagcacttttacttttgctcaaattgcatcttgatataaacttcaagttttttaaaataaagataatataaattattctcattatattatactctctagaaaatgtaagtagtaaatttgaatttgatgagccagtccactatttcctaaacaatgtattatctgtgggctgttcattcaccagggacacttgaaatggcaaaatcttttcctctctgccaatggttctgtgcaccatagccacaaagaaatgtaaaagttacttgttggcttattagtctcaataagttttagttgattgaacaaacaaagtctctcacagccaggactgctgcggctggaattcctgacatactgtcatacctctcactcgtcaatctacactctcctcccatctacacagctctggaaattaaaaacaatccaaccatgactatcatggcttcagaggtctatgaactcccaggaattatacgcagattttttcctgaggacagtctacacttccttattggcttctcaaagagggtcactgaccagcttttagagacatgggccaagtccggctacgtttagattcggtagtagtgtctgtggttttagtttgccacgtcctttcctctttttttcgtcatagtgcccgctctttgggaggtaggggagagtcttcccctgaagtctccactgctgctggagaaccttcctttttcatctggttgctaaatccagagaatgaaatctaggagatgattgcaccgtccccgcccctcaacatgaaggatgccccactgcccatcggggaggggagcagggagagctggagagaggctgggtcggggcaggacccaggcgcagatcctccgaggccagctgcagccctacctacctgccttcccgtctttcccctcccttcttttctccttctgtctttccttccttccatatctctttccttgcctctttccccctcccactgcttcctttcttccttccactgtggaggtggaaaatttagctaggagaagctgggactgggacgttccaggaaccagacagagagtgagttaaaggcacagagatgaaaacgcggtatgggagagctggttcttgagtcggctaagaggggatgaactcaatggttaataggattggccatggcgaatccctcagcagggcacgcaccgcacaaagggccgaggagcgagggtagctcgaggtcaggattacagagactcaggagcaagagaggaaggcttaaagagccagactgcgcagccaggactggggtgatgggcgctgtcctgccaggccaaagaatgaagatgtagccccgcccccaacctagggaggaggaccagcccggttcctgtcctgcccccgcaacctcgccccgattccactccgggaacctcggcgatgctgagccaagaccacttctgaatcagggatgacttgtctagtgaacctagggtcagagccatcagttggaaaggctgggaggagcctggagaaagagggcgaccttccttgggatctgtgcgctccctccttgcctccccctccagcctcccacttggtagcaccttcctgatccccttatctctaaggcgctcagggaaatgccccgctgcgggagccttctgggaaatgctgccctggccacccaggaaccatgagccctgcagccccggtaaggaagagttctctgggacaggaggaagggcccagggcagggtgggcacccttgccacataggggacgggacagaagtcttttaggccctgacatcctctggtctctgaatgacatcctgtggctgctggtaggtgagggtttgcggggctgagctattgaaggaaatgatcacagtccgaggtgatagatacagaaagtcttcctttctccaggtgggctcccgccagtccattcttcactgtgccctagaggggcctttccgaccccctaatcacacacctcactcctcatcttgaaactcccacccccagctccagtcactgcgtcctaacatccaagctctccgcctgtcatgcaaggcctctgtgctatttctttccaaaccctgcagctctatcgcctgacactcccgatgccctccccacccctgcgctttatgttctagacacacggaaatgctgggcactcttcaacatcctgacagtattcataggggaaatttcgggtcgcctaggaaactgcccctcatcctccaaggcccctttcagcctcctctgggaagccttcctgaaccccttgagaaaagtcaggctcatcttttccattgttaaatcacaccttgtgctccaattgtgtgtttccatgtaatctccctcactagactggaagctggggatggaaaggggaagcatcaaaaaaacatgcaaaactaggagcttggcttctccttgcaactttactttttctttttttctaggaactgagttcaatgattcttaagaaaaagtatttcatgataaatgagtgaacaaatgtcttaatagaaaagtaaaattgcaggcggggctgcttctgcccagctctacaggggtagactacaagtcccagtacgcctcgggtcagcatctcttcacgtcactccccctccctggggtgggcaggtccggagggcggggcccgggggcagctgggctctcaggcgctgcgggaggagagaaatgccccaggctctccggggcacacaaagcgcaggcgcagcgggttgggtggcagcagcatcgagtagcggccgcttaggcagcaacatccgcaacaagtgtagacaaggtgggtgcatcaaggggaggggctggaaaaggagtctgcacctgaccctcttgtctgatctgtgtcaagaccgtggagaggggagggagcggcaagaggaacagacaaggctgggccttccagcccaggtgtgccagcccttgttacgcagcaacaggtgtgagcaggtgggggaggggcggaggcacccgctggcaagtgagtcgccctcaggaacagagggcacctacctggattccagtgcaagctacatcatgtacatggatgagtcatttgctaaccctcagtttgtccatctgtaaaacaggagtaaggattcccttcctaacagggttagagtggggacaaggtgagggagtagaatgtgcggtgacgtccaaacttagctgtacattggaatcatctgaggatctttgaagagtatcagggcttgcctcctgccctcagacattctgatttaattgttacggagtgtggcctggtatcggaagttctcaaagctcctgccggcataacggtttgaagccaggactgctgggtgtgagtctgggctccattgcttactaatcaagtggccccgtgcaactgactggacctttccggcccccgtttccccatctctgaaataggaataataaggactgcagggaggcttaaatgagataatggatgaaagcactgatagggggtacccggacagagtgctcggtccatcacagctgctgttgaactgctctttgaagcactttgtaaacagctctagtggggtccaaataggagggagcttttccctcatccattgccgtgattctaatattctgcacttccacattacagaatcccaaggtttctaatactttaagagtctcatgctccaccgactgagctagtcaggcatattctaatgtttcaagagctcctccctccagcctctgcctgcctcacagacacacttctacagatctagaaactgagaccaggacagagggccagggaggagggatatggccaaagttaccaagctgaggctggaatccaggctcctggtccccacccccaccccacaccaatggctgccctgctgaccccacagtgacagtgctcccattctcttcctgagcagagaatggggaggaggccgaggccgcctggcccttgtttactaaccctccctcaaacgtttcctgggtggctccccagggacggcagggctgggggcttctctccagggagctgctgctgaggcctgtgtctcccgtggctcctctgacaggtcccgcctgactccgctctggaaagtccttttgaagaaatggccctggtgaggggcggctggctgtggagacagagtgagtgatcctgggcccctggtcctggggcagggtgaaggaagtggcttactgggcttgccacggggaacacttctctcaagaaaccaggaccttttcatccttcccttgtttgtccatgctcttccctctgcctgaaggtccttcccattcccgactacatggtttaaacttctatttgttcatcacgacccatctcagatgggcccctctctgaggagccttctctggcttttcctctggcccccacccctgctcctgcagtagcgtcaagctggattagaggctccctcctcggttttcacggcgccttacagtgatctccttagaacagaactgtctatctgtgggtatccccactccctgaccccagactggccccagtctgcgaactcctcaaggacaggggctgggtttgaccctctgtgtgtccacagtcccccaaccccgggctggacacagaacgaggcacagaacaaagtgaaaaatgcctttgtgctttggaatccacaaagccctaagaagctctcttatgtctttgcccttccctgttaagatttccagttgcaaaatgtcagaagctcggtctcgggcttctagacccacctctgaccagagtcatgacctgagcaagagctatcctggggacccctgggacaagcagccccatgccccatacccctgcccattctcagttcatttagttcagcaaacactgagccaggtctccctgggtgccaggacctgcgtggggagccatagcccccagagtggtacaggaggcagatgctacacaaataaccatcacacaagtcagagatgagagataagaggccgggcacagtggctcatgcctgtaatcccaacactttaggaggctgagttgggaggattgcttgagcccaggagtttgataccagcctagacaacatggtgagacccactgtctccaagaata

SEQ ID NO: 5438 - DNA, 6000 bp, Homo sapiens
taacatggcgaagccccgcctctactaaaaatacaaaaattagccaggcgtggtggcatgctcctgtaatcccagctattcaggaggctgaggctggagaatcgcttgaacccaggaggcggaggttgcaacgaaccaagatcacgccactgcactccagcctgggcgacatagagagactctgtctcaaaaaaaaaaaaaaaaaaaaaaaaaaagaaaaggaaaggaaaagaaatgtatgtatacctgtgtacagagacagatgtatgtatttgagcaatgatctgtgtcaggcactgtgtttagcacttcccatgcatcctttcattgaattctcataactaggcaaagtaacagtgtttttgcctcattttacagatgaagggactgaggcagggtgattaaatctgaagctcaaggtcacacagctagcaagggttgggctgagacttatacatttgaatctgttggctctggatgcccaccgtgccagccttgggttgagtcatagctgctcttccgtgggagcccctccctgcagctgccctagggtctaaccagcagtactgtctccacaggaaagatgagtccaaggagcccatcgtggaggttcgaacggaggaggagaggaccccaaaccatgatggagggaaacacacagagcccaacgagaccacgccactgacggagcccgagtacgtgggctgggaggggctggcacctgctccgtagagacccccacacccacctccccaccctacccccacctcccgtgcccctacccacagctcccggccaaacagttcaggccaggattccaaacccttggccacaagacctgcttggctgagaaatgcctgacctcaggcatttctggttctatttcggtggctgtgggtacccttagaaggctcctgtataagtagggatccctggatccctagcccctgttctcaagttatacacatattctggaaatggcttaaggtggcaaaatctcactgaaaggcttagcagagtctgcttaggatttcttgaaattctagggttttgtgttttccccctgaaaggataagggaagctggggacctggtaaagttctctgcccctcctctgttcagaaacctcggggacccacggagccccagaccagttgtggttgtaatgcctgcctagctgtcaaggatcttatgggcttaaagggaatggagtttcagggaaccacaaaatctgtgactggaagaacccacagctcctatgagccattctgagtactcgtgatctgccttattcgtgacttttcccatcggtgccctggggagccctgcaggacagctgggcccagttcctctgggacctgggaagcctagagcaggtggatgctgaacagaagcctgcccctccttgaatggagatccagggcagggatcaggaagccctaggcaggtctgcaaggacttcagggaaagggagctctatgcagagagctggagagacatcagcagggaagggctagcaggtcccttttgagaccgccacgttctctgtcgtctcctgtgtcctcttctgcccacctgggcgtgtgcttcctctcagcatccttctctctctgtgggcctgtgtccgtgcctgtgcctaactgcatgcccccacccccatggtccctgtcctgggcttcagccctcctcctcgcttctctgtcacgtctcagcttcattgtctattctcttctacttcctgtcctcccacaggctgcctgccgacactacggccactgtcgaggacatgctgccttctgtcaccaccgtcaccactaactctgacactatcaccgaaacctttgccactgctcagaacagccccaccagtgagaccaccaccctgacctccagtattgccccgccggccacggccacgcctgactcaaactctgtaccggctggccaggccaccccttccaaggggcccagcgcctctgccccctccccggccccagcttcagcccccaaggtcgcccccctcgttgacctgagcgacaccccgacctcaacccctgccgctagcaatttgtcttctagtgtcctggctaaccaaggggctgtcctcagcccaagcgcccctgctggtgtcggggaggcctctaaggctcctccggccagcaagcccacccctgcaccagtccccaccccgactggggcagccagtcctctagcagcagcggctgcccctgccacagaagcccctcaggccaagcaggaggctcccagcaccaaaggcccggacccggagcccacccagcccggagccgcgaagagcccggccgaggcagccacagcccttgctagcccgaagagcgaggctgcctccgtcagcaccacaaacccttcccagggcgaggactttaaaatggacgaagggaacttcaagaccccagatattgaccttgcaaaggatgtttttgcagccctgggctctcctgctcccgccgctggggccagtggacaagcccctgagcttgctccttccactgcagacagctctgtttcgcctgcgccagcaaagaccgagtacggcctctctttgtctgctgtcatcgggttgtgtcctgtggtggtgtgcatttgtgctgtgctgtgtcctccttgttagatgtgtcttcagcctcatccagggcttctctgaggcgaccgtcaaccaaggggctgggataaggcagagagagcaggacaggcagctgggccccaggagcagccgcctgctggctaattaggccatgttaattatgttttatccttatcatcctagcagcggcttctgttttccctgggggagcccttgcagtcaggccactgatgagaatagcttgggaagcaggctaagaaggccaaggtgcccttatcagccaccctggggcccccagtcggtgtgttattcagtgccaggctgagtccctaccagaaaggcactgatgtgcaggaagaaaagaggtaggccccaggcccgtggcaggggagggtgcagttcagaggtcccctcacactgtggctcagatgctcaccctcccctcccaaccccggcccccagcccactcttgcttctcctgctcttagagtggctgggaagactcggggctccccagcatcaaatggctgctgggtctcaaagttcaagagaaaggccttaacctttcaggtttgtaagtgtcttgccaaaattcagtggcaccagctgaggctggggtctgtgcctgtccccatgcatcctcagacccgactccctttcctggaactgatggaggcagagtcagacctagatttttatagaggctcctatggctgctccccagataagctgccatgctgccaccatgggctgcaaggggctctcgccaggagccctgaatctcagcatcgggagggaaaaggactctgatagccctgcccactcagctgccctcaactctcgcatagccaccaggcccactctagtaccccaccaggctgccatgaaaagctgcctccatcagtgttttctcaccctacccaggcaggccctagaggcatcatcctgcaacagcacagggtggggtggggaagggacaggcaagagtgggttgcaaaggggcccctgaaatcagtgctgggagcccagcccagcccagcaggctgcatttacatccagctgagctgttgccactgcagctggtcagggtgaggaggagctgcctctgctgcccccttccaccaccccaggtaaaaacacagcctctggcatcaacttagggctggaagaggaaaggactcgttcttctgactcagtgcttctcaactatggctgcacattagagtcacttgggtgcttttaaaagtcactgtgtccggaccaattaaatcaggatttccgcgaacacagctcgggcttgggtgatttttagtgctcccaggtgatttgacgggcagaggttggagccgggtgctgtcactggagaacccctcctcctccctgctgtccccaaggcctggatgcaggggcgagatgtctgcagaccgtggtctcagtggttctgttttcctgattctctgcaggaagggccccgtagaagcaaagccagagtgccaggagacagaaacgaagccagcgccagccgaagtcaagacggtccccaatgacgccacacagacaaaggagaacgagagcaaagcatgatgggtgaagagaaccgagcaaagatcaaaataaaaagtgacacagcagcttcaccagagcatttccaacaccacagacacacacacgcacgcacacacacaaacacacatgcacacacacacatctcatttctctagtgtcttttgcctttaaaaaaaactaaacagataaaacatgggaatctcctttttgtaggtttatagaaagggtccctttgttgcacactcacttgtaagaaaatgagacaaaaaggttaaacccacagccaaactaggacactccgttccctgaaaccgttaaaaaatcaaacaaaaggaccccaaattaagaatctaggaagctcagaaacgaaatctaggttcaggaagaccacacttggtgttacccgattggcacagaccagtttcagagaaatactttcaggcactaagactaatcgaatgaacaaagtccacagtttatttttatactttcagtcaagtttgaactctgtaaaacctcataaataagttataatttctgttcactttgtatttgttcagtatgcaaagtgtgtcaccctttctagctgaattcaattcccacgtagactcttattttataggacgaatgccaaattgcagcttctgggggtagatctcaatttgcagtattcagacttctttttctttcttttacattcttttttctttctttctttctgccaactttgttttccagtgtttacaaggtgacaaatgtttgactttggttgtgtttaaatgtccgtgtaaaatagctgccttttattttttaaggtaacaaataccacctagaggtaggtaggatcatcccacgcttgctttagcacaggacaactttacaaaacatgattgtttacagctgctcttcccctcttttctgatctgcagtttttgcctgggtcccactcaggtgaaaatccatctcattctggaatggttttgcttttgaatttttggttatttttgtgtttctttgggggttagaccactttctgattagccgccacctgcctgcatctgtgaaaagggatctgctcccaggcgttctcacccttcttttgaaggactccttaggctttgttgaatgaagcagagaagattgtatagttggggctggtcttggtgaacacacattattaccccacacatcccctttgtgtagaaagccaaataaaatctatacataccatttccttttgagcccagaatctagatttgagcggaagagcatgtgtgcttcagggaattagtgtctttttttggaaatctgttgaagtaaagtaacatcggccttctgttcacttaggcagcatttatagaaacaaaagaagaaagaaacaacctactgtctggagtcataacacaactttcctggattggaaaccaagtgggggaaaaaatacagaaactttaagggggatgggaggggggggagaagggaaaagccagccctttgtatagaaattttgcttttttttccctcattctactttagaactgcaagcttgtgcactgtggatgcgtgaatattttagtgtgaaacgtgtttttgtcatagtattgaaataaaacttcaacatagtttggttgtggaaggtatagcagatagttcagaaaaaatattcaggaaacaaaaatcactcaaacggaatcgaagccttttaacaaagaaaatgaaatacagatgatgatgatgatgatgaagatgatgctaagtaaacagaaatcagtactccgcatgcgctcctctcctaaggtacaaagcagcaag

SEQ ID NO: 5439 - DNA, 6000 bp, Homo sapiens
cctatctactgtttccgcccggatcttgttcgctgaacaaccattactgcggaaggcggcggccgccatttttaatatgggcattagagggtggggatggaagtggaagagaagtgtgattccaaatttcatcctatgttcaagagtagaatcaccgagagagtactggaaacgcaattaaagaaaggcagccaagaacggatacttccctaacattatgttaaagatgtactacccagagcggaaatgccaattgcccggttccaagatgaatgcctccttgtaccacgtgtctgacaccgctcacattccggttccacgtcagttttagctccgtccgcctccataggtcaagcttaaagggcccgtacctctcccttaatctgggatgcctccggctccaggaagatggctattgaaaggcagggggtggggaggagggacgagggtgtggagacgcgcctgtttcttgcaggaaacctgttgccaacatagtcggaagccaaggtaaacacaactcagttcccggaaacaaagctacgatttggaaggatggtgtaaattctaaagcgtagatccttgaaaagcccctcccactctgtttttcttgtcctcgattctggtatttttttctcagcatcccacccaccttctgccccagctgtagcagttagttgcccggcaacccagcgcagcacttcactgagggattgggagtaccctcaggtcttggatttaactcgagacttcagcttggccgtggatcactgcattgtacctagctcccacaaggaggagatggagatttccaggctgaggctctggaaagagctgaggagggagaggaatcagacccacaactgatttcctgtgagtctgaggaactcccagtcaggtttcttcctgtaggtcactgtgcattttgcttggcctcctgcaggttgctgtgcattttgcttggcctgttcccctgcaaacaacaattcaccagctttttttttttttttttttttttttttttgagacagagtttcgctcttgttgcccaggctggagtgcaatggcgcgatctcggctcaccgaaacctccacctcccaggttcaagagattctcctgcctcagcctcccgagtagctgggattacaggcagtagctggaattacaggcatgcgccaccacgcccggctaattttgtatttttagtagagacgggatttccctatgttggtcaggctggtttgggactcccgacctcaggtgatctgcccgccttggcctcccaaaatgctgggagtacaggcgtgagccaccacgcccagccagttcaccagcatctttattacctttcattccccgacaggctcttaggcggcaaatgatttccatttgtcagagaggaagtcaccaccagtgagttagggaaaggactccaatagcctagcgctttgtccactcttccctctatggcatgttccaggagtcagggtcatgttgaccgtttttaagccgaagatagtttcttctttccctcaaaatcagatgtgaggccgggcgcagtggctaacgtctgtaatcccagcactttggtaggcgaaggtgggtggctcacttgaggtcaggagttcgagaccagcctggccaacacggtgaaaccccgtctctactgaaaatacaaaaattagccgggtgtggtggcacatgcctgtaatctcagctactcaggaggctgaggcaggaggatcgcttgaacctgggatgaggaggttgcagtgagccgcgatcatgccactgcatcccagcctgggcaacagaggggaaactgtctcaaaacaaacaaacaaacaaactaaatcagatgtgaaatggcttttctacttgaaaatggctctaattaacaacaacaaaaacccagatatgtataaaatacataaattttcgtaatttacttgctagtattccaccagattttcagtacttatcccactgctattatttttctgtgtgtgttgtgtgtatgcacgtgtgccccttttaaactagaaactcccgggaggcaagtgttttctcttccacagggtgtccccatggggctaggaacacagacatctgtgtacaaggaaggcatcatcacacataatgaggctgaggctgaaaggaggactgagggcaataggtgcatatggagggagcaattagttgtgaccagagtaagtggtcttgaggaagagaagtatcatttcagtagattataagagtagaaggacctttcacaggcagcgacagtgagacaccagaagctggtggaaaggaggagcttgtgggatcccagaggaggcagcattcagttatcttgttgatgacgagtatactgagactccctggaggtctgagagccagtctgtatctatttccttttttattaggaggccaatcctaataaatcttccttcccagcctggtattgggaagctttatctctttcttctccagagatcattagccctccctaccaccaccctcctggggagggtggaaggatgtaatcaaagacaagagagactaaggattcatcatccacatatacatgttactatcagaaaatggttactaagatacttgtcagataatctgagtatttttgttcccatgatgataaagtcccagttgatgatcagactaatcagaaggagaaacaaacacatgacttttggcttcacttgaaattgtgtgccttccctggtaaaagttcaaagcgttttcctgaatgctgaagccggccctaggattcacagaccagttgacttgtcagtggccctggactgagcagacagtgtttgagatgcacacctcttctaagtagccttgagtggctcccaatgagcaaggccaatccactgaatgtgattgctagacaaagcctgtcccaaaaatgtttcatagtgccacaaagacaatgagacccctctggatagtctggggctgtgatacttgcaggactctatctgtggctctgtccagtcagctgaatcactctttttccttttcctcccacctctcccctcttagtctagaaaaaagttgttaattaaaagcaagccccaggatttcccattccactggtatggcatgaatgatatttcaaaagacagaaatggcatagaaattctcaaagcatacttgagtattttctgttagacttcttaaaattacaaagtttgttaatccctactatgtgcataggaagctcttcagtactgtggaggatacaaactaatataattgcagttgcttgcccccagggagtctacttcagcatatttggagcatcttggttgaatttgagggaaaagagatgactaagacatggttcccacccctaggcagcttcctgatgcatggaaaaagcagacatataaacaatcagctagactctaaggcagaatgtaagtgctagaggtctaagtaatggaagaaagaaggaggactaggctgggcacagtggctctcacctgtaatcccagcactttgggaggccgaggcgggaggatcacctgaggtcaggagttcgagatcagcctggccaacatggtgaaaccctgtctctactaaaaataacaaaaattagccaggcatgatggcgcatgcctatagtcccaactacttggtaggctgaggcaggagaatcactcaaacctgggaggtggaggttgcagtgagccaagatctcgctactgcaccccagcctgggcaacagtgactttctgtctcaagaaaagagaaaaaaaaaaaaaaaaagagggaggactaactagggagactcatgtaactaggtagactcacagttcagatactgaattgtgaagcagtatctggcagcataggaccaagcactcagtggagaagttgagggaataaatcaaagaagtcagagaatggagatcactagggggtctgagggttcctgaaggattcttgggggaagagggtcttcatagggaaagcttctacctggacaacttcctgcataacctgctcccctaaaccctagctgctcttcccactgacagcttcctcctgcatccctggttctggccctgagttctctcctcccttgatttcatgtcttctcctccctttgagattagaaacccagactctaggaatctccactgatttggcagtccagtgacaatgcatgggcagggccacaggaggttacctcattcacccccacctctccccatcattccttacagggaaatctagggaggcccaggctaccccaccacctcctctggctcagacaaacctgttgctgacctgtcagtttctgtctagccctgccatcccacacttcagaaggcattgtttattctcttattctcatgtgctcattcctcagacaactacttgggtttgggagaaagatacttaacacctttccatcctacctctttaagaaagggactgtgtgccaaagaccttcccacatgtatgaagaaggggctcttgggagaatgtgaattcccccaggattcctttgaatccttttgcaggtatttccttcccctgtcctcagcaagcattgatgagccccagtcctgtagaggttgaatcaactccttgagtctaggaaaagatggcttctgaggccagaggttgggcagtgtacctacagcaccatttcttgggagcttgttgggatatcacatacttagagtggcaaggtcttgtggctgaatctattgatagtccagtgctacattgccagctcccttgtcattaccaccccctctacacgtgctccataggcaggagctgttactatggaaatacattatttttaaaaacagacacacagcctgggcttgggaatctccagaacaaacctacacgagcaaggaggttaatggggctgtttctgggtccaagctccaagaggaaggagggtgatgatggtggggggaattcaaattcggtgttctactctcaacctctcccagcttcaggttctgctttctctctgttgacatcagctggacctctgccagacacttctatctgggagggacgctctgcgtctccttaccctgggcctagcttcccccaggaaatgggaagctagaagtcgctgagtctgggggtgttgggagaagggggcggtgatttccacaggggtcacctccttcttaacctcacaggcgtccgacctgtggaaatctaacaagcataggggaaagcaaaggcagcatcttaggtaagtgaagttactcttgccttgagctgagtgtgggagcaccgcgattgcaagatggggcgaggtgatcaaagatcccgcctattttcaaccccggaacctcctccgctcgctgctagccctcccgccctcctccagcgagggagcgccaggctgtcctggccccgcccggcgcgggtgcggctcctttaagggcgggtgggggcggggcgccggcggtgttgtcagtgtcagctctgcgcacgcagccctcccggagccggtgccggcccgcgagccccagcgtctctgcagaccagtcccctccagggtccggcggggcccgcgcggtgggaggagtcgggcactggccggcgactaacgggtccgactgctgaccaagctaggagagacccggaccacggagacagagaccccggcatcgcgacccccgaggacctcctctcctcgccctgtggcacccactagtcctgggcactcagccgcggagagcccccgaccccgcgcgcccagccccgggggagcccacctcctccccgcggcccgcccgggccatgctcccccggggcagcgggtgagccccagccgggaccgggatcggagcccgcgcggagcatggatccgggctgggggcagcgggacgtgggctgggcggccttgctgatcctcttcgccgcctcgctgctcacggtgttcgcctggctgctgcaatatgcccggggcttgtggctggcgcgggccc

SEQ ID NO: 5440 - DNA, 6000 bp, Homo sapiens
gcctccggcagccctgcttccctggccttgctgggctcattccatgcagcagctctcaccggttggagtctcatgcttgcagctcccccaggttgctgttgcacactggtagctctgcagttctggggtgtcaggatggccttactcccacagctccactaggcttcctggggactctcagcagctcagactccacagttctgctgggcattgccctacaggggctccctggtggtggctctgaccctgcaaccagtctctgcctgggtcccgagtctgtccgcaatatcctttgaaatctagttggagggagccaggcccatagcccctgcattctgtactctggtggcattaggaccatgtgggatgccaccaagactcaccacttgcaccttctagaatggtaggtcaagctgcacctgggcccatttaagccatggctggggaggcagaggagcactgtgcccaaatgtgggagcagagacttgaggtggccctggacagtgagccacaggtcctgagggctcccaagacctggcttttgacatagttccttccctcagattttggcactgccggagctgtgatcacaggtcatctctgcagtacctttgggatcattcttattttcttgatgaatagcctctggcttcattcttattgtactaatctccttatcaaactgtggctctggccaatactaatctccttatcaagtggtccatactaatattcttattaaactatcaaacggtaacatgcctgcacccttgctttcctctcctgaaagttctttcattctctactacagggccggtctcagaatccttccagtctctaagttctgtttcgcttttcattataaatttctttctttctttccttctttttttttttttttttttttgagatggagtctcactctgttgcccaggctggagttcagtggcacgatctcagtttactgcaacttctgtctcctgggttcaaaccattctcctgccttagcctccctaatagctgggatttcaggtgtgtgccaccacacccagctaatttttttgtatttttagtagagatggggtttcatcatgtcagccaggctggtctcgaactcctgacctcaaatgatccgcccgcctcagcctcccaaagtgctaggattacagacgtgagctactgcgcccaaccctgcttttatttataagtttcatctttaaattatttatttcttctcaagttttacagtatacagttaaaataagtcatacagcaaccaaaatgctttgctgcttaggtatttcttccaccaaatagcctagtttatcactcttaagttctgcctgctatacagtttgaggacctggacacaatgtagccacattctttgctgctttgtaacaaggatgactgttatgccagtttccagtaccttaatcttcagatatatctgagacctcatcagaatggccttcacgatcgatatttctaccaccattctgatcacaaccacttagtctaagaagtttcagactttccctacagatcttctaatcccgctttattgcctgcctgcctccctccctcccttccttctttcctctctgctctctctctcttttcttcctttccctcccctcccctgctttcctctcccctctccacttcttggcaccaattttctgtcttagtccattttgtgctgctgtaacagaataccacagattgagtatattataatgaatagaattttatttggctcatggttctggaggctgggaagtccaagatcaaggggctgctctggcaagggccttcttgctgcatcatcccatggtggagagtggaatggcaagacagatcaagaggggacctaactggccttttataaggaacccagttccacagtaatggcattaacccatccatgagagcagagccccatgatctaaacaccttttattaggccctgcttatactgttgcactggggatcaagttgcagcacttggacttcgggcaacacattcaaaccatagcaggcaccttaataaaggtggaaaagggatgtggcagctacagtgggagggaaaaggtggctcccttagtgtgcttgggaggagggtaagagatgcgtttgcagttctcatggccgcagactgaaggggcctggttacctaagggaccttggcttcatgtaaggagtgcggagtgagtgaagcaagagggtgatttgatccatatcatttcttagaaggataccatgttggcagtttcgaagaaggggcatgagtgaggaaacagttgtggtgaagagaccagttaggaagcctgtaacttggggtgggatctggaaccaggctgtggctccggaagaggagctggagggctgcactgtgaagtatttctcagagtctagacaatgtgaccttcacactggggctgagttttgtaaaatccgacatccccagtttcacctatgatgccaggcctgtggtaaggagctttgcaagcatttgctagaatatgagcaaatggaggtagaactgataatatttagtaaccatggggggatgaaagagggaggtgttgggagactgggttgataatatgggggttgggagtgaggagagagtccagctttgaacatcttcttccatttgaggaatttaagatcatccagctagaaaattagaaatactaggatggagtgtggaagagaaattagtgctgaaaataaagagctcgaatcatcagtgtatgaatagtagttaaacctctgaaaatgagtgaacttgtcccctgaaaatgtgtggcaggggagaagcgaggttcaaggacagtgcccccgagaatgccagcatttaaagggtggaccctcggtggctcacgcctgtaatcccagcactttgggaggctgaggtgggcggatcgcttgaggtcaggagtttgaaaccagcttggccaacatggtgaaaccccgtctctactaaacatacaaaaattagccaggcatggtggtgggtgcctgtatcccagctactagggaggcacaagaatcacttgaacctacaaggcagaggttccagtgggttcgtgccacttcactccagcctgggtgacagagggagactccctctcagaaaaaaaaaaagaagaagaagaaaaaaaaaaaggtgggccccggcagcagagcctactgtcccggaggcaggaggaaaacctgaagggaatcttgaccttgacctagaagccaaggaggaggcatggccaacaacatcaaaggcctctgagcagcgcagtgaagactgacaatagacctttcttaagtttggcaattagaaggtcattggcctcagcaagagcaatttcagaataaaaacaagagtggagggagtggcataggggtcgggggacagagtaggaagtgagggtgtagtagaggggaagaagtttgatcactgagggaaggagggagatgcaggggtagcttgaggaggagatagagcagagagaggtttgctgtttattttaggaagaggagacttgagcatgtttataagtcagagaatagagaaggagaggtgggagacacagggaaaagaggagtcattgattgggaactattctgggaaggtgaggtggatctggtgtctaggtggaaggatttgggggaaagaggggaggtaggagagtctagacgtagacagcaggcagacaggggctccaggttttccctacagaactgaggacagtgatggccgagcgtggtggctcatgcctgcaatcccagcactttgggatgccaaggtaggtggatcacttgaggccaggagttggacaccagcatgggcaacatggagaaaccccatctctactaaaaatacaaaaattagccgggcatggtgacacatgcctgtagtcccagctactcaggaggctgaggcacgagaatcatttgaacctgggaggtggaggttgccgtaagctgatggcaccactgcactttagcctgggcgatagagcaagactgtctgaaaaaaaaaaaaaaaaaagaagaagaagaagaactgaggacagtaagagtaagtggtcgcttgtgatcacagaaccagcaagtaaaccgcgagcttctgcccctctggtcttcccagaccccttccccggaacattaagccatatcgcttttatgggtccaggggctctgaggggctgggcatcatactgtgcccctgggggcatatctagttctgccccacttggttgggcgggtacctgctgagtactcactgtgtgttaggctgtgaatgctggggcagcaggaggcatggtttctgcctccactgggccttatttcttcaccttgtcccccagttctgcccttgggtaagttctgtggcagaactgaccagctcccttcggccagggacatcttggttcctggcagagcaccaagaagagcagattgtcttcctacccgggggcacctttgcccagcaggtcgggtgagctggcctcttggtgagaggctggtccccttggacatgagtggattcgatgcctgctttcccacccaggtactctactgtggctttgctcctgccctttatgctcagagctagaccagcaatgtgggggagctgctggggaaaggcgccatgttgtcttgaggtagcagccagccccggaagccctggaatgcctggggccactgagcaatcctcaccctcagccccacaaggggagggcgtggctcgtgaaattcctgattgggtatagcccagcaagccccaagactcgcccagtttgcttagcgcaacactgacgctgttttggaatgaagacaagacaatgtagaactttactggggaagaggtcgaagaagggctaattgtcttgttgttcaagactggttagcgctgctcacctctgacgctgctcacctctgacgccaaaggtttttccctggaaggcagccctggaggatacctgtgtatctgtctttcacaaaaggtgaaatgagctctttgtagtgtttcccgcccaggctgcattttagaatcacagaggaggtacggcgctgatttgttttactattccctattcatgcctgggccccacccctaaccaattaaataaacatctcggagagtggggcctagactttatatgtttaagctcctcaggtcattgcattgtgcagccaatgctgtgacctatgaatacaaaggaagatgaaacgcaccctggtcatgcaaggaagatggagagagggagcagggagggtgagagaggctgcagttcgtaaggtcctgaaatgttagagctggagggatcctggttcggagcactgcaactcaaaagagtagttctagccatgcagcaggccccattagggagctggttagaatgcaaatccccgcctgccctgcaccccatctggcaccctctgagtcacggcgtgcacatcgaggtttgagaagtgtgctttcaggtcacccacagatcatccagaccagtggttctcaaccttggctgcactttagaatcacccagcgggcttcagcgaattccagtgctgggctagatgaattaacccagaatttctaggtgttgggacccaaatactcatttaaaaaattttttttgtttaagtacttcaggtgagtctcttcttcagccataatcaagaatatcaggcttgaccagtgcttctcaaacttggacagatagatgaatcgccagggtatcgtgtttaaatgcagattctgattttataggtctggaaggggccaaagaatccacttgtctgggctctgggatgcccatgggactgatctggccttttttgagcagtgggaataggctgacttctcagtttgacagcaaggaaactgcaggtcagagagggaggtgtgatcgtccacggtaaccaacctgatatgcattcagtactttctgatgtactctactgtgtgccaagcagcatgctacatgtggg

SEQ ID NO: 5441 - DNA, 6000 bp, Homo sapiens
aagatcttccaaggtcccttctgaatgtatcattctgtgatgttacgagtccagggtcttattatgacccaaaacttagataaaaaggaaagactctgccccaaagacccctggctctcaggctgtcccctttgggcacctgcctttcgctgcgtcggcactttgattttggcttgttcatcctgctccccctgacttttctgtctacctccgattgttctatccaccatcgctctgctttatgcatctcttataaagttttatgggtttaaagtccatagatagcctcacctttgccattccttcatatcctccttctcagttctctctatttgtgacctcttttctctccctggagccctcttccccttttcaagttgcacctttgctctttctgctgaaatcctaacatgttggactatagcccagatgaaccacgattttattttgatcctgtattcatagaggagcaaaaaatagcatatatttttccagttcccagcccttccctactgccctagaggcatctctttatccagatttacacatccttttctgattaaatcttccaatatctatttgatgtcacaccactctctaatggccctgcatttcccatcttctcgcctgcactcctatgtgagatctccaccaggagaggggagcctttagcctttttcgacgaggagaagcagagctggcatttgttaagctagtgctcctcttttcgtctcttgtgtgtgtggaatagtgatagctctttagctggccccagcttgctctgggtaacatggagtaaaacaaaaacaacagctaatttctctttcattgggagttcttctctgttccagccctgcttcagtgtacagatgccagggttgcctgaagtctccatctactgcttcctcacctgcctgccaaccatccagagtacacatggcaggctcttctctcctccctcctttgcagtcccaggattattaaagggaatatgattgtttccttttgctcagggagtgtgtatgtgtgtacatgtttgtgagcttgaaaggcattgtcctatagatattttttataacctgaagcaattacagctgtcagcacagagacaagctgtgacaagttgatttatgtgtacagtatatgtgtatgcacgaaggaagggaagaaggagacggagatggtgggaaagagggtggaggtgggcgctcgttaggaatcggctttcaaggaggcagaaaggaagttgtttctataaagaacacaaataatgaaattgctttgaatgtcatcccttttcattaactcggatatgctgggaaaaataaaataaatccagcagtttttatgaagcaggagacaggatataagataagccactaagtgttggtcatatttagggattaagggctgggaagtgagttgacatatgattttgatcttcatcttttcaaaccacttcaatagccggtttgaataaaatggattttgtcttgttaattatgtgggcatctctgacctttcaccactttctaaacttctatgtttgaataaagtttggatccctgcgcccacgaagcaggtatgaggttgcaagtgccttttctttgccctccctgtgagttacctgagcttggctgggttttctgctgcaactgctggattgctaagcttagtgctttcccttcacgggcagagacaaagatggtttgattgtcttagatcaactgcatgcagactggtagaaaccaaacatctcaaagagcctgtaagaagaattattttcttgcccagacatactaatgaagcaatggcaggcaaatgtattaataaagcatcttccatcttaaatggatttctaagtattttcctgtagagttaatcatatatgtaggcccctcgggaaagcctgttgttgtcattatccatatccctagatgcaaaaactaatgctcctttgtacctacctgaaaattagatgcaagagccaggattagcatttatcatgaatcatccctgccattctcaggcctctagggaaatgactgcaaagctcagaatgagcccctctcctttccccatgactagcatttgtttccacttgttgtagtgaggatgtgtttaagaagaggggttgagagggaggagcataagggatggttgaaatgaatggatgaattattagaggtgaccccttgacttgtggagacgaagcccaaattcagcagactgaaagtcagcaaacatatctcacagctttagtatatcatcatatttatcttaacgtggtgaagtttttcaatttcctgtttccacaattgcccgttggaaaatggagacacaatagaatcttccaagaatggactagtgctaaagtaggttaattttcctcctttcctttcaaaaatacaaacaaagatcttctgctccccgcagatgtaattgtttattcctgatagtaaagtcatttgttgcagccataagttgacgattgatagttttggtgttatatatcaaatgatccccagtggccaaaagtagcagatgagtttccctgagaatttaatatcagaaaagtcaccggaggagaggagggaacaattggcccaatgatgagttaatgcaaagtattttgagatattcactgtaaagtcgcttcactcttgctggctaagcacgtcctagtcaactatgacaatggaaaggcaagccgtcttagtctttctttgttacccaggagtgtggtttccacttctccaaagcctacttctgtcctatctctatagttagtgtgagggagatttgattggtgaaatgtttgtgtcctctccaacgtggtatctacatgtaagtgattggtactgctcgaaggttgccagaatgagtattgtaccgaagcccttatggttatatgactcagttataatggttcagtctctttgataccggatggctttttggaagaccatttttctgttatttaacagttgttaacaacaacaacaacaaaaagcttcctggttgtgtttgatagagtctaggggaaaaacaaagccactgttgcctcctctccatccccaaggagaatgtgggtcagggctggaggccggctctgggaatccctgagaagggagcattattaatgtcaccaccactgtgcctgctgagctgctctgtgcttcccccttgcacaagaaccaggcccagccagggaaaggaaacgcaggccattccctcagagccgaagttaagggagaaataataatacaggcacaggaggaccagcagcagccagagaggagaagtgacagggaccgaggcaaatccagtctctccccgggtttcaagaatttgagaaacacacctcttaaagatgaaatcagctgtgcgagagtgtgaggcccaggaaacctgggagtctgctgtataaatacagcaagtggctcacactcatccacccaagtgagcacttttgcaggcccagcatcttttaatggcgacaaaacaagaataaagaatgtaagtgggtgtctgaacttgaccaacattttgatgatgcgatttttccagtttcgcacactaagaggcttctgtgattttggatttgttttatatatggcagatctctagaatggtagtgttgagtctctggggttttgagcagctttgtggggggctgctgggcgggtgctgtactactgaataactatgaggttcttctaaaacatcctccgaacactctgagtttactctgaatgctaatgggattaatctgatcattttaaaggtgcatgtatgcatgctgcagggtgttcctttcccagttaattagtttgtgacccttattaagatgtctcaagtctgaggctgattaaggctgcatggtaactttgtcttttttcctaatttggaagcgcgtaaatggttaaactcctggcctgggctgggctggtgcacagcctgggcccggcgcggcgggggttaaggtgggcgcccgcgccccgcgccccgcgccctcccgccgggatgagagcgcagtccgcgccgccagcccgcccgctcgctccgaggcggcaccgggagaaagtggcggtcagggatggagctgctgccatgacaaccccggcggtcggggcccgcgcgcgtcggggctgctcccgggaggaaggcggcgcggaggccgggggcggccgctgagcttggcgtccgcgcggctccggtgcgggctgcgccgcgccttccccagcgagctaccgagcttggggccgccgcggtccgctcccgccgcccggcctctccctcctcggccaccgccgcagcccctgccccgccgagccccgccggacagcggcggccgcagcgcgcatttgggctccgaggaagttgaccgaggcggctgccgcaggatcccgggcccggatcgcacgaagcccgcgcggccgtctcctccgcgcgccacccctgcgcctcccgcgagctccacttcccatctgctattgtttccgattgttttccggtggcgagcccggctccgaaacttacaaagtgttggatgtcccccgttcgaactgagggactgcagaccgcctctgggtagctggatgaagcccaccccgtccccttctggtaccaaagtgcttactcctctccaaagtgccgtgtctgaactgccgctgggaagaagcggctcctgagacgcgcccacacctttcacctgccgcgcgcttccccctcctcggccaccttcccggcggaagcagcgaggagggagccccctttggccgtcctccgtggaaccggttttccgaggctggcaaaagccgaggctggatttgggggaggaatattagactcggaggagtctgcgcgcttttctcctccccgcgcctcccggtcgccgcgggttcaccgctcagtccccgcgctcgctccgcaccccacccacttcctgtgctcgcccggggggcgtgtgccgtgcggctgccggagttcggggaagttgtggctgtcgagaatgggggtctgtgggtacctgttcctgccctggaagtgcctcgtggtcgtgtctctcaggctgctgttccttgtacccacaggagtgcccgtgcgcagcggagatgccaccttccccaaagctatggacaacgtgacggtccggcagggggagagcgccaccctcaggtagggagctgacattgttctgcgaactgatggtttgtatggggtcggggtaaggggcaggggtgcaggtgtgtgcactgaggcgtgcctgggttggcggagaggtcgctggttccctgggctgcacaatttatggctgcgctgggggctctgcccgggaatgtggcagtcgtagggaaaggctcagaggttctggcggtgagctttttcccaaaaactggcctctgcggctcaggcacttgttaaaggtgaggggtggctggaccaggtggtcgccgagattgagggacttgtgcctggcactgtctgtgcctgagcctggtggccgtggtgacagggggcttggaggggctccccgcgagcagtcttctctgaagttaatgagccccaaaggaggggtctggcttggagtgaatgcccccactcgcccatgccatagggctttgccagccctggctcctgcactctgggagagccgctgctttgtcctgggcctgactgtgcccgggctttcctggggtgccttcatgccgtgagctggtgggcagacagagatgctttctcctgtctgaacgtggctttctgaggcccaagtcatggagtctgatttgtccgtggaaaatggcatttactgtagtgaactgtgttctgttcctgctctccaccaaaacggtacatgcaaaactcgtctactgaagagaaactaggtttcagtgttgggttgggtcctgattggcttctggggttaaggcttacaggcactgggggaggagaagaagaagaatcttggttatgctttgtgtaaggtagaatgattct

SEQ ID NO: 5442 - DNA, 6000 bp, Homo sapiens
ctggctgtcttctgccattcaggtgagtgctccagtctcaggacatggatctaggctgccttggccatgaactcccttcttaagcctcagtttcagccccagctgctcctccaggcctggctttggttcttttgccttccagtgttacaggtctggggttgtatgacagctccttcctatgttatgaccttgtcctcagtggggcatcgtcctgagttacagcccgtcctgagttacagcgtggcttttggcaggggtgggtcaacaatcggcggctgaagtttcactcctgtcaccataagctgcttggggacaccaatggataccattcttagagtgctgtgcaagtccctttggggtccactctgcttagagccatctgagctcagtccttctgctctgaggctcctcctgtgttttaatgatgatgatggtcatagtgacagcagcagcagctaactaaccctgaagcatttatgtgccagtcactactctaagcattttacgtgtatttgcttatttaatcctcatgccaacctgatggagttggtggtatttttatccttgttttacaagcaacaagattgaggcctccccaaaattaataacttgtcaaataacacacagaagtggtacacgggaatgtgaacacacagtctggcaacagagtccctgctcttccctcctgctccaggccatctgtcactgggccaccccctctcctcagccacccctcccctggttgctggaggaaattgtgtgcttctgagtcaacttctataacagtggaaacacacatgcttcattgtaaagatcaagtgtggttgtctgcctgtgtcatgttggtataatatcttggccactgctggttttttgttttttataaatatggttggtggggggagcagaaaagaaagtggcaatacagtgagcaatttaaaaaaagatttccacaccactgtagcatgtcttagaatattaacagcaaccatatattcactgtttattgtttactggggactgtgccagagcctgtctcatttaaatccgtccagccattccgggaggtcggtactgttacctcccatattacagctgaggaaatgaaggcaaagtagtaacttggcgccaggacacactttaatatgttctccctttctgagcagaaagagaagtcatggcaccccttcttccccaccttccgtgattctagccagggtgcactgtaatgtggttcacctgtgttaaaacactatattttttctataattattttttatttattcatttttcttggttccttctttttttctgtctctgctgcttaagttggaatattttctagaattttaatagcccagtgacatcctacttccagcagtctgcatttgtttatggagcaagcttgggaccatcagcttctctgtgacaagtcttggggtgcacttcagccctttctcagagaattgagatgtgaagctcacatgcccacagatgagaggccttctttgctgctgcccaaaagggtctcaggaccctgcaggggaactttcctctgagctctgcctcttatggcccaggggaaacctcgtctaccctggcttagtggctaaaatatcaaaccattgtccactgacctattgcttgtttttttttgtttgtttttttcagggggatggagtctcactctgtcgcccaggctggagcgcagtggcgcgatctcggctcactgcaacctccgtgtcccaggttccagcgattctcctgcctcagtcttctgagtagctgggattacaggagcatgccactatgcctggctaatttttgtatttttttttatttactttttaatttttgtatttttagtagaggcgggctttcaccatgttggccaggctggtctggaattcctgacctcaaatgatccacctacctcagcctgccaaagtgttgggattacaggcgtgagccattgcacctggccctgttgcttgtttttgacctcagtttccaccataatctagagtttccttctcttcccactcaggtcaattagaagaacatcatggttaaccaagcttggattttagaactgacagcctgagtttgagctcagctcggtcacttagtagctgtgtggctttgaacaatttagttaacatcttagtcttagttttctcttgcaaggtggggatgaagataattgagcctagttctcttaacaatcctatgaagagcttagcacatagatgcacatatatttgaacactgaatgaacatgtttgccatgaatatttttgcccacagacgttccaaccatgggttttagcctttccttctaaagctttcttaagaggccaaatgagcccgggatctagccaccacaaaaatccatgtctacaggtaaccttttaaaatggccctcaaacatggccagtctcaagaacaacacccttcatcttagactcttttcatttcatgcgtgtgaatacatgtctggcacaaggaagggaccaaagaaaaattgcatctttgcgccttctccttgtggcttccctctcacacgggcatgacagccacaggctgacagtgggggagaacaaacaaagcctggtggatggggccctgcccacaggccccagggctgccgccagctctgctgctttgtagccaggtgtccttgtgtgagtcacatcacctctccagacatctgtcttgtcatctgcaaaaaagttggggaggaggttggtttttattttattttattttatttattttttagacatggtctcgctctgtctcccaggctggagtgcagtggtgcaagcttggctcactgcaccctccacctcccaagctcaaatgattctcatgccttagcctcctgaatagctgggattacaggcatgtaccaccatgcccggctaatctttgtatattttgtagaggcgaggtttcaccatgttggccagggtggtctcaaactcctggctacaagtgatccacccacctcggcctcccaaagtgctgggattgtaggtgtgagccgccacacctggcctagtttgttgttgttttttaaaactaatatttcaaggcattaatctgtaaccttcacaagtcagaggatcctctattgggtaggatttcacacctgtgagggcagacatggccatttcagatgctctagagaactgggttcctgtgtgtgctcagaaagtgaggacccaccttgcttccactggactttccactgaaaaatctatttccatggtgataaacctagccttcagccttagaactagaagtcagctgttgggctctaaaacccacacttggtttaaccatgacattcttttgtgagattttacgtgtttcatctttgaaaatgtcttttcacagaggtaggtacttccaaatactgattacatggtagaagtcatatggcatgaagatagtttatctctgatgatggaaaagggggtatccatacaaaccaggaagatttccttccaactcttgcttcctcagtctctccccatcacacgtgtggactgtaactcatctttttgttgtcactgttgttacaaaaatggagaaggaaaaataacccagcaaaaactgacagctagcaaggatgagtcttaagaattgactgggagcaataattgtttttcaaactagggaactggaggcaatttgcttctgatgtaagatgaccctcacgttgtgtctgctggtacccagctgtcctatgcccatgggtttaaagtgcacagctgttgtcttgtctttgacagtgtgtactcctggcattcggtcagtcccttagaagggagtagttcagtaatgataccctgtcccagaggttaccaaactttttctgtacaggaccagatagcaatttttttttttttttaaacagagttttgctctgtcacccaagctggagtgcagtggtgcaattgtggctcactgcaacctctgcctcctgggttcaagcgattctcctgcctcagcctcccaagtagctgggattataggtgtgcaccaccatgcctggctaatttttttatttttagtagagatggggtttcgctatgttggccaggctggtgtcaaactcctgacctcaggtgatccaccctcctcggcttccctaagtgctgggattacaggcgtgagccactgcgcctggcccagatagtaaatattttaagctttgcagaccaagaggcaaaatcaagggtattatgagacttacctcaataataagaaacaaaattttcacagatttttttattgacaaaattcataacataattattgagtccagcataataatacacatctactaatgaggggaatagaattctttttagggggataaccatttgcttaattggggttcaaaattagtgttccctcgcatcaaatcaattgcagatgttcatctattaatactaatctgtgatgacattttacatatttcattttgaaaatgtattttcacgcagataggtattgccagacattgatcatcaacccacgaggatgtgatttaattgggcatattcattgcttggaagacacttatagaattctgtttgtttctcggtaatttcttcttaacacatcattacattgcagactaatctccttccagttgcaggttaggaggaagcttctcaattgcacagttagatggatattcaaatgtggatatttcctttgtgcttgcatcagggtccaaaaaatgttgctggaactgtagtttgaatttggaaagatataactgctatacatttgtgcgggagtggaagtataccacaagttgctgactttgggcccatattaatggagatggtgggctgccaggggacaagtcagtgctgctttaagagatcctgactttcttcctgattctaggtcatagcctgcagtgctacaactgtcctaacccaactgctgactgcaaaacagccgtcaattgttcatctgattttgatgcgtgtctcattaccaaagctggtaagagcctcccctgtctgtctcctaaatgtaatggggtaataagtgcctgggaaaaaaattgtgccactgtaatcctcattaggcttgcatcaagtaatagctaccatttattagcgtcaggtgtgtattgggctaagcactttcttcatacattttaaatttaatgttttgcacttctaagggtgatcttttatttccatttgataaatgtggaaatggaggttcagattaagcaagaaattatggttaagtaaccgactcaggaattgaacatggaagtccatctgattccaaagcttgtgctcttttacagcagccctgtgctgcctcccagaccttggagaacctactgtgtgcccagcagagggttaggagctagggatgcaaagataaagaaaggacacatacaattaaaattatgacaaaggcctgtttggctgtcctaaatgtcattatatatgcctctgtctcattccatggggtatctggtatattcagagtcctgaggagactcaagctgagctcaaaggacacgtaggaggtaagagggctaagaagggaagggtgtgcctgggaggggcaacagcaggtgccagggctcggtagcctcagagcaaggtgctcatgaatttggggatgggcaatgctaacatgcacaagtcctgtccagtctgcattttccaaatttgttagactacagaatattcacctccatcaccctgttaaaatagagtttaggaagtggtagacagaggaaagaaaccagcaaagacatgccctctgttcttgctggggtgtggttctggatagaatcgatgtgtgcaaatgatgccagcgaggaatggcagtttcagaatgttcttagtgtccaaggtaaaaccctcaggcttagatttctaagagattaataataaaaacactccacaaggttatttgtactcttagaccttctacaccagctccccc

SEQ ID NO: 5443 - DNA, 6000 bp, Homo sapiens
cagcctaaagattgtgatttgccagtctctagtctctgtcttccaaggttgagagaggtgggaggtctctgaaatcatccctgttagagtgtctgtcctcttacagtgcgagagaaggaacgtttctcagggtttcagctcacacgaaaacacagcaggattcttttcactgcagcgggatatgtatataggtgaatcctgtggtgtgggctcacaggcccaggtgctgagaatagcaactagcaactattttctacagtgtggagggctcgtgccctgctggtttttttgatacacaggtagagaatgaatagaagaggggagggtggtgggggggggtgggaggcagctcagtggggctgctgaaccttgggaagagtgtgagtgtgaacgtgtgtaaatgtgcgtgtgaaagggagcaccccttcccgacttctagaaacaaaattccttttggggcgctttccctgtgtgtccccagagaggcctctagccaggagccttcagttgggatagtttcatttgtgactttaccaataccctcccagttcttgatagacagctgtaggttgctgggttcaagaatatgggtgggatatggaatgctctttcaatgtctagcttcagttttcattcatcctcctgctcagcactgtcagccaagagcttactcagcagacaccacatactgcagcagttcctagtgagaaaatctgtgccactagaaaatgcttcacttccatttcctcacctgggcagttctctgtttaaaattgtgggctgatttggtcttcctctcctcctcccactgttactgccctgcagcccttgttcaggtgtacagacccttattctggcctctagtgtccttgtctgtcatgacacacccttccgcccaaatacctctgaccccaaggctggaatggggctggtaggagataagtttgcttactcatagtcatgtcctttctcttggcacctgcttccctgcggtgtcctcaaatggatttctgtgtggcagtggagtgattgcatgaatttttctgtaacacattaactttgtattattattaagggagtttgagaaagctttgcttataatgtcaaggcaaggaggtaaaaactggagcccaaagaaattcccttagggcaagattatgttataatagaaaattgaatttcctgaggcagtggctgccaccccttttcagatgtttagtcctgcaaatagcatctttcttgtagtctgtgacatggatggggatgctagggcccttaggggcaaggggactaaactaaatcaagttgagtttttttccagcaggggttaggggaggtactcgctgttgatatttgacactagaaagtaatcttttttacaaaactgtttttctaggtgggtggaaagtgaaactgccacatccttgttggtttagtccaagagatcatttgcaacaacagtagatgtccgggttttgtttctgtctttttattatgaaaaactatgttaagggggaaaatgtggattatggtaaccagaggaatccctagccttgttttccttagaagacttgtttagtgttttatcagacgtctgttgtagttgtagacaggaaagcttgtgagaaaaacaccacatggagcctgtaaatgtttttgcacaacctgtaaagcattcttggaagtggccagtaaaaaggggttttaccatttaaaaaaaaaatgtaactgtgtcattgtttacatctgtaactttttcctcccctgttctcattacaccattctggcgaaaatgtaggcaaagtagcttccagttttagaataaataaccatttggattgaattcaccctatctcctgtggctgcactgactggggcggagggtgtcactgggttatttattcattttttaatgcctctttctcaggtcgcatgggctccaaccaaggaggactctcctcttgcatggtggctgccgttccctccctattctaccatgccttcacttgggagccagccatgcagtcagttgacatgggtgggtagttattagtctatttagtgcttgcttaggccaagagtcgagccattgaagtataggaaaataaattataactcacgacctctgtatttggcctatgcaaaaactagttggatgcttgaagttaaatgtacattgtggagccaaataagtatattcatgaataattactgctagggggaaagcccactcattcaacagaagtttgatgggggttattttccagtgaatctggagaacgagacggtaaattaaatttacaacagcgccattgcttttttattttttatttttatttttattttttttttttgacagagcctcgctctgttacccaggctggagtgcagtggcacgctctcggctcactgcaacttccgcctcctgggttcgagcgatttttctgcttcagcctcccgagtagctgggactacacatgtgtgccaccaggcccagctaattttttttttttttttttcctagtagagacagggtttcaccatattggccaggctggtcttgaactcctgacctcgtgatctgcctgcctcagcctcccaaagtgctgggattacaggtgtgagcctccgctcccagccaccattgcattattagcactgaaatgatcctaacggcagtttctaataaatggtcagggtcttaaagctgagataccacaggctcatgacatccagtgttctgaaggagtagtagtattgatgtagatactgctctaattcctaccctctgtatgtgacacggattcagatacccgggtttacagttttgtaccctgaaggccacccttaattttggtagccatctattctttaggacatttaagttgctgttagagctaattaatcattttttaaagtggttaatcatagctcatgcctggtctctagttactgcttaaaccccattttcccacctagcgctgtagccacgcagttataatctgatgggtaggaacattgagtgtgcagaaaaattgaagagaggcgctttgttttgtttcgttttgttttgagacggagtttcgctcttgttgcccaggctggagtgcagtggcacaatctcggctcaccgcaacctctgcctcccgggttcaagtgattctcctacctcagcctcccaagtagctgggattacaggtacccgccaccacaccggctaatttttgtatttttagtagagacagttttcaccgggttggccaggctggtctcgaactcctgacctcagatgatccgcccgcctcggcctcccaaagtgctgggattacaggcatgagccaccacgcccggccggccaaaaagaggctttcttaaaaatcaaggttacatttattaaacactctaattttttttttttttatttaaccatgtctgagctgttgtggaaaatttcacttactcccctggaacttgcccaacaccgtgatacagtgggggtgagggaggcaaggtgcttggtccctgccatgccacatttgccatttaagcatgtacagtacaatctattcattgggtatttgggtgcctgatatgtgccattatcaggatacagggattaaaacggacctgacctgattgatccttcctggaattttcaccgtgccaagaaggaactgaggctcctccgcaacagaatgggggtagggtcccactccaggagggcaaacttctcccgtttcttcatctctaggatgagggaattaattagaagatctccaggacttcttagagctcagaagttccatcaacagtaaaaagttgcttgggacaccttaaggtgacccaagttcactgggtgtccctggaattcatgaagatatccttaggaggctaagttcagttgctggtgataacaacctttcttcctttggtttcctttatccactttgctgtcttctgtgcaaagatacctggaagctggaggtaatgagctgtccctactatttcaaagcagcctcccttcccgaagtatatccaggcacaaaacaggagccagcctaggcttttcctggggaggatgcgtccctgagtttaggggacctctagcaggagcacacgtactgggattgttacgttctttgtcttgtccctggtcccatctcgcctctgtgcacccttggaaggaaaagattctaggaggcattctggtgttcgtaaacctccgccatgtttgagtcctggagatgaccatgacatgttaagccttaagtttggtccctgcccagacagcatgctggacttttgcaaggcacattaggggtgcggccactgctttctggctgctgtggctgaatcggcctgaggggaaaatgaaagcaaaaacaagccccagttctactaggaaacccaaactgagcaacttcaggcttatccagctcctgggaagaccaggaagcaactgaggagcggtgcaccgagacggacagggtcgggggttaaccccctgccgctaatatttccgctccaaagggagcctctcctttcttggcaaaatgtagaaacctagattccctcgcaagatccacgcgaccagcgtcggccacgctgtacttcctggggtccccttgtttagtgattcttcgttatggccgcccgtgtgccttcgactcaatcgggaggacaccgaaatccagatttcggggttgcagggcgcgggccccggcttggttagggcaggggcagccattttgagaccagaagagggcggaagggaccatattgagaacgccggttgcctgggggccgccattttaagagaagccctgtacggtaaactccgtgacgtgggggctgccatgttggtacggccatcttggaatgggagtggctgtgggcgcagccatcttaggtataaaatcggctccagtcgcggtaactgaagccaagctccgcccctaccctcctaagagttcctctgctgtacgactgcactcccgcaccctcccctaaatcccccctcttcggcctgtttaccttttaacttggcttcgttgcacgtttgtgtgtgtgtgtttgctcttcgcagcctcttgagcgtcttttgtacttaattcttacactgtggacgctctctcgcgcccgccatcccccgacccctctgatctccgatccttgacgatgtctagcctgcattgattggcccttttccctgggtatggcagatctattgcttgatgatcctctccccccaagaattctaacacaggagctgtcctgaggctctggatgactttattcttcaaatggctttaccctcccagtagctccaggtgagactgagagcaagaacctggcccatccctctccattgtctgagcaggtcaccgagggaagcgggcaggacgcgctggcagagtctgacggggccctgctgtgggtggagcaaagggtgcctcatatctctggggtgcttggggtcggccacaaaggtggtaggaaatggggtcgacagataggtgagggtgggccttgtgcttcagataacctcacatggtcaggcaagggttagggatgggatgcaaggagcctaaggggctcacaacaattactgacctaaggaagggcccaggagagggaaaagggaggagttgtgagaagggacaggggagctcagaggagagcacagaagaacttcttctcccggaaggggttctccgaagtgggcacaggggtgatgaggggatcctcacaggcgtgggcatcacagtaagtcatcaggtctgctgctgccttggacacctgggacacagccaggaagggtattgttagccaggacctctgaaggggactgcagcctccctccccaaatgggttctcttttgccatctccagggctccttacgacttgtcttctccctcatcccccccagaggcctggggacagctctctctacagagccccagactcctcccctgacctcagggagtgaaggaaagaac

SEQ ID NO: 5444 - DNA, 6000 bp, Homo sapiens
ttgttcaactcccacttatgagtgagaacatgtggtatttggttttctgttcctgtgttactttgctaagaatgatggtttccaccttcatccatgtccctgcatgaattcatcctttttatggatgtatagtattctatggtgtataaaggaccccttcaaggagaaaaacaaaccactgctcaaggaaataagagaacacaaacaaatggaaaaacattccatggtcatggacaggaagaatcaatatcgtgaaaatggccatactgcccaaagtaatttatagattcaatgctatccccatcaagctatcattgactttcttcacagaatcagaaaaaaactactttaaatttcatatagaatgaaaaaagagcctgtatagccgagaaaatcccagccaaaaagaacaaagctggaggcatcacattacctgatttcaaactatactataagactacagtaaccaaaacagcatggtactggtaccaaaacagatatatagaccaatgggacagaacacaggcctcagaaataacaccacacatctacaaccttctgatctttgacaaacctgacaaaaacaagcaatggggaaaggatcccctatttaataaatggtgttgggaaaactggctagccatatacagaaaactgaaactggacccctttcttacacctgagatttatttattcatagatatgtgtccccagctatatagggctctttgagaaaaagattgtactttattcatttataggcccttaaggtttgacatgtagtaatactcaatacatttttgtggaaaagcattgtttacattttcagtcacacaagtactaatgagaatatgttatgtagatgagtcacatgatacatatatacttagagcaaaatataactgttttaatcttcccctttctactagtttgtatagaagtaactaatatcaagatcttggcattcctctgaattgaagttaaatattatgtacatattctttaccaaaatattctacgtactatatattccacccttttgtttaataatcagctaatcgcttggagaacccaaggtacgaggatcacttgaggccaggagttcaagaccagcctgggcaatatagcaagacctcatctctagaaagagaaaaaatttaaaaattagccaagcatgatggtatgtgcctactgtcctacctaccctggaggctgagggaggaagattacttgagcccaggagttcaaggctgcagtgagctatgatcgtaacactgcactccatcctgggtgacagaacaaggtcttgtctcaaaatagtaataataataataataataataatttactaacatcagacattagccaaaggactatcaaatatacatatcaaatatgcaaacaaaccaatcaaaatctttgtacaattaattttttacattaacttacttatgtctcaatagttattttgtttggtctatattcaacactgaaattacatagcttttcaggccaccagatattaattccttggattgaattttggctctgtttttaaaaataattatctctgatataaatagattatttttaaacaaaaatcattcatgtgctaggcagaaaatgtatgatagttaatggcttgatttaaacattgtatttaccttgagaattcagaggaggctcacatagtgtgtgtgttgaggcatgaacccaaagctgcttaaatggattactgttgcatctcaaactcagctgcactggtaggtttccgtcataggagaggctttaaaaataaaattataaaggaaaaggtctgtccaggtactgattatatacagatggaaaatgtctgaaaaatttgttttacttatacagcagagctgcaaatgttatttatctcaatcagcagagcaatggttagagactagtaggattaactgtaggaagctgccacctttacagcagacacatctgcccacagagagccagggaagatggttgtataaatatggcaatgacttcattcagttgacattatatccatctttcaagcaacttttgctactgagaattttatggccattcttctattgagtcttctggtctttctcagtttgtggatttttctattttgtcatagatgcatttgacaaatatattttgagtatctactgtttactgagcatttgcataacatgaacacgagtcctaactgcactgtgttttctacctccaactgcctatttaagaaacaatagttattactgtcataagttaaatcttagctggcagggccaatttattttataaggatcttgtactataaaaaaatttataaagcctcttggtcaggtgtgtaaaaaaggtcactaaaggttcaacataaaggcaaaaccagtaaacaaattgatcaaacatcaaagatctctccaagccttagttttagtgatccatgaagttttaactcatgaagagaatgcaaaaattatagaaagatataaaaaattataatgtcagtcccatcagagtaaattaacatcctttgattctctctatgatatcagtggtttgaaagttcaaggcattttgtctcacctctttattgtctgattctgtctaaggtgttaaaaacaaaattttctaatcattaacttagggatgattgtttatccccgttctttttatctactttagtcttttagttgaatacacttttaactacaacatggcttggaacaacttgtgtgcagaaataataaatacctttacatcacagcaatattagagtaagctacggtcctgctgagtagctctttgaaaactaagcaggagttaccatgtatatttattcgttggatttctgtggcacttttcctccagagagtacagggtataatatggataaatttgcacaggggttgccttagagtgtcaaaaggaaattaaaggaaaggagtgcttgtaggagcatagagcaaaagaaatagctaatggaaaaaccaaaccctggttggcagcaaggcatgtcaaaggaggtagaagaagctgggctaccccaggggtaccactgttgactttttgggacactgaatcatttcaccacagcctatgtatccggtgagcactcgagatttctgttcaatatcatttgaagacccacaataatgatcatagactcatagggcaggaaaggaactttaaaaatatctgcccaattctcttaatttacagatgaggcacatcgaacccagagaaaacaaataaataaattagaagcaaagtcagggtcagaaacaagatcattcattccttgaataaacgtagattaaatgtgttgtgctaagcactgttctaggcacaggagttaccttagtgtgagtaacatgaacatgggttctgactaccaatgtcctgtcttacactgtcttgttctacctccaattgcctatgagggtattcaacatcctttacaatatacttttgttgttgttgttgttgttgattccacagatgaaactctcttaagggatagacctcaagtgactttgttaagagaaggaagttcttttccaagtgtctgcaagtgtgttgacattctttgattcttcattgctcatagggcacttctgtcagatcagctggaaaacatttactatattgagtctagtttgtgtgccactggaaggcaggctttccttgccatcatgagcagtttatttttgtcctctggtaggactggcaaagggctaaaaccttatctctcattggaagaaacagttgtctcttagcattgaccttatcttaaaggtgcctcacataatagtctaaactctaataagataatggaagtagttaatgttagaatcaaatgtgaaaattcttcaaaggagcatgatttaaaagctgccataaatctacctccccaaaggtgatatttcagtcatccactgaacactggatgtcactacaagaaaacctgggtttttttattttttattttttattttttttaaaaagagtagtttgctctttttagtttaacactcgatttgaacccctgtccatcctccagtaactatgtcaaaaaatcgtcctgtaatagaggcctcagttcttttacaggtacaactaatgacttctaaaactacggaccttcactcaggcatttgggaggagacttcatcctgctcactttgcccttggtcccaggccattctctaaagaaataaagtgtttaccttgtaagttgtggataaggctggctggtgggcagagaagtgatattccttggaccaaatggagctggggaggagaaaagagaaggatgcttgtgtttccagtcaccctaacagccctgatagtcctcttagtcctcttggaggatatgagtgggattgggttccagggacacctgtttgtgcctgcaggggcagattcatggtggttctgcctctccccttgcctggcagctctcttccccatgcctggcaattcctgtattggctgatttacctgcgaggctgtatgtggatctgtctttatgtggccactgccgccagcacgtactgtcaagatagagggaagccaaagcgaggattgtaactgcccaagcctagagagggaggtgagctgcctccggacttgactgcagcttcccttcctcctgacacacatggagtttggtggcgacggtgccggtgccgaagaactgcagacaaatacttagccaactggatgtgtgtgagctggctacaaaggcagcgcctgcctcacccggacctcctgctggcaggatgtaaatatacctgcagactggccaaacaggactgccttttctcccccaacccctccctcctcccaccctctccctcagctaaccagcatgagaggaactgagaaagcaacagcctgcaagtgacagctccagcctgattctgttcgtctctgagccgaggtgggaagttgattgtgcggcagcttcattgtgaattccttccattggcatcgctatgtttgcctctatctggtatgctaagaagctgggtcgcaggttcgtgcacaatgccaggaaggcgaaatcagagaaggtatggaatgagtggggttgaaaattacctttccggtttgccaactgcctgctctggaccattggtctgagtacagacgcagtctttatttgcttggagtgagaacctgcctctcactgtgaatgtggtccttgccactatgaaaaggggtaacacttagagcctagcttgcttgggaggggagcattaagggttaagcaagatcattggctattcaaaatgcgtggtgaaatcatcaactgatacagtgtcttcacagagacttaagattcctttaaattacataggatgaaagcaattgagcagctgcagtttatgcttgttcagagagctctctagtaaacttgttgctgtactgcattatttttattattgtgatctttggttctgaagtgggcgttataaatacctgagcctttctctagtacatgtgttacagtgtgtgtcctaggaacatatatctgggactctcagtaacgttgaccagactctacaggggtgcttggtatcttatcactaagccatcgtttcaaaagtgttcacaatgagcaagaattatatttataatcaggtagttgtggccatttaaagaatagatttgcatttcttgtattcagcatgaccagtcatttccagagaatctctgtgtagacttacctaattagttatatttccctgagaaattaaaatggcctgtaagtcctaaggtatattacatgcttggagataacagaagatgatagcttacatctctaattctccagtgctttctggggcactgtccaaactgtcatatttagggaatcaatatccaatgcggtaggcattggggaaacttccaaaggtaacaaaatcttgtgaaacagatttttcatattcctctgaggatatgatcttcagcccagtatct

SEQ ID NO: 5445 - DNA, 6000 bp, Homo sapiens
aaggaacagcacatgcaaaagcctgaaggcaagaagaactggaaaatttcagaatggctggagcctaaggaaaagagcttggagagtaaagcaggtgctagttcatggagagtcctacaggccgcttaaggattttgagttttagtcaatggtcagtgggaagttggtgaaggattttaagcctgagaatgtgtcttggtcagaactgagttttagaaaaatgactcagcatcatgctgaatggaggatgggtaggagaggctgaacccaaggagaacttgccccaggagttcctcctgtgaacacatcaataatatctgtgaacaatgggtatattcactcctaccctcccttctttactgaggttattgtgaggctctggtgagaatgcaagacactgtagtagccaaaattcttccctcacagtttagcactgaggttgcccccgttctgactgccgggtctgggtcggtgagtctcttatacttaagcagagaatgagggtccacagagacaggggttttgttctgcctcgctgattggaggaatctgtgtgaagagaagaattaaatgaaatgtcaatgttgggttggcttattctgacacaaccatcagcaaatgccagtcagacataagcttggtggcaaatgcccccctcagcctcactctcctcatgtgaaaaacacagataataagacctaccttgggctgggtgtggtggctcatgcctgtaatcccaatactttgggaggccgaggccggcagatcacttgaagccaggagttcaagaccagcctgtacaacgtggcaaagctgcaactctaccaaaaatacaaaaattagctgggcatggtcgtgggcgcctgtaatcccagctacttggaaggctgaggcatgagaattgcttaaacccaggaggtggaagttgcagtgagccgagattgtgtcactgtactacagcctgggcaatggagtgagaccctgtctcaatacataagacctacctcagagtgtctttgtgaggattccatgagaggtatgtacagcgccacatgtgtagaagggaccaagtaaatgtttgctgcctttttgtctggctttctttaatgctgcttcatctcagagtaaaagccagaagtcttactgtcctcacaaggcctaatacagtcttacccgtgtcctttccggcctcctctcctcctgctctcctgggggcattctggtgtaccagcactggtcaccttgccatttcttgaatgtgccagacaactcccacctcagaaccctgggatatctgcatggcttgtttcctcatcgctgtcacgtttttgttcaaatatcaccttctcaatgaggcctaccctaaccactctctttaaaattcctactctccctgagttattattctcctcccttcccttttttgttttcctccatagttctcatcaccttccaatgtgttataatttaattatttggtattcaaaaacttatttttattatttagtttgattgtttccatccattgccatatgaactccacaaaggcaggaagtttttctgtcttgttcccttgctgcacctccagtgcttagaatagtgccagtctctcaataaatctttgtcaagtgagtgagggaaatgttcagttagctcccatgctggacatcatccagaatattaggagttgggtgagcacctcatactgcagaatcttgattgccctctgagggctctcttacagtttgattgggcactgattcctacctacccaattaaaagggaagggttccagcccttcactcctttgtaaagtggaaacattgccctttgcctcactaacagcctattttaagggagaaattttaaccctcagagctttgacacagaagcacttgttaggttgtattctgcttgaaggcgtggaagccaatgttgcccatttcagcaaccctgccagttaccactgctagacgacctaagtttttcattgttgttgttttcttcctgtccaccactccttgaatttaaagtctcacatcgaaccaaccaaatggcagtgtaagacctcattgggaacctgggtcccagaatgtggcctaaatctattttcttgccagcttttgagatctaaggaagttactgcacgtgaaagaaaggaaataattgagatagccatctcttggtgatattgtatatttgaatcaggttcatttattcatttgctcattcttttatttgttcacattcagagactcacaatcaagagagactgagagtagatcatcacagcagtggatgtgtatttggaggagaaagtgtttgtattagcaggttcctgctgcgggagtatcgtataacaactcccaaacctcagtggcttccaacaacaaatacttagttttttcttttatatctataggtcagcagggatacctgcttcagggaggtcaggttcaggtctgtccttttatctctttctggaacccaggatgaagaggcaatgaataactgggacaagctcttctcatggcatgtggcaggaatacaagaagccagatcaaaccacaaaagcacatttacagcctatgcttgcatcacatttgctaacattccattggccaaagcgagtcacaggccaagcccaacattaggaggatagggatgaattctttgcttactctggtgggaacatgatagtatagttctgttacagggaggaaatgaagagttaggaataatcattgaatctgctgcaactttaacttggggtatggaagttatggaaggcttcatggaggtggtaactttgatttgtcttgaagggtaagtagttttcaagatgaacaagcaggtagtagcatatgcaagcacatgcaaattaaaaagaaaatgaagtaatgtcttaatatttatttgagtaattactgtggacagtatgcagagagctagaggaaattaaaacaaaggtcattagattccctgtcaatgaagcccaaacttcatggggggagatcagaaagagacataatacaaaagagaaatatattactaagtatagtcttattcagctggatggaaaaaaagtgtgaactcagagcggaagctagaatatagttttagtagctatttttggtacagaatgcaagacatgtgctctttttatattcattatttcatttaatccttacaatctgtgagggacatcctaatgtcaagcacaaatgagaaaacagcttcacagtggtcggtaacttgcccaatgacttatagctagtaagtggtagaaggataacttcccagtaattctgtttttcaagtaattaatttttataaattttattcactaatgtacatactgttttattcttaagtggggctgctttaaaatttttttttctttctttttttttttttttgataaggagtctcactctgtcacccaggctggagtgcagtggtgtgatcccggctcactgcaacctccgcctcccgggttcaagagattctcctgcctcagcctcctgagtagctgggattacaggcgtgtgtcaccacacccagctaatttttgtattttttagtagagacggggtttcaccatgttggtcaggctggtctcgaactcctgacctcaggtgatccacccaccttggcctcccaaagtgctaggattacaggcatgaaccactgcacccagcctgctttaaaatttactaaaggtttttagtgtgtatgttcagcactgcacttgttaaaagtgccccaaccttgagtggatcacctccgaatttctgtagggctgtgtcattcttcacttctcacttccttcccattacatatgtattgaagatgcctcaaagaaaataggattcttgcacattgtgcaactgaaaaatcctcactttggatggtgaggtgttttgaaactctgcctcttcctttcctccagtttatatacacacacaggtaggtgtttttcccctgagaaatgaaagtagacaagcttgttaggttcctctaggtccagcaaaggttagcagtgagactggatgaagaataacaattctcactcttctgcaaactatctctatctaatactagttctcctgttaatatggagcacatatatagtacagtggaatattcttacttgtgaagaggtgagcatttaaaatttttatttctagattcttgcttgaccactggaatcacatatccctgatcttactgacctttaacatgactttttagcctagcatccccagagtttgcagagagagaaccagttcatttttgcaaccatcctttactcaggtggatcgttaaacactgacaggcatttttgtgggttctccatcttggccgtctggaatagggttgaagcatgtttcatgacccatttaccatttgctcaggaagctggctgaactggtttccttgatctcagagaccatctcgcatggccatttaaaaatcttgtagtaatgagtagtgcttataggaactgcctctcactgtctggtgtttgctgtctcatgattccccaggtaggtgatgctctgatgctgctgcctcttatgaattgacgacaggtgcagagagagaataaactgtgtctaagactggaccagagagtgagtgtgctggaagccaccataggaacaagcgacctgtttggcaaggaatacagcatccttctgagagcctcttctcgacactatcccacagaccaggacttcctcatgggaaagagcacttaggatcttgctatcagctgccctaaacttttgctgagccaaaataagactttgatgcagaactgaacaagatatttcatttttgtgtgttttaatcttcctggttgcagtcttagttgttcagccctgagaattttgagccacatttgttgctattatttttgcatgcacttttcaaaatgattgacttaagcttcctgactgaagaggaacaagaggccatcatgaaggttttgcagcgggatgctgctctgaagagggccgaagaagagagagtcaggtaagaggccagagaagccttgggcatgagggaaggaagaggcagtctgtacgaaaataggacactggggtttttttcaactataagtggtagttctgactcgaagactgaatttatggattccaattttaggtttacttcctggacaaaacatttttcctcttggtgcctcttaatttatcctactggactcctaccagaaatagggtcttgattaaaaacctaactaaattcctttaacttattaaatactgagataaaaatgaaatgtatacaaccacatacatctacatttgtgtgtgtgtgtgtatttctatccacttaaaaaaactggatctacttttttttaactgaatcatgaaccaaattagaattttaaaaaatttttagaattttgaaaagaaaataaattaaactagctcacatttctgcatgctttcagaaatgttggaattggttttaatggcaactgaaagtattctctgagccaatttttcatttgtcttgggtcccataaagaggagtggcaactttgatacactattcttgttgggtggaacccaaatgttccatgtcaacattcctgccactttcattcacctttgttgtcaaacaagcactaggccaggatgctgaagaacttgactttgtccaggccctgccatttactgcctgtgtaatcttgggctttgaaggcagcgacaggcttcctgaatgtaagttagtattattaattttatgattctcgctccaggagttatccaaaaggagcataagatatgttcttacttcctgggacacaggaccatgaataatggctttatttttaccatttccgtatcttgacactgatttaacgtggatgatttataaaagaacatgctagaattcacttcaaccactacagaatgtctgattatgactactaaaataacttctatatagacagtatttaacaag

SEQ ID NO: 5446 - DNA, 6000 bp, Homo sapiens
ccggggataaatttgacaaaaatatacaagacatttaaagaaaaagttagaaacctttactgaaagactttaaacgtaactagatggagagtaaaacctcacaattgtaaacaattttctcccaaattgatcttcaaattcaatgaaatcccaatcaaaatgcccattagatttctcaaagaacttaataagctgatattaagtcacatggaaggctaagtagccaaaaatagtcttaaccaagggacagccagataataagtgttttaggctttgcaggcgccataggtccctgtcatgtattgttcttctatttgtttgcaaacaaccatccttagctcttaggccacagtttgcccaccctcggtctaaaccatttcaaagaaagagcagtaaatttgcaagaggttggtaggatttgtcttatcggagatgaaggtttcctttgttttctttttttttttttgagacagagtctcgctctgttgcccaggctggagtgcagtggcgcgatctcggctcactccaagctctgcctcccaggttcacgccattctcctgcctcagcctcccgagtagctgggactacaggcacctgccaccacgcctggctaattttttgtatttttttagtagagacgggatttcaccatgttagccaggatggtctcaatctcctgacctcgtgatgcacccgccttggcctctcaaagtgctgggattacaggtgtgagccactgcgcccagccagatgaaggtttcttacagagctatcagaatacagagtttgtgatactgcacaggcatacgaaatggacaaacaaaacaaaaagccaccaatcaggttaatgcatgtaggaaaacctgatatgtgagagagatgacgttacagtgattgaaggaagaatgaactgcccagtaagtggtctagggaaaattcctaatctatatagaaacaaagaaaaacacaaaacaaaattagattccccatctctcatactaaaccaaaataaattatgaggggatttaaacacaaagtaaaatgtcaaacttgaaaattccattaagggaatataagagactctctttatcaccatgcaatagagaggatttcccaaataaaatacaaaaggcacaaatccaagaggaaaaataattttgatcacattatatgtaaagaatcagctgttcattagaagactccataagcaaaattcctagacaaacaagagattgggagaaattgtcaaaacatgaaagcatcaaaggaaaatcaatgagaaaaagacaaagatctcagaagaactggaaagcagatgaacaaatttcagaagcagaaacccaaatagcctgtaaacatgtgaaacaactataaaatataatttcacagctgtcattttgaccaacattttattttatttttgagacatggtctcactgttgccaggctggagtgcagtggtgcaatcatggcctcgacctcccaggctcaggtgatcctcccacctcagcctcccaagtagctgggactacaggcacgtgccaccatgccaggctagttttttgtattttttgtagagacagggtttcaccatgttgcccaggctggtcttgaactcctgggctcaagcaattttcctgccttggcctcccaaagtgctgggattagaggcatgagccttggccaacataataatctaactaaatgctgaagacaacctggataaatgagaagctatacactcctggtgggtgttcgtgtacatatatgggggaaatgattattttaatctgcagaaaaggttgtttttctcttgagaaacacagcagaaggaaatgcagagctgttctgtagatccttgctcctgtgccctgctccttccccatcttgtgttcccacgctgggcactgaagctctgattccctttccctgtgtcctctataggtctgactaccttgccatcccatctgagaacaaggagaactctgcggtaccagtggaggaatagaacaggagcagtgtgacatgaggtgacctacaggaacatgggaggggaaggcagatgtggatggcaggttgtacaagtgactttgttgcccacaactgaagtgactttaaatttggtcccttaggtcactgtctaccctgcctggggtccccgccctcagggtaattctttaagtcagaaagctctgtatgatgtcagcgcttcggaaggtgaactgctttgacctgagtgtcgaggcaatctgaacttgcccatggtaacagaggcacaggattctccaactcccttctttggtcaaagaatttttgggctgggctgggctggactgggtgggaaattctcagtgagttattttatctttggtaggtggcctgaacacctgagggactggacatcccatgttcagcaatgtcaatggcatcaggagggcgccccaagggccccatcgcttcccttcatgcatccattgttctgttcattcattcatccatacatccacctgcctctgagctttcacctctgactccctaactccatcagacctctacgcaccataagactctgccagaactgagaagccaacatttctacatagactcaacctcaccctctcctagttttccaacaagacactccaaagccaactggatttctcccctgtgctccaaatgactttgtacaagtgctggagttagcacctccctctgcccttaactggctggaactggttcattctccattactgcaagagaatggaagtcttaatagaaggaagcaggagtgattagttcgggttaaagcaaaagtgtgtcatgaacttggattccctgaagtcagttttgtcaggttcatggcccactttgctacagcatcagagtgaagcacgcctgtctaggttctccagtgacagaaagatcctgaagcatggactaacatgctctctggagcttagtactccagagctagatcctgatgggtctctaaggttccctccaagaagacaaggacaggagacttgggaaggaccaatggtaatttaagtggctcttaaaaagtcatgcaacatgtttctggacacgttcctgatcctattgcgataatgtatgtgtgccctccctgtgggcacaccacctgggcattaggactgaaattcctgagttcttcctctcaaaatttctgtgcaccagtattattcctcattttacatacaggaggcaactaagactcatacagggctcaactgaataagaggcttaagaggataaactggagcagaaataagccttaggtgctgcccagtttacacttcctgggatggatgtttttgtttgttttgttttttgttttttttgtttgagatggagtctcactctgtcacctaggctagagtgcagtggtgtgatctcggctcactgcaacctctgcctcttgggttcaagcaattctcatgcctcggcctctccagtagctgggattacaggtgtgcaccaccacgcctggctaaattttgtatttttagtacagacagggtttgactatgttggccaggctagtcttgaactcctgacctcaaatgacccacccacctcagcctcccaaagtgctgagattacaggcgtgaggcactgcgcccggtggataactttgtttctgaaaagactgacattgaacttgtctatggcaatgcttctttcacaagcacggactgggctgaggtcaactctgatagattcagatgactagaaattggccaaaaaagcagggagaagaacatgaggtagacttaaagaacttcctttatgtaaagatctgtgactctgaaatatcctccaaaaggagagtgcatctgagactgatatttaaactaagaaaaatgtttagtctgagatggatcataagtaaatgagcagtgtgagaggggagggatgggtaggtgctttccaaatacttcgcctatgaatgcataattttcagatttttttcccctagattttgagggagcagagaaactggaaaaaactttagtcaatatctcgtgtttcattttaattaagtgacaggtccaagtgtgacatccttcagcacccagggacaagagaggggaaagatgctttatggaatgtaagaagatgaaggtgactgggattcagcgagagagaggtccctcagacctgggacctccctttatagggaaagaccatattccataggtttagggctttaccttaaaagctcatttttttcattcttccatccctaggaaagtacttaaaaccagacttttaaatttttatttatttattattatttttttgagacagattctcactctgtctcccaggctagagtgcagtggtgcaatctcagctcactgcagcctcaactgccccaggtttaagcaatcctcccacctcagcccccaggtaactgggactacaggcatgcaccaccatgcctggctaatttttgtattttatgtagagacaggggtcttgccatgtcgcccaggctgatcttgaactcctgggctcaagcaatctgccagcctcagcctctcaaagtgctgggattacaggcctgagcaactgtgcctggcccaaaaccagaccgttaacacattaaagagtctgattttgttgaagaaaatatttgcaataaattcaagactcttcttattggtaattttccacacaatccctctgaaataagggagaggatatagacctttttaactttatagttagaaaaattggcctcagtgtgaaatttttccagtcccatagctcatggatgccaccagcttgcggtagtagcaagatgcttactaccacaccgttttcctcggtggcccaatagctcgtgtatctaagttgaacccggcagtatgcatgattgcctttttctcttctttttaaaaaaacccaactcagatgctgcttgcgtggcttttaatgaagctgaatggtatctatcacttatttatccttgacaggttatcttccccactcttcctttttctaacttctccattcttctcattcttgacactttcattagaactatatggtttacgaagtattttcacttaactattttatttcttctctataactggtcctgtgaggtcacattacaaaagaagaaactgagggtctctgaggttaagtagctttactaaattataaggaaacctagctggtaggtagacagcaagaatccaggtcttctgactcctctttcagttctctttccacttagaccatagctgcttccttttcttattttttagcttccatctaaccattgcctatcttgcctgtcctaatgttctccatcttctctcacccctaatcccactcactgcttctctaccactttgctttttggtggatgctagcaatgtgctttgagagtcagtcctattttggttctctttctagttggtttgtacatcattatttctcctgaattgcaattaaactccttcctgggagatttgataatgactgtaaatcaataaggtactgtgatcaccagcctacttccaatctccacccacctccctgtctcttcccataatcctacgaaagacccagactagatgtctgtttctctggaagctttatctggcatgatgttgcttattaaagggcttagaagagttctcaagggctattaatatcactttagaaaccccatctgttgtcttggtgctggatatttcccatgtctgatcctcaataacacaattcactaaaggccaagcttggctcaatctgattttcccattcttactacttcacagccatgaatgtgattgctcaatccagttggccctgagagcaccttgccctgctgaccttcactgtcacctcggtcttgaatcagagccccaacccaaacactccctgcctgtccctaccccagcctttattctcaccacttgtttaacggcatgaccttttagtttctccattcccagacacccaca

SEQ ID NO: 5447 - DNA, 6000 bp, Homo sapiens
cacatccccatggggcgaggggagcttggaacagctcattttcctgatgacaggagaggtctgcgtccttggaaggcagaggcagatggagcaggcagtttgggttttttttttttttttttttgagacggagtctcactctgtcgcccaggctggagtgcagtggcatgatgtctgctcactgcaagctccgcctcctgggttcacgccattctcctgcctcagcctcctgagtagctgcgactacaggtgcctgccaccacgcccagctaattttttgtattttttagtagagacggggtttccccgtgttagccaggatggtctccatctcctgacctcgtgatctgcccgcctcggccttccaaagtgctgggattacaggtgtgagccaccacgcccggccccagtttgggttttaaatgacagttttctctgttgtgctagcacctcccctcagttcagggaccttcacccccagcctgggcatttcgtctggaatgagacttgtggggttgcttggcgcttgaggccaggatgtactctgagctgctgatggccatctcctctcctggggcctcgtttccctctgacctcctgccctcatcacctggtgatctggacccagggccatatcccttctctgcccagttcttggggcagtgatggtgtcaggccgtttgtgggtccccctggtgccctgtctgcccctccacaagacctgggaactgcgggaggatatggggacagcccaggggcaggctggggttcctgtgtgctcgggaatgcccctcagttccgcatggccttgtctgtacatggtgtgtgtgaccttgtgcccgacggtctggagggaccattgagtgggccattgcctgtccaggcctctcctgtgctccagaatgttacgagggacacctctccaaaggggtgggtgggggcgccgcgttcacagtcagcaccctggacagcccatcccccagctgctggtgcatcccatagcagggccaggtcccccgggaagtgggggcatctttgtagagctggcagacccctgcccaccctggggctgtgccccaagcccagtgctcccagtgaggacagattctcttaattagggatgtcccctggcacttctgccacggagctggcctctggtcctgcacactccagacacatccaccctggctcacacacaccctggctcacatgcaccccggatcccacccccgctgacactcaccccggttcccatgcaccccaggctcacatgcactcccggctcacacgcacccctgctcacacgcacttcggctcacacgcactccggcccacacgcaccccgctcacacaccctgctcacccagttcccacgcaccccaggctcccacggacctccgctcacatgcaccccggttcccacacaccccaggctcccatgcacctggctcacattcacgcccgctcacacgcaccccggctcacatgcacccccgcttgcatgcacctcgcctcccacccccgctcacacgcacccccggctcgcatcctgggctcccatgcacccccggctcccatgcacccctgggtcacacgcatccccgctcacacgcaccccagctctcacgcacccccgggctcacacccccaacagcttgcacccccggcacacatgcaccccggctcacacgcacccctgggtcacacgcatccccgctcacatgcaccccagctctcacgcacccccgggctcacaccaacagcttgcacccccggcacacatgcaccccggctcacacgcacccccgggctcacacgtgccctggctcacacgcacccctgggctcacatgcaccccggctcacacgcaccccaggtcacacgcatcccctcacatgcacccaggctcacacacccacccccagcccacactcatccccgctcacacacacccccactcacacacaccctggcccacacgcaccttggctcacgtgcaccccggctcacacgcaccccccctttcacacgcaccccgggctcacacgcaccccgggctcacacgcaccccccctttcacacgcaccccgggctcacatgcaccccggctcacacgcaccccctctcacacgcaccccggctcacacgcacccccctcacacgcaccccgggctcacacgcaccccgggctcacacgcaccccgggctcacacgcaccccctcttacacgcaccccgggcccacatgcactccggctcacacacaccctcactcatgcaccccgggcccacacgcaccccagctcccatgtacccctgctcacatgcaccccagctcccatgcatcccgggctcacacacaacttgactcacacgtctcaggttcatgcatccgtcccctggtgcgtctccgggccgccctccaccgggctgtgctggctgccacccccaagcctcttcctggtctcctgggaagcctcccctatcaccctaagctgcttctggggctggctttgctcagaagccacacccaggctgggcactgtgcccaggtctcctattggctccctgcagccacgaggggctgtgtggtcagagccagcaagtcagcccctgcctcggtactcccaatcctggggcccagagcacaggggtgacccctcttcctgcacccagtctgtccagctcccctgtgcgctgtgcctggcctgctggggaggggctctgggcgtgggtgtcagagctcagcaggcaccaggagccaatggctcagcagagcttcccaagataggtcctgcgctggcagcctccggacagcgttctgttttgaactttaagcggagatgctacctctggaaggccggggaaggacagagcctgccttctccccaggatggcctgagcgtgtgtgggacttgtggggccccagcagtggggggaatctgctctgaggggattttaccctgtggagcccagagggaccgaagacaccagtgacaggcctggcctgaatcttggggcaccagcagccatgctggcccttgggcagggagctgtgtcccatctccccagcacagcctcctgcctgccagccagccagtaaaagggtggcggcctccaacctccagcctggcgctggctgatgcactgctcagggaggggcaggtgagcgtgcacacgaggagggggcatctcccacccccaggccccctgaggcaagagtgttggggctcatgggccctccgtgggccctgccagggtggaggccccaggcctgtcttgagctgggctggtgttgcaggtgggggtggggcggctgctggtggccagcagctatcccagccttggtttctgtctggaaagtggggtgtgagtctggccactggggcttgggaggcttttatggggtgacttggggcttctggtagtcccccgggaacccccagagcctggggtctgagcctgtcctcaggcatgtggtctgggtgctccaaggggtttcatcaggttgaggggtggctttgccagcccattcccaagtcctgtccagtccagggtggggcagggatcccccagggctgcgcggcccttccccagaaccagtcaaccgtcggcaccccaggacgtctacccaccacccacctgggcacccacgctgcagaccgggagctggtcagcattttcgggggactgcttgtcccgtgcccaggcctggaacatatctcccgtctcatcctgaaacggcccaagcccgaggcctctgtctgaaggtggggtcctggcggacccctgcttcccttgaggccttgctgggccagcagcctagcaccctctctctgggcgcagcaccccctcgtctccccctgcctcttcctgttttaattgatttttataagaacaagcacttaggaaacacagtaagagctctggcggttacagacactgcaggaggtggccctccgggtggcaggtgctcctgtgggacccgcctgctttgttcccaccagtgcccatgtggctgtaagaaatcataacttggccgggcgcggtggctcatgcctgtaatctcagcactttgggaggccgagacgggctgatcatgaggtcaggagattgagatcaagaccatcctggcggctgggcgtggtggctcacgcctggaatcccagcactttgggaggtcgaggtgggtggatcacgaggttgggagatcaagaccatcctggctaacacggtgaaaccctgtctctactaaaagtacaaaaaattagctgggcgtggtggcgggcgcctgtagtcccagctactcgggaggctgaggcaggagaatggcgtgaacccgggaggcggaggttgcagtgagccgagatcgcgccactgcactccagcctgggtgacagtgcgagactcggtatcaaaaaaaaaacaaaaaagactattgtggctaaaccatctctactaaaaatacaaaaaattaaccgggtgtggtgggggcatgcctgtaatcccagctacttgggaggctgaggcaggagaatcacttgaacctgggaggcggaggaggttgcagtgagcccagatggtgccactgcactccagcctgagcaacagggtgagactccatctccaaaaaaagaaaaaaagaaagaaatcataaccaggagcagagtgtgagggaatcagcgtttctcctgccacgagtgacaggggacagctggggacatcacagagatcttgtcgggagctgggaatcggaatcctgggaccacctgccaggaagccccatcccggagtgagggcagggctgggtctccctgacagcacagtctggaaaggctggagtggcctgtcaggtggggagtgagccttctgccctgcgcagaccagacggtgaagcggggttaggggtgtgcagactgcgtcctggggcctaagatcccgtccctttggctccaggccaggggttgggcggatccctcctagagggagtggttcagaggcacaagggagcctccccgactgtggccatggagtgtgggtttggggatggggtgccagcccagggtgtcgggaaagactggcctgccctggacacccccccgggctgccgtgggatctagcaggactctgggtggttctggctcaggctggcaggcggcatggctttgggcttgtgggccgggctctgccctggggtccagagcttgcattggggcctcaccctgtctgtgtctctcctgttgctgtgccccagctgggaggctgtggcgtgctgggtgtcggcatctggctggccgccacacaggggagcttcgccacgctgtcctcttccttcccgtccctgtcggctgccaacttgctcatcatcaccggcgcctttgtcatggccatcggcttcgtgggctgcctgggtgccatcaaggagaacaagtgcctcctgctcactgtgagtgccggggcccaagcgatgctccgggtgggaccacgcagggtggggctccggtggcccccaggccttggctgccgcagtgaccccccagacgtgggcaccacctctggggccggacctccaggctggcagtgtggcccggggccctggccactgttgggtcttccaggccacactggggctggggggtgatttgcagagcggtgtgggggtcactcaagagaacgtgctgtaccttgtcaggggcctcccctgacgggacactggccctggtgagtgcaggcacagccccgcacacacgtacacacgcatgcgcagcctttcacgggcttgcggtctccgtgactcattcctgaccaccccacccccactgtggccccttccccagcttcttgttgggggcctggtctctcagctccctgggaccggctgctgggacgatcccagcccccacctcgcctcggggatggacttacaggcagggatatgtttatcctccttagaaatgttaatcacagataattaaaaaggaaaagggctcctagatggaaa

SEQ ID NO: 5448 - DNA, 6000 bp, Homo sapiens
aaaccctgtctctacaaaaaatacaaaaaaattagctgggcgtggtggtgagtgcctgtaatcccagctactttaggggctgatgcagtagaatagcttgaacgtgggaggcagaggttgcattgagacaagatcgtgccattgcacgctagcctgggtgacgagcgaaactctgtctcaaaaaaaaaaaatttatgtacttaaactggaatatatcttaaaagtttatttaagtcaaaatttgagacaaacttagaggattgtgagggttttgtcaagcatgcttaagctggtatataccttcaaaacggaatgtaattcttttttttcttttaacatagggtaagcttgatgattaccaggaacgaatgaacaaaggggaaaggcttaatcaagatcagctggtaaagatgttatattttttattttagacctaatgctcactattttaaagacaaaaattaattctgtggttttttgtctttccagtaaagtttgggttctttgtcattttaggatgccgtttctaagtaccaggaagtcacaaataatttggagtttgcaaaagaattacagaggagtttcatggcactaagtcaagatgtaagtaaaagaaagtatacatatttatgaaatacttttgttgtttctttgggttttagtccttccattactattgataagctctctgcaaggtgagacagttgtatccaattatatctaagatgccttcacattctgtaaagtaaaatgtaacacctgaaagatgtcttttaaaaatactaagtttgaaattgggggcggtggcatgtgcttgtagccctggctcctcaataggttgaggccaagagttcatggctgtggtgcatatgattgttcctgtgaatagccaccgcacttcagcctgggcaacgtgataaaaccccatctctaaaaaaaaaaaaaaacattaaatttaaaaatttttttaaaaggaccaagtttgagatttgacaaccatgtatagtagctatgctaaaggtctcattggtttaaaatgttagctctgcaaatacataaaaatcagatagtcattagaaatacataaatgttttttatttatcatgttccttatgtctaatgactcacaatttaaactgtcagaaaataaagaggctcgtttatataattggtaattattctctgctttaggaaccttaaggggtatggcaaactgatgtgctcctatatcagcactcgatccaacttaatagtgggtttttgatgtgacaaaaacctttgggaataaggacaaaagttaaatgcaagcaaagtcagataatttgttgaggccagaaaattaagccatctgaataagtgtcatcttctttggagaagactaataacattgaaatacaggcatgtactccataatgatgtttcagtcaactttggaccacatatatgatgatggtcccataacattgtaatactgtatttttactgtacctattctgtgtttcgatatataaatacctctgtgttacagttgcctacagtagtcagtacagtaacatgctgtacacatttgtagtctaggagctaatatgctataccacatagcctaggtgtgtagtagattgtactatctaggccgtgtaagtacactccatgtttgcacaatgaggaaattccctactgacatatttctcagaatgtatccttgttaagtaatgtgtgactatgtaaagttgcctctaatttgctgaaacaaaaaagtttattatatgagacaatgcagtgtagggattaagagatcagattctagaaacagactgcccagttgaatcctaattttgtgacttgactttgtagtttgaccatggatgagttacttaatttcactgttcttgtattagtcaaggttttccagagaaacagatccaataggatagaaagggggctgatgggcagaggccatcacagtgcctcggttttctaatctgtaaagtggtaataataacctcatacggttgtgcttagaacagtatttgatgcataactaatatatttcaagcacttaatcatttttgtttgtttgtcttgttttgagacagagtcttgctctgtcgcccaggctggagtgcagtgccgctgtctcagctcactgcaacctccgcctcctgagtaactgggactacagacctgcgccaccatgccagtctaattttctaatttttagtagggatggggtttcaccatgtcagccaggcttgtctcaaactcctgacccctcagatgatcggcctgcctcagcctcccaaagtgttgggattacagtgtgagccaacgtgcctagcttcaattacttaatcttagaattacttattacatctgatcagggaaggaaaatctttgctgaaaacaaaaaaagtaatttaattttgtacctagtgtcttagtcaactttgtgttactataatggaatgcctgagaccggataatttatataaagaacagaaatttgtttctcacacttctggatgctgggaagtccaagatcaaggtaccagcatcttgttgcattactgtgtcctcacctggtggtagaaggcttaagggcaagagagagtgatcatactcctgcaagctctttttatagtagtattaattcattctaaatagctcccaaaaggcccaccctcccaacactattgcgttgggagggttaagtttctaacacttgaattttagggggatgcattcagaccatagcaccaaaggagagatttattccacttagcttaatgaaccctgcccaatttctttttcttgcttttttaaaatagaagcaggattgctatacagtttaatgtaacatctattttggaagttactatcactgtgtaatgaaaatacctgtatccttttttgcttctcttgtaacactggtattttcaggacctttctctgagctttaacttcattagcagagctgttatttatctttgatcctttggtatactgtacacaattattaaacatgctttttgtttagcattcaagaacttctttagcctggctccagcctaccttttcacctttttccttcttgaactgttcatttcatacagaatagctttctttcttatcttcttttgctttgttaacttcctttcatattcctgtccctcttcctgtgtttcctgcctccacctacctataaagaccttcctgggcagggtgtggttgctcacgcctgtaaccccagcactttggaaggccgaggtgggtggatcacctgaggtcagaagttcgagaccagcctggccaacatagtgaaaccctgtctctgctaaaaatacaaaaattagccgggcttggcagcacacacctgtaatcccaggaggctgaggcagcagaattacttgaattcgagaagtagaggtgtcagtgagccaagatcgtgccactgcactcctgggcaacagagtgagactccatctcaaaaaacaaacaaaaaacaccttcctggctggtcatggtggctcatacctgtaatcctagtattttaaggaggctgaggtgagaggatcgcttgaggccaggagttcaagacccaagaccagccttggaaacatagaccttgcctcaaaaaactttttttaaattatttttttaaaaaagacttttttttttttcttgagacagtctcactgtttcacccaggctggagtgcagtagcatgatctcagctcactgtagctatcacttgccatttattgctaagatatttattctgcacactctgttaccattatagatttgtcttgttcttgcagccttcatcattcttcccaggtctccttccccatttttccctttagtataggtttcatatgtccctattttggttttctgtgtcttggttcatcctagtgaggcttgagaagggggaaaaggtggaaaggaaagcactaccatggcttttgagaagactagccttcctctattcccaacctcatgttagatacacgggagagggagaggaataattgagtttggctgatgctttcctttcagcctttccaggaaagaaaaaaaggaatgtgggaaaaatacattcatacttagctttatctatttttctccaccagcatcatcttattcataaaaacaaattaggcactcttttcagtaagatggaataactttctgagactggcagcggattatttgggacaaaggggcccttgtgggtttttggcatttccttgtgagtcattagtagatactcaaagttagaactttgggtcatttgcccatagaggagctagattgaggtaagatttttattgttgctgtggttgggtttcttttttaattggcctaggcctttacatttctgtataatttctaaattcattaaatttttactttttatatgcataatgaaaaacttcagatatatatacctaactaaagaaaacaatacaatgaaactctttgtacctgtacccagcttgtatatttatcatctcatggtcaatcgtatttcatataaatccacattcatttccttgctccctttgccctctagattattttcaaacaagccccaaacacattgtttcatcagtaatagttcagtagtaaaataccttctagggaaagagctgttctgaatttttaacaattgcttaaaatagattatgtttaaaactatttgtaagtcaggaatcatccttttgtgtattgaggtcatatctcactcattgagtaaaacatgttttatttaagctggacctgaaatggattgaactaagttttatataactaattttggtgttttacttttatattgttttgcagattcagaaaacaataaagaagacagcacgtcgggagcagcttatgagagaagaagctgaacagaaacgtttaaaaactgtacttgagctacagtatgttttggacaaattgggagatgatgaagtgcggactgacctgaaacaaggtttgaatggagtgccaatattgtccgaagaggagttgtcattgttggatgaattctataagctagtagaccctgaacgggacatgagcttgaggtattagtggtatttgataatagaaacttctgagtatttaagttgacaactgaaaggttattaattagctatttactattaaaaggttgaatgaacagtatgaacatgcctccattcacctgtgggacctgctggaagggaaggaaaaacctgtatgtggaaccacctgtgagtatcactgtgataactttgattttataactaggaatctttaaaaactaattttcttatgtttatagttcacttggaagaaaaaaattagtttttttttttttttggagacagagtctactctgttgcccaggttggagtgtagtagtgtgatctcagctcacagcaacctccgcctcccaggtttaagtgatttctatcacctcatcctcccaagtagctgggattacaggcatgcgccaccacgcctggctattttttgtatttttagtagagacagggtttcgccatgtaggccaggctggtctcgaactccttaccacaaatgattcacctgcctgggcctcccagagtgctgggattacaggtgtgagccactgcgcccagctagttttcctatttaaaattaatattaattgaataaaatttagaaatgtatacatagcattcatctgctatttactgtttggtttatttcttttttgtttctttgtatgtttaatctgtaatgtggaaatcagaacaccagcaacaaacaactaaaactgggaatatgatagtcctaacttcacatggtcttgtatgtaacttaactgtgtttgaggtggacagattaacattagattgactttccacagcttttggtaatagatagggactgtttgttttatggctgaagttttgtgaaacaattattgcatttcatacattctgctcatggttattgccttagtttttc

SEQ ID NO: 5449 - DNA, 6000 bp, Homo sapiens
taaatctagaactgtatattcagtaccatttcaattatgcaagcatatgtgtgagtatgtatatttgtgtgtatgtgtgtatgtgtatatagatacatactttatgtatatatgcataaagtacgtgtgtgcatgtgtgcacgtgtgaatgtgtgtattcagtaaacaaactggaagaagatatagaaaagtgtttgctgtagtttttgtagtggtggacttattttccttcattgctttcctgtgttttgtaagttttctgtaagtttgtatgacatcaataatcaaaattaaatcatttgctttttaaaaactttgttgcagagcaatcaatggagagaatgtaagagtgatattattttaccatgtcttttctcagatttgagcttaatatcatggtgctttggaatgctggagtgaattttgaaggctctggctagcagagaagtttatttggctttttgtttgtttgttctttttttttttttttttttgagatagagtctcgctctgtcacccaggctggagtgtagtggcatgatctcggctcactgtaacctctgcctcctggttcaagtgattcttctgcctcagcctcccaagtagctgggactacaggcatgtgccaccacacctgactaatttttgtatttttttttttttttttttttgaaacggagtcttgctctgtcgcccaggctggagtgcagtggcgcgatctcagctcactgtaagctccgcctcccaggttcatgccattctcctgcctcagcctccggagcagctgggactacaggcgcccgccaccacgcccagctaattttttatatttttagtagagacggggtttcaccgtgttagccaggatggtctcgatctcctgaccttgtgatccgcccgcctcggcctcccaaagtgctgggattacaggcttgagccaccgcgcccggcctaatttttgtatttttagtagagacggggtttcgccatgttaaccaggctggtcttgagctcctgacctcaggtgatccacccacctcggcctcccaaagtgctgggattgtaggcatgagccaccgcgcccggccttatttgactttttaaggagtctgtcctaaactgaacttattactgtctccaaattatttatgcaaaagaatctaacatttctatttcttcccatagatttgaatataacctgccgctttgcaggtgtattccacgtggagaaaaatggtcgctacagcatctctcggacggaggccgctgacctctgcaaggctttcaatagcaccttgcccacaatggcccagatggagaaagctctgagcatcggatttgagacctgcaggtaagagaccagcacccgaccactggggaaagctggcggcctgggaccaggcagctgggcttagaactggaaggctcctttcccacagctgaatggattattgcctaaggagtcaaccccacgtattaatttggccaagtcaatctgcaacctgtatgacaactggagtttaaagtcagctaaagacacctttgtgaatcatagagcgggaacccagaggaagccattaggggtcctctcggctggaatcctcttgtctaacctgcttccacagagctctcctggctttgaagaagctgcagtatcattgtcagaaccacaagaaaacataaaccaaataacagtgtttgaaataaatatgtggctgttagagtcttggccctgcagacttggatcaaagcagacttttcaaactactctctcttactctctcttaaaaaaaattttttttggtttctcttctatgtttctctggtttgaaaaagtaaataaaaaggcatgaaagttattaagctatattatattaagatatattatttttgggagccctgagagggctcctaccagttattctagagctgcatagagccttcctcaaactatggctccaagcaagataatcacaacaagcaaggactttattttttgaatttccaatggccttgcggtaagcggtgcacaagaagagcaagccacggtggcaatcacagtgaattgttgtggttcgatttgttttcactagaagaggactgagtaacctctgcaactgctctgaagtttctaccccagcctgtagctgtgcttttgcagtgtctttaggtaatatgattcccctttctctgcaacacacactcacatgcacacagactgcttttgaaaagtcaagctgcagaactctacggaaaccatgaagtgtaagttaagtgcttctatcctccaacactgggtacagtcatgcacccacattatgagtgatggctgagactcttgctgaaagggaaaaggaaagtcttttgcctaaaattgccctgtctgatatggtagccactaaccacatgtggtgacttacacttaaactaattaaaatactaaaattaaaactttagttcttcactagcactaactacattttaagtgctcggttagtcaccgatggccagtggctactgtactggatgacccaggttagagaacatttccatcattgcagaaagttctattgaggagcactgctctaaaataaagagcagatgtacatagacatctgtatgtgttcagagctaggtctgggggaatatgaaaggagcagagagagggagaaagctctggtggctactgaacttgcactgtaggatgcaatgaaaaaaggccatttagcaaatccattattctattcccaaggctaattgtttaattatggccctgactaggccactggcctaagaaagtgaatttagtaagctgaactttgattgtgaaatacaaacaaggcatacttgcaaaatatagatatgctgccatgtgctgaggaccaggggagttcttacaactgccactggccaatcatcaagcacttagatgctgggagccctactgcccacctggccaaacccctcacttaatcctcaaactgcagtattggtcaatattatcacctcattttatggatgaagcagccgaggcttagcgaatttgcacacacagcctgcctatggaggagttaggattctggttctgcttagcctcagcccaggacaggattttaatgaccaagtcctcctcaggggcttaaaaggggaggaaagtatgcttcctggatttgctgaatattctttcctccttgtgaacagtaacttactcatgccacatacacacatataaactttaatatccccaatttacagttagcatgacccataaaaccggtaggcaacatgaggtggcaaaaactcagtaatagcttacaaagagaatgcaatagattctagaatgttggtgttatccatacttgatgacatgatgtgatgggggtgagttggtgggtaggttcaccaagaagtattatttagaaaaactgtgccaaagaaatctatcatttcacccataactggtattaagtattgcaaaactcatttccataatttctctcaggtagctatgaatcagctttctgccacaggacagatggcagagtctcatgggttaggataaaaccttagcagctactctcttttgtctgccccaccctgattggtagcaactcttagatatatgaaaacttattaccatttaattgtgcccacaccccctgccaagctaaggaggctttggggaaaccagtttgtctgttcagatgagaaattagtcatgcgagctacaattgccacataggtaggagttctgtgtgcttggaaacttcagactcacagacatttccatgggtcgtgcagggtgatgcactccatgctgttgcccctggcaggaaagatgaaaagcatcaatgtgcattttagccagaattgcattttgaaaaacctgctggatttagcttcctcctctctgccctcctgctgcaccacagcttcccttgcacatggcattttctcagcccacatctcattttttgaggcattttatattcaaaaaaaattgtgtttttagcacaattaaaaaataagcaagtttttagccaccaggatgctgctagaagaggctgggctgtgtatgttgtatctgtatgtcgtatccagctgtaacacactcccagagataccttggtggggagagaggggctatgcatttctctggctgtgctacttctggaaagttcctgagctacatgagccgttgctatctgcttacttaattgctatgactcccattgtaatgatggttaatttattcccactggcaatagaattatgcctgcaatgctcaggaggcagtgtgctgtgctgtgtacttggcatataaacaaggcttcatgtttagggcaatggagtatggagtaaggggactcacaggaaaagttgtggctgagaaagaagtgggggaatgggacatgaggcaggtctggaatgtgtgcactgaaataaagaagcaccccttcctatctatggaagctggccattttgtgtattttctggaaaacatgaaggtattccagagccagcatgaatcttacatcaaaacttctctcttctgtgactcaggcttccttctgtttgttcaaatagactcaacactgctgaacacaaattttaactgaaactaattattcctttcatgatttttttttaaagctctttataggtctctaaataaaatcactttgtttctatcagtcttgttgatctctttccctctctatgctgttatttttggatttcaaataactcggttgttgaaacctccgatatccctaggggtgaactgaatgaagtgttgcacggcattaaatgtcattgaatgggatattatgaaattcccatcttagccatttaggtcaatatcctgttgtttttctcttacaggtatgggttcatagaagggcacgtggtgattccccggatccaccccaactccatctgtgcagcaaacaacacaggggtgtacatcctcacatccaacacctcccagtatgacacatattgcttcaatgcttcaggttggttctcaggggggtgtctgttggcgtgaaaggctgtgggagcctggtctttggagctcagcttaagtggggattcatgtagcctccatttacataacaaatgctcactgaatatctgtacagcagagccaacattcctgtctccatggagcttacatgctaaattggggaggcaaacaataaacaaataaatattaaataccattcaggactgtccaatcttttggcttccctaggtcacattgggagaagaattgtcttgggccccacataaattacactaaaactaagagtagctgataagctaaaacacaaacaaaaatcacacaaaaaaaatctcataatgttttaagaaagtttacgggtttgtgttggaccacattcaaagtcatcctggaccacacaaggcctgtgagccgcaggttggacaagcttgccctatatgaagtctgaaagtgataaaagtgctataaaaaagaaagcaaaatacgaggctaatgagtgctagggatgcttttattttctgagaaggtggtcagggaaagtgcctcctggactgttctgagaatatcagtgctcagaagggagaatgccaaggaataaagtcagagagctaagcaagggccagctaacggggtgattcattctcagtgtgatgggaagtcattacaggttttgaataagggagtgacatgaatctaatgatagctttggggtgtaagtcaaatgtcttagctgagaggtatttattatatgagagggctggaaaaaagccttggagagtatatggtatgcctttgaccttcttaaatatcccttacccaacagttgaaagaaccagagaagaagaaacctaagttaagatgtagatgctaggacacaggccagcctttctctatgtctttgtgactttctcccaaccattaacctagaaaatcaggcttatgagccttattcaagtcctagcaaaattaaagaa

SEQ ID NO: 5450 - DNA, 6000 bp, Homo sapiens
ccctcttctttttaattttgaaattttcccaacatccttaaatgttgaaggaacaagcaaacacctgtgtatcctcaaccaagattcactagtcttaacattttgccacatttgcgtttttcctctttatatgtgtgcagttgccttttgaaaataagctgcgtcattgtgtgatcacatccctaaggtcttcaacatttccggagaaaaaaggaagagatgctctaacatcatcacagtacctttgtcacatttaagaaaattaatagtaattccttgatatgatcaaatatctggtccatattcattttttctcattcaactcccgaaaaacctggtataacttcttttttccttcaagtgagagcctgtcacattaaagaattgcaggatgttgttttgtttgtttgtttgtttgttttttgagtcaaagtctcactctgtcgcccaggctggagtgcagtggtgcaatcttggctcactgcaacctccacctcctggtttcaaaggattctcatgcctcagcctcctgagcagctgggattacaggcgtgcgccgctacacctggctaatttttgtattttcagtagaggtgggatttcaccatgttgcccaggccgatctcaaactcctaacttcaggtgatcgccctgcctcggcttcccaaagtgctgggattacaggcatgagccactgtgcccggcctgtttgttttttgagacagggtctcactctcttgcccaggctggagtgcagtggcaccatcattgcttattgtatcttcctgcctcagcctcccgagtaactggagttattggtgcaggccaccatgcctggctaattttgtttattcttagtagagacaggggtcttgctatgttactcaggctggtcttgaactcctggcctcaagtgatcctcctgcctctgcctcccaaagtgctgggattacaggcatgagcccctgcgaccagtcaagagttgcagtttttatatcattttagtctcttttaatctagaccatgcttccgtacttttgttttttccacaaacttgtatgtttttccccagctatattgatttttctgattgtttctcatggtggagtttgactggtttgccaatcctaccaatgtctggaagcttgatttgatgcagattacacagtgttcaccactgggacattctattgcatcccctcaggggagcctggtgctggctcatctctaatagaaatactagattttttatgagataattcatgtaatatgcataatatgtatagaaaaaagctggaaggaaaaatgctaaaatattagcaataatgaccactttctgggtgatatttattttcctctttattctgctgtgccttttctaacttggccaaaactcagcacgtttttactttataattgggaaaaaaagattaaaatgtgtatcattatagcagtgttagagtttggaaagtaatgaaaataaagcaaggcataatccagctaccttaacatgtgcaataatagcctagatcctcctaggctttttttcaggaacgctttttacataattctgtgtttatttttttatttacttcatcacagcacatttccagtgccaaggtagtattcggtcttgtccttttcattgaccaccctggacatgtaggtgaggaactagtaagagatggtgggtggtgtggtttgtgcaccatgcaaggcactcagctcacgagcagtcgaggctcaagtcctccctgagccccgtgtctgcctggtgcgccttcctggagggtcaccatttcccgacctgcccaaaggcagcctatgcatctattcacaaacccctggggagtgtagcatgcctgcaccagcacagaagcccaggtggctgttgccattggcgttgggcactgagggctctgtcctggaaaaatgctggagacggcatttggggccagatcacaggagaccccgtttggtgtctgggtgcacacatggagctgttgctggtgagcactgtcctccttggggcccaagagcagacagagttcaggtcttagcctcatcactgccctctgctctccaggatgccttccgcgccttccaccctgacctggaattcgtgggcaagttcttgaaacccctgctgattggtgaactggccccggaggagcccagccaggaccacggcaagaacgtaagtctggcttgcaacctgggtgggggtggagacgaggctgggggtggctgggagtctgagagaggctccccttgccccatgaccagtaactggggctgaggcaggggtgcttttgtcctggaggagccactgtggttcacctgtgttcagggagggcctcagagcctccctgggagccggggtttgacaacaactagtggcgtctcctctctcctggccagtttcattttccttctcctccatccctttccaggaaggtgccagatgacaatctaggggaaagacaggacagaaacaccgaaaaatgtcatttgatgacaagagtggctttggggtgtgtggtccggggcacctctttgagaaagaatgaccattccctggtcatctgttcattgtctgcaggtcagacgcccccctgggtgctgggcttccaggacagccatgtgtgaaaatagcaacccctgaggtctcatgggctgttgttttgttcaacaatgaagtctccatgtaaatggcggagccgtttatagaagaaagttgggacaggaggcaggggcagggcaggacggggaggagagttgttacaaggagaggagtggtacccacaggctgtgaccagggtggtcatggaagtcccaccctggcctcagcaagctcttcctcctcttgttgccagcctgggccagacccctctgtttagcagagccagggcaggaccagggtctctcccggcctggactcttggccagtcccccaccacccccattgcctctggctttcctgatgagctgcgggccaccctgcaggtccttcaaaggccaatgcccctcctctcaccttgccctccatggcacatgagatcacctgccctgtacccatgccagcccatgcttgtcccctcctgcctccttcgcaagtgggtccatctcccactctcacctccagcacctcctggcctgcggcttccccagctctgctcgtcctgccctgtagctcccttgtccatggccttgctccttggctctctccactgctctccctttctgctgcagatcctgcaccatttagcatccaagctcccaccaggcaccaccagaaccacccttcatagcaccttggtcatgccctgtgggtaccgctcctctccttgtatccactctcctccccgtccggccctgcccctgcctcttgtcccaagttccttcttcctcgcaatgccattgtgttcccagggccctccttgactccgctttgcctccctggctccatgtgcccgggactcacagccccctcctgcctgcctcagctcgccctcctgcgctagtttgtgtcgcccccaactcaacccctcaagacccaacagtgtgcgcagagcaagtggtgctctgtttggtggtggaaaatgcaagttttatttttcttttcttttctttctttctttttttttttgagatggagttttgctcttgttacccaggctggagtgcagtgacaccatctcggctcactgcaacctccgcctccaggttcaagcagttctcctgcctcagcctcccatgtagctgggattacaggtgcccatcatcatgcctggctaatttttgtatttttagtagagatggagtttcactatgttggccaggctggtctcgaactcctgacctcaggtgatctgcctgcctcggccacccaaagtgctgggattaaagttttcttttttaaaaaagtgtggtcaaccattttggtcatttgacgtgtacagttcagtggcatcaaataagcacatttacattgttatgtaaccatcaccaccatccagttctcatcttccccaaattgaaattccacatccattaagcactcactcctcattctcccacctctcagcccctggcaggcaccattctactttctgtctctgaatttggcctctccaaggacctcctgtatatggaatcatacaatatttgtcctttggtgactggcctgtttcccttagcatgatgtcttcaaagttcactcacattgtagcatgtgtcagaatttcctcccttttcaaggctgagtaatattccattgcatggatagaccacgtgttgctgatccattcatccatcacgagatctttgtgttgtttctacctttttcctgatgtgaatagagctatgaacacagggtgtataaaatgcaagcttttgagtcaaagcctttctctgtcactcttacctagctgtgacaaatatacaggccccagggctgtgtggggcatgtggtaacagcagctattgtagggactcctggagggtcgaggcttgtggcttggccccctcttgccacagcttctctgggttgtgcattggctgttgaaatggcagctcgagacatatgttccctccagagtggctggtggctgactcctttccctgtgctcttggtcaacagtcaaagatcactgaggacttccgggccctgaggaagacggctgaggacatgaacctgttcaagaccaaccacgtgttcttcctcctcctcctggcccacatcatcgccctggagagcattgcatggttcactgtcttttactttggcaatggctggattcctaccctcatcacggcctttgtccttgctacctctcaggtgaggcgtgacaccctcacttcccctagctgacagaggcctggtgcctgtttgctgaggctgtgacagcacgtgtgaccctctctccccaggcccaagctggatggctgcaacatgattatggccacctgtctgtctacagaaaacccaagtggaaccaccttgtccacaaattcgtcattggccacttaaaggtaagtgtcagcagccctgggcatctgtcctgttggacagcagttgagacagagggaccaggattcctctctgctcagtgctctgaggctacagggtgacaaggcaggtgtgcctatgctgagggccatggtgactctccattctgctgacttcctgagccctgtctctggatcaggtccgaaccacaaagccatggtgtactactcattatgaagacaggcacacacctttcttgtcttttggctcagcggattgtattttttgatgttccttagctaaggactcatctaacaaatctgtttttgtttggggacagtaaagtagcagtatttttttttttttttgagacagagtcctgctcttgtcacccaagctggaagcaatggtgtgatcttgggtcactgcaacctccacctccgggttcaagcaattctcctgcctcagcctcccgagtagctgggattacaggcactcgccaccatgcctgactaatttttgtatttttagtagagatggggttttgctatgttggtcaggccggtatcaaacttctgaccttgtgatctacctgccttggcctcccaaagtgctgggattacaggtgtgagccaccgcatccggcctgtagcatcttttttgatgagttggtatgcttcctttcactggggatgtgagctctttaatacgttgtgctgggtgtggtggcatgcacctgtaatcccagccacctgggaggctgaggcaggagaattgcttgagcccaggagttcgagaccagcctgggcaacatagtgagacccccccccatctctcaaaaaaaaaaaagaaaaagaaacacattgtgctcctctcttcccctcagaagccaagaggtacaaagcagcatttgaaacagcaactatctttagtctgtgtttttggtgcccccattctctccttcctcatctggcatttatgcttttatc

SEQ ID NO: 5451 - DNA, 6000 bp, Homo sapiens
gtcagccaccacacctggcctgttagtttttttgaggcagagtcttgctctatcacccagactggagtgcagtggcccattcttggctcactgcaacctctacctcctgggttcaagcgattctcatgccacagcatgagaagtgggattacagggattagtaggtgggattacaggtgtgagccaccacacccagccaggcccagataattttaaaatttatttttttatttatttagaaatggagtctcactatgttgccccgtctggtcttaaactcctggcctcaaggaatcctccctccttggcctcctaaagggctaggtgacaggcatgagtcacactgcgcccagccttgagcttttgtgctcgagatatagtccattcagaacctctggttggcacttcttatctggcacatgcagggcaccttggatctcttattatctttgagcactggtctgaacccacttgcttgccttctcccaggggctgccccgtgcaccccttgttcctagggtggggatggggttggatgcctggggttgcagaggggactagcagagggtgacccttttctctatgctattacttcagatcttggcttttgctttcttccaaatacacagcaatcttggcttccagcctaggtgggaaagggagaaagaaccgatttcctccagctcctctctgaaagtagcccaactggcactgtttaggaacaaggagttcctgagagtgttggcaccccacggtgttgatgtccggtagttccctgctgtgaaccctgtctctgccccacttcaatccaaggaccctgtggagggaattctaggcttcttcaaagcctctgcagtaccagctgcctccaaggcctaacatagtgaagtgatagggagacaggaccttgggggagtttggggataactgtgggagttcctgcaaggtgggtaagagtctggccatggcatcttctggtctattccacaaaaaaggtggatgcctctgagacctagctctgttatgttcattacagccctatcagtctcttctggatgtctgattcctagctgccaaacatccaggtgctagcagctgggggtggggtaggataagaaggggggtgtctacctcaaccttcctgcccaaaccattcattttaaagtactgtgaagaaggctggattagtgttaaattcaataaagttaacaaagcaaagtattgtagtgagtacacaataaatagttgctgcatgaggaatttcttgaaatgaattcaagatgagtcttgaaaaacgagtgggagtaagccgtgcacggaagcagaggtctagcagaggtctagcgccaagtcccagaggcctgagagggcaagccttggtgggggaaaaggcagaagttgtgactggctgcctctgagagtgcaagtagccatgcaaagttgggaaaaccagacggcggccggagccgtgaaccaggggcaaatggaggatggtgttggggtagtcactagcctgccggaatggaagaagaggggcgtttgggggcggtaaggcctaaaggacactggaggggcctcgggatttggggcaggatcacaggcctagtccacttaaaggtggctccgtgccaggccttcccagaatcaggttgaaaagaactttagggttagacaggttggagatgagaaattggaccatgcaggaagtactgtcggaggcgtgttcctgactttactaccctgagccgcccacggctggggcagtccccgaggttccaccttaaggggcgggccggggcggggctccgctgccccttcccagaggccgcgcctgctgctgagcagatgcagtagccgaaactgcgcggaggcacagaggccggggagagcgttctgggtccgagggtccaggtaggggttgagccaccatctgaccgcaagctgcgtcgtgtcgccggttctgcaggcaccatgagccaggacaccgaggtggatatgaaggaggtggagctgaatgagttagagcccgagaagcagccgatgaacgcggcgtctggggcggccatgtccctggcgggagccgagaagaatggtctggtgaagatcaaggtggcggaagacgaggcggaggcggcagccgcggctaagttcacgggcctgtccaaggaggagctgctgaaggtggcaggcagccccggctgggtacgcacccgctgggcactgctgctgctcttctggctcggctggctcggcatgcttgctggtgccgtggtcataatcgtgcgagcgccgcgttgtcgcgagctaccggcgcagaagtggtggcacacgggcgccctctaccgcatcggcgaccttcaggccttccagggccacggcgcgggcaacctggcgggtgagtgcagcgcgcccccgtcccgggtacctccggttgaatctggtggcttgcaccgaccccctcccctgtccccagacggatctagatggttcttccctccatcccgtaccgacgactgttcccccttcccccaccccctccccggcacattgtccttccctcctttctttgaagaaagccgacccgcccctcactccgtcacgagggtgggtgactcagcgtcctccttccccgcggcgccagaagccagttgcaaccggtttctgaagtaatgtgcaggactccttacatcagctcctctgagtctcgtgattcagccttgcctccctctctccccctttgccccctccccgtcccacccttaggcgctgggagaagggagggtggggaggtcaggggcctctcagaggggcctcacttgttaacccagcccccatttcaggtctgaaggggcgtctcgattacctgagctctctgaaggtgaagggccttgtgctgggtccaattcacaagaaccagaaggatgatgtcgctcagactgacttgctgcagatcgaccccaattttggctccaaggaagattttgacagtctcttgcaatcggctaaaaaaaagagtgggtatcctggggttcccaaggaaacagctagaaaggacttggccagaggaaaagtaggctagaacttttgtctggtttcctgctaactggctctgagttttcctagggcaggtagaggggagatttgttagtcttcagcctaaaatggatttgtccagtcgtctgggggctttctacttggctgtggaatcttgagcaggtcatttaacttctgggcttcagtgcccttatttgcaaaatatagatatttactaaaccagtggttttaaacttgtaaaacagtaggtttttttggggggggggaatcccaaatattgttttacgactcgatatagacacatgtttaaaaaggttcactttgggagtggggaacacaggggccacttctctgcactataaactttctgccttccaatatctttttttttttttgagatggagtctcactcttgtcacccaggctgcagtgcagtggaacgatctcagcttactgcagcctcctcccccagggttcaagcgattctcgtgcctcagcctcctgagtagctggtactacagccgtgtgccaccacacccagataatttttttatttttagtagagacaattttcaacatgttgaccggtctggttttgaactcgcctggcctgccttcccatatcttaaggcccttccttgctcacatctgtttcaatggaatgaattttgcccgggttcaaattcaagcttttgtaccaagtaatacataggaaacactcagtgacttgcatttgtgatttccttattttcccttaactcatagactgtctcatgattgcgtcttcctccgttgttttaggcatccgtgtcattctggaccttactcccaactaccggggtgagaactcgtggttctccactcaggttgacactgtggccaccaaggtgaaggtgagtgttggagctgatggctggtggaagtcagatgctggggctgggacagtcctttcacagcaagccctgtagacccagcctgactccagctgagggtccctttgctccttaggaccaaggaggaatgcctcctcctatagccaaaggataggccaatagcacacctgtttttcttgttccttttctgacctcttatttttcttatttccttgactctgaggatgagacagtgccaggaagggaccttctcagaagtcagtctggaagtttgatttttctttcttttgggagaggaagccctttctctgtgagaatcctgtcctgactggtttcccagttcttgtttgatgtgtttggaatagagcccagtctgaaattataagcactggggtactcctatgtgtctgggactctatgccaagtattttatagatgttttctaattctctgtataaccatacaaggtatataatttgccataggttcaaatgtgtacccagcaggctaggagtagggctttgaatgtcacctagctcctgatgtctgggtcctaggacactgacctgttcagaatgggtagaacaaaaatggaagcagatactgacactgctggtagctgtgattctaagatagaattctggactcccagcatttgggtaggaccccgggatcatccagtttaggccttgccagttactaggggaccctttaaaagttgctgatgagggaatgtttttggatggtttggcatgaggggcggtaccctcagatggaaatggagaccagaggagagagtacatggcccagagaaagggaagaaaaggagaatgggggtgaagttccacagtgtgtgcaggactgccaggattccattcagcagcactggcctcttttcaaatctaaactgccctggggctatgctttgaatttcaatctttcatccttggccttgctctgagcagttattgtactcacaccttccccaggcctcaggaaactgggagaggggggatcttgactgacattttagatcctgtctgctgctcactgattatgactgtggacgcgtctccctgcttctctgggtctgtttcttcatctctaaaataggtatgctaacattccaatgctaagtgttaaacgaagttatgtttatggacataccttttctctggggccttttctgtggctttcaaagttgaagctgtgtgatttgccagaggcaagaatgagaagtaaaatgctgtagcactaagaaaatgagtggaagggtagagctggaggggtccaaaggctaagcctttgtagtgcaggtggggaagacccaggcaaggcacaggactctccccagctcccggggaagtgtgtggtgggtgaggtttagtgtgggctggaattttctgagccttttcctgagaactgatgtctgtcctttattcttctgccccctataggatgctctggagttttggctgcaagctggcgtggatgggttccaggttcgggacatagagaatctgaaggtgagttccctttccacattagggacaaagcttgggcgagaacagagggactcagctagagcctcataatattctctggtccttgattctgcttttttctttctaggatgcatcctcattcttggctgagtggcaaaatatcaccaagggcttcagtgaagacaggtgggtgcaggagccattctgctgactcagctccaatgtgggaacccctcagtggagtgctaggcctaagaaggggggattcctagtctagagcattttctttacctttattctttctttagctttttttttttttttttttttttttttttttttttgagatggagttccgctctttttgcccaggctggggtgcgatggcgtgatcttggctcactgcaacctctgcctcctgggttcaagcgattctcctgcctcagcatcccaagtagctgggattacagacgcgggccaccacacctggctaattttgtatttttagtagagacggggtttctccatgttggtcaagccagtctcga

SEQ ID NO: 5452 - DNA, 6000 bp, Homo sapiens
caggcatcctaagagctgttaagaggcattgctgccttggagtccccagcaggcagtgggaggggaaaatgcctttgcagaactggggaggtggtcactatggggatggggccacactctgagccaacagatgcacaactctgtggcaaggtcacctgatgacacagcagcctttatactatccctaacagaggctgcacagagtgagcttgtggagagggaatctgagagaagattctctttgcaaactgtattctattcataatcacacttaactcagacgcatcctgcaagcccctgagaccagccatctgtttagctgattcgaaggagcaagcagacatgtaaagggcttatgagtgaaccagaaccccagctcaacagttccaagagtctgaccatcttctgggagtcttgggggtgaaaagggcatttctgctgcaccagggtctcatggcacaaggactcaggcccatctggatatttataaaatgtgagacccatgttcctatattaaggcatacaaaaataggcatctgtgggtctcattcttggagcaagccagttccctctttagtgccaacccctcccaagccaggaatcacagaagatggacagctccaccttcataatctccctgtcctgggcagctctgacctcgaggttatggggaaactcttccccagaagccttctttgcatccaaggtgcacaggtgagttagtcaagggagggctgagggaagaccatagcaaagacagacccatggaggtttatatttttccttttatgaaatattacacaagaggcaggagatggcctttgttcttctagttatcttggactaaacaattctgtgatagccactgagagggaatgggtgttggctttcgccttcaataccctgctgcccatttcacagcctgtcccttcttcacagcctcttttttgtaaaagccacaaacattctcttcctagcttaaagagcatctcacctgcttgaggagtttagactcagtgttggcatacagtatggtcgcttttcctttggggcatactctttgttttctcttgatccactcaataccttaggtcaagtttgttttcagggtcactgggtgagacagcacagtgcaccctggggtggcaaatcatgggatcacgtgctcctctttgtaatgcaggggagggaagacctaggagcgtggtcctcataagaatcacctgggctgcttgttcaactcctgtttcctgagcctcatacccagtgattcagatcccataaaagtggggagccccagattctgaattgttaacaaacaccctaggaatttgctacaggtggagatatattgagtttaaaggtatttgtcatgcaaaaataaaatcacaaggatcagtgattaaatatgggacctaccgagcattttggtcttccaggaaaaagtctttctcagtccacactctggagactggcattagggaacctgtaccgtgtgccaggcagtgtagaatgtatgacttggaatgacaggctcttgtggttgaagagacactctccacccatgctcctgcccagtgtgggagcctcatccacagccttacagcgtccctgccaaggggtcttctggcctctgctcgagtgccttcagcatcaaggaactcacctctcagagcagcccacactatgttggattcgccctgtttattagtcctttctcagatggagctaaaatctgccaccaccataatttccacacattggtgccatatacagtaagactacttcttccttctggttataacacctttaaatatttggaaatagtattctcgtctccagactaaacactcatccatttgtgcaacaagtattctttgaacattttctgtgaatcaggattgtcctagatgctggggagatacaagagagacaggcagggtacctgctgggatgtcctaggggggatggctagatcataagcatgtaaatgaacagaaagtggcagatagtagttagaagagaataaaacaggctagcagcatggtaggtattggctggaggtgccacactagataagagatcagataaggcttctctgagaaggtgacactgggactgaggcctgcaggacaacagagagccaccctggagggagtgttccaggcacagaatcatcaaggccctaaagcgggttgagctggatgtgttcagcaggcagaagggaggctgccggttcacgccatgaggcccaacagaggagtgggcagagtctgcagcagatggtgggccttttaggccgggagaaagactttgaattttatattcaaatgaaaggggaggccgctgccctacttgtttatgccacagttcagaagccttttccctgcctggccctcccctggatgtgcgcagtgccagtgccgccctccagctgggtctgatgagcacagagcagttgtcccagctgctgtcctctcaagcacatagagcagctttgcaggagtttatttttcctctttagagatatgattagtttcacaaaatcatatttacacataaacctcagaagatataattagtgccattgagtccaaaaatccagacatattccccactgtcatcaaaaaaatactttcagatctttcttcagggagtaggcactttacacctatcgggtactgatgtccggaagctgcagtggcctggagccctgtgtcatggaatggagagaaaacccaaggctaaagtttcttccctgttcagggaaacagctatgggatcctgaagaccaagaaggcctgtgtctcctttgctttttgggtggaatgtgtgaggactctggggaagtggatggttttgttcttatgagactaaccagaaatacctctgcattcatggctgctaagaaaatgacccattctagctgacggctaaggccagtggccagcttcctgctgccaaagcccagagacaggtgtccagagctgggttctccaagcagagttcttcgccatctcaagccttcctgggggaatgcgctaggatcttcagtgcgaggtcagcagggaccagccagagagcctgaggaggaagggctgggaggcaagccaaggtcccaaagggactaaaaacatgtacgagctgcacccaggggtctcaggagtcatttgtgagggatcctctctggcatgctaggctgatggcccattccccaaactgaagtttgaaatatggaccagtggagagggacagccaccagagaagcactagagtgcctggacagagacccctggggcacacagagccatcaataccaccaccctcccgcaaatacaggctgcatgaaaaacaaaaaatgtgtggcccagctctggtgctggttactcagttacatgttccctccactatctatctggcatgttacatggctcgcaagctgctgagcctggcctggtgcttggcaaagcctagcgagctgggttgggagtggggtggctggtggggtgagccccaggtagtgctggctacagttcccatcttcagtctgcagtcctgggtggcttcagttggccctgagagcacaggaagctttagacatagtctactggtggggcagggctgccagttatggaagcaggttgttctggaggaaagatgaattagaagtgcccatatttcagtcgagggtgattgttcccacatcgacttaatggcagagctccacatgggtccttgcttcctgcatcatgaccactgtctcccagacactgatgggaaccaccaagaggtcaattggtccatcccaggcaactagtgtcaatcgtaaccatgggttgatctcccaggggccccagagagctgagtccaggtctctctgtgaaaccatcaatagccaaagaccctggggggattgcagatgggcaccagggaagtaagacacaggctgagtctttcacagtgagtccagccagaaccagggtgccaggtgctagaatgtgagagtgcatgcctgtctgcatgggcatttatcctgcgtgtgagtgtgcctgtgtgtgtgtgcacctctgagtgagtctgcactcacttcaggttttcctgaagtctggtccaagcaggcctgagctcctagatggtgagtattcccagacctttcaccttgcccatggcctggggaggcctccatgtctctggagtcacccaggcttcacttgtcttcctggggtgcagtgaggagggtaaactatgaacccagtgtgctctaatgcagggctcctttggggtcattcctaaagagggaaagaggaagtggagaagtataatggggatgctattgtgatggacaacccaacaagccccaagaaagccccaggaaccctccaccaccccattttgggcccctatccctgagcacttgaggagccacagccccgcctgaaatcagtgatcactgcctgcctgtgctgcaaagccttttgccctggtccaggggaaacacagcagcgccctccaactgcctcattatccggtgttctcagacaggcggggctcagtctgctcccaggactcacgggaggccagctgaccaggctcacccctgttccccaatctgtgagatgatgttgtcatccctccctctggaaggtatagaaagaccctgttttctcaattctggggcatagaaggtccccaggaaggtgtcactctgggcatgaatgccatgactctgtcctctgggccctccccacccgcaggggcttttgctggcagggtctggaggtctcgcatctcagtctgttaaccaccagccatctctctcccactcaagccaacggcagccccacctcaggcctgagcaccggggccatcgtgggcatcctcatcgtcatcttcgtcctgctcctggtggttgtggacatcacctgctacttcctgaacaagtgtggcctgttcatgtgcattgcggtcaacctgtgtggaaaagccgggcccggggccaagggcaaggacatggaggagggcaaggccgccttctcgtgagtgcagacctgtccaccttgctgaggtttgggctctgctccagcccagggacccagcagctgcaccaccctgcgccatcagctggtgcctttcctttcattgcacgttctccatttggaaccctgatgggggaaaaacattagagaaaagtttctcaaagcatggtctttgggggttacctgtttgaaatgtagactcttgagcccaatcccagatctcttgtattagaatctccccagagtgtgaaaatccctgtgtaggtcaaaatgagggaaattgtcagaactaaacctggggaggagctgccatggggtagggcagcattagagggacacacttaccttgctttcgtacattgtttattcattcattcatccatcactcaacaaatatttatcaagcagctgctgcaggcaaggcactgttcccaggcacataggtacaacagggaacaaacagatagaaattcttgtccttatggagctgatgatccagatactgtccctccaacagcatcttggagaaacagatcctaagccagttagcaagagccttcgaagactgtcactgggtggagcagagctggagcaagccagaaagggactgagcaaggaaataagttgtttagcaccaccacatgccaggcactgtatatgcatatacatgtatgtgcatgtacttagaaatgtatgtataggggtgactcacgcctgtaatcccagcactttgggaggccgagatggatggatcatttgaggtcaggagttggagaccagcctggctaacatggcgaagccccgcctctactaaaaatacaaaaattagccaggcgtggtggcatgctcctgtaatcccagctattcaggaggctgaggctggagaatcgcttgaacccaggaggcggaggttgcaacgaaccaagatcacgccactgcactccagcctgggcgacatagagag

SEQ ID NO: 5453 - DNA, 6000 bp, Homo sapiens
ggcccgcccgggccatgctcccccggggcagcgggtgagccccagccgggaccgggatcggagcccgcgcggagcatggatccgggctgggggcagcgggacgtgggctgggcggccttgctgatcctcttcgccgcctcgctgctcacggtgttcgcctggctgctgcaatatgcccggggcttgtggctggcgcgggcccgcggggaccggggcccgggacccgccttagccggggaacccgcgggttccctgcgggagctgggcgtgtggcgctcgctgctgcggctgcgggcgactcgggctggcgccgccgaggagccaggagtccggggcctcctggcgtcactcttcgccttcaagtctttccgggagaactggcagcgggcttgggtgcgagcgctgaacgagcaggcctgcagaaacggggtgagttggaccaagcgcttgggtggtcccttcagcctttccttccaggggagggactgactgctcgtgctaggaggccagacgagggtgggcataaactggggaaccctatggcttctcttcccctcccggatcagagaaaagggtgccgctaaggctggaggttgtagaaatccaactgggtccccagacttccatttctgtgggcaaggtactctggttccaaacccatgcacaagttgctgttctcatagcaacgctaatccctgtgcctgagggcacttccgccttgcctgggtgctggttgtgttggggcatgggagacaggtgcacctgcagaaggaatttgcctgcttctcatgccaccacacccatttaacatttcatgccccaaatccctggtgtggtcaggcagatccccaaggagcctgaatcacccccctacccgacagtaatttcactgctacagtcaaacacatccttctcctccatgctggcctgtggttcactgggggttggggagtgttcaggtggagagcagattgacagtgcccctaccagtagatgagcttggaactgccccttgagggtcagtcacaaaccagtccagcctacttcctcccattgcaccatgggcatctggcctcccaggaagtggggcaggaagcgtggtcatgagatggagataaggtgggaggtagaagtctctcttttctggagctccctcccatcctgacccagcaatctctccttgctctcacagtccatcagctccttgctcagagggttctctatttccagccactatgagtttggaggctttaccttactagttccccagatgccggaaacagaaatgtccacaagaaattgctctatttactctgtccagctggctggctaaaagccagatggcatctgtcagtttacaccttgaacccacctcttcatccaactctccctgtaccttgtccctcggtcagaagcaactccccaggatagctgactcaactggacattggcctcccttgcagagggtggggagattgaggtttcaagcatccatctccccatcttccttggcctagcctttgaatgagacagctaccagagcaaaggagttggcttcccctggtttgccaagcaaatgaaccctatggatttgtttcctccatctcaagacccaaggaagagttgccagccaattctgtgccccttcctcaattctgtgtccgcactgctctccaggtggggctgcggtaggttgcttccattactgtggacgaattagggagcagctcttttgagatctaagcagctttctgctctctaataccgtcctgctatctgccttgaggaattagccaggcccctggactcttgggtcctctgagcttgtatctcttcccagtccccctggtacggatccccaaggccatgctcatcttcatctccaagaatatgaagcatcatactcttgaagcctccacatcttatttatttggaagaaggcttagcttcatttctgcagctcttatcttgaacaaggtggctctaccacctttaccggggcttagccctttccctctgcccagctattatatataggtggcaaccagcaccttaacttttttctatgtaggattttttgtttgtttgttatttgtttttttagggggtagggtaggggatgaaagggattgcagggagaagaagaaggaagctcttggtattccaggaggaagccagggtcttcagcttaaggtgatctagtctctgaggtggactacctccccattgctcagtggctcctagcagctacaggcccctggagaggcaggccttgaggggactacctcctgtcttaaagccctgagccaaggaggggccagaagccagcctgcagctgaggcctccgcagtggcagagtccagccagcaactgagcaggccaaccctgtggggggcagctccagagacctgatccaatgcccacattactccctcagagctccatccaaatcgcctttgaggaggtgccccaactcccacccagagccagcatcagtcatgtgacctgcgtagaccaatctgagcataccatggtaagggtctgatgggcactgccctctttggggtccaagaaggactgaccccaagggctccctttagtccagaggttcttaacctggagtctgtgaatgccttatggatctaaggattggtttcaggaagtctgagaatcccattgaagttatgtgcaaaatgttggatgtgtgtttatatgcatttttctggggagaggagtctttggcatttatctgattcttttagggatttatgatcctgaaaacatgaagtccttaggaaaacggaagtggggaggggtctgctgaactattacagggcagttcaaagcagggtgagcacccttcccccacatctgacccacctcgccggtctcaggtgctgcgttgccagctctctgctgaggaggtgcggttcccagtctctgtgacccagcagtcccccgctgccgtctccatggagacctaccacgtcactctgacactgccaccaacacaggtagaaggggatgtgggaaactgagttgggcaggggcggttccattggctcagcttcttccatttgtttcctctctgggatggaattcaggaagggagagtcctcgaattaggagtccttgggtaaatggggcaagtcagcccagtcactttgttcctgtctgtagttggaagtcaacctggaggaaatccctggtgaggggctgctcatatcctgggccttcactgatcgcccagatctcagcctaacggtgcttcccaagcttcaggccagggaggtaaggaggcagagctggcagagaagaggcagaacggggagggaggcagaggtgggggatccacctccttgttgttcccttcttctctctgcagagaggtgaagaacaagtggagctctccacaattgaggaactgatcaaggatgccatagtcagcacccagccagccatgatggtcaacctcagggcttgctctgccccaggaggcctggtgagttggcacccaaagcaaaagatttgcatgcaccttgttcctagggtgctatgtcaggattcttgctctttggaccttcttctgctcttaggtacccagtgagaagccacccatgatgccccaggctcagccagccatccccagacctaaccggttattcctacggcagcttcgggcatctcacttgggaaatgagctggaaggtgagagctggaagtggctgcgggactgccaaggctatggttggttgcagatgctctctgcccctctgccaagggtacagcctctttattctgcagtgacttcccatctctgatctgagcatcttctaacttctggttcatcacaggcaccgaggaactgtgctgtgtagctgaactcgacaaccccatgcagcagaagtggaccaagcccgcgagggctggatccgaggtggagtggacagaagacctggcactgtaaggagtaaccctgccccgaccccatgctccagagcagagaggatcaaacctttccagcacagtccttgcaggaatcagctctgttttcagtagcctttggcgtgagctcctattgtatgccaggccctggcgtgggtcttagggatacagacttgaccaagatacagcccccacccctgggtcaatgacaagcttgaggcagagacaggtgtacataaagaagatggtaaaaccgctccagttgaggtttatgtaatgtgccgtcagagtgcctaggtgggggggagattaattcccatgagggaataaggatcagagtaggcttcatggaggagatgacatttaaaccacactttagagcaagagtaggatttcatcagagtgtgaaagtattctcggcagagggaagagctggagcaaatgaaagagggtggcttgcaactgagagactggcaagacaggaagagcaggaccagggaggatttgaatgcatagctgagaagcatggtttccactcaggccctgtccctttctcttgggacgagagagaatttggaggccaggagaatctgattggagcatttatgccgttttatttatgtacacagctctctgcctctggcctgtgatccactcaagtgtgggttcagcttgctaattttctccttcctgccccatctcctcttgtcccacagggatctgggcccccagagccgggagctgaccctcaaagtgctgaggagcagcagctgtggagacagtaagtgaggggtgggaggggcacccctgggtgggtacagagtggggtctggccatgggcccagctcacagtgccatccctttccccagccgaactcctaggccaggccacactgcctgtgggctccccctccagaccactgtctcgaagacagttgtgcccactcaccccagggccagggaaagccctgggaccagcagccaccatggcagtggaggtgagaagctgacccctggggtaggtgggaggacacaggggatgggcagtctccgaggctctgtctcttctctctcccacccctgggcagcttcactatgaggagggctctccccggaacctgggtactcccacctcctccactccacgccccagcatcacacctaccaagaagattgagcttgaccggaccatcatgcccgatggcaccattgtcaccacagtcaccactgtccagtcccggccccgtatagacggcaaattaggtaaagagaaggagcctgggagcccagctctagccaggggcccgggactgcagacccaaggcaggacagtgaaagaggagagagccttaattccaactccccctgttttcagacattccattccagtcctaccacatcttcctcccaatctttgtctcttccaaactttcccttacctcctgccatttccccagcaattcctctcactctgccacccttctggatcctcctgcccctcctcatacaggactgttgcactcctaccttccagcttcccctctggcttttcacaggtgtccttagccccagctgactataattgtccatcctgctaccctcagccctccagcaccccctggggtcctccaacaaacccagaggcctctgtggcatttctaccccactcagtgggcccccatggcacttctgccattataggggccccactgaattgccccaacttcagggagccccagtaccccctctgtccccgctccatattttcatagcatctccccacaccttcagcaggccccatggcactttcctacactcccattagctcctggggtgtcttttagtccccacggcatcttcctaatcacccttgtgattaatcaccctttaatcattcttgccctctgagtcacccaaagtctgcatctcaacaaagacagtaggggtgggggccactctgaagcaactcccagctcactgaccctcccccacccaccagactccccctcccgctccccgtccaaggtggaggtgaccgagaagacgacaactgtg

SEQ ID NO: 5454 - DNA, 6000 bp, Homo sapiens
gaagtccttcagagcaccccacccctcctaataccccttccagtgaagctagagaaccaagattgtgcctgggaatctggataagtgtaatgagacaaatcacttcccacaggctaggcagacctcagcttttttgtctcagcaatgagaaagttctcaagggcctataggggagtgcagggtggagttcatttaattttcatgaacgttaatggaaataaaaccactgacaaacccaatagcactagacgacacgcaactcaagggcaggggcatgtctttatttttgttcctctcaacacagttcctggtacacacaaggaactcaaaatctgcttgctggttgattaactaatttgagttcaaccaaataatgtgacacccaaagtgattctgggcaatcatggtaacctgtcctctgggggtctctctctcggccacagatgatgcagcagcaggagttactgagtggtcagctcttaaatattgttcttatctgacaggtagagtagaaagaaccctgctgtaggagtcaggagttctgacttctagtctggattggccagtttataaactttatgctcctacgatcaactcctcctccttcctggggctcaatccttcacttaagaaatgaatggattatactaaagatcttccaaggtcccttctgaatgtatcattctgtgatgttacgagtccagggtcttattatgacccaaaacttagataaaaaggaaagactctgccccaaagacccctggctctcaggctgtcccctttgggcacctgcctttcgctgcgtcggcactttgattttggcttgttcatcctgctccccctgacttttctgtctacctccgattgttctatccaccatcgctctgctttatgcatctcttataaagttttatgggtttaaagtccatagatagcctcacctttgccattccttcatatcctccttctcagttctctctatttgtgacctcttttctctccctggagccctcttccccttttcaagttgcacctttgctctttctgctgaaatcctaacatgttggactatagcccagatgaaccacgattttattttgatcctgtattcatagaggagcaaaaaatagcatatatttttccagttcccagcccttccctactgccctagaggcatctctttatccagatttacacatccttttctgattaaatcttccaatatctatttgatgtcacaccactctctaatggccctgcatttcccatcttctcgcctgcactcctatgtgagatctccaccaggagaggggagcctttagcctttttcgacgaggagaagcagagctggcatttgttaagctagtgctcctcttttcgtctcttgtgtgtgtggaatagtgatagctctttagctggccccagcttgctctgggtaacatggagtaaaacaaaaacaacagctaatttctctttcattgggagttcttctctgttccagccctgcttcagtgtacagatgccagggttgcctgaagtctccatctactgcttcctcacctgcctgccaaccatccagagtacacatggcaggctcttctctcctccctcctttgcagtcccaggattattaaagggaatatgattgtttccttttgctcagggagtgtgtatgtgtgtacatgtttgtgagcttgaaaggcattgtcctatagatattttttataacctgaagcaattacagctgtcagcacagagacaagctgtgacaagttgatttatgtgtacagtatatgtgtatgcacgaaggaagggaagaaggagacggagatggtgggaaagagggtggaggtgggcgctcgttaggaatcggctttcaaggaggcagaaaggaagttgtttctataaagaacacaaataatgaaattgctttgaatgtcatcccttttcattaactcggatatgctgggaaaaataaaataaatccagcagtttttatgaagcaggagacaggatataagataagccactaagtgttggtcatatttagggattaagggctgggaagtgagttgacatatgattttgatcttcatcttttcaaaccacttcaatagccggtttgaataaaatggattttgtcttgttaattatgtgggcatctctgacctttcaccactttctaaacttctatgtttgaataaagtttggatccctgcgcccacgaagcaggtatgaggttgcaagtgccttttctttgccctccctgtgagttacctgagcttggctgggttttctgctgcaactgctggattgctaagcttagtgctttcccttcacgggcagagacaaagatggtttgattgtcttagatcaactgcatgcagactggtagaaaccaaacatctcaaagagcctgtaagaagaattattttcttgcccagacatactaatgaagcaatggcaggcaaatgtattaataaagcatcttccatcttaaatggatttctaagtattttcctgtagagttaatcatatatgtaggcccctcgggaaagcctgttgttgtcattatccatatccctagatgcaaaaactaatgctcctttgtacctacctgaaaattagatgcaagagccaggattagcatttatcatgaatcatccctgccattctcaggcctctagggaaatgactgcaaagctcagaatgagcccctctcctttccccatgactagcatttgtttccacttgttgtagtgaggatgtgtttaagaagaggggttgagagggaggagcataagggatggttgaaatgaatggatgaattattagaggtgaccccttgacttgtggagacgaagcccaaattcagcagactgaaagtcagcaaacatatctcacagctttagtatatcatcatatttatcttaacgtggtgaagtttttcaatttcctgtttccacaattgcccgttggaaaatggagacacaatagaatcttccaagaatggactagtgctaaagtaggttaattttcctcctttcctttcaaaaatacaaacaaagatcttctgctccccgcagatgtaattgtttattcctgatagtaaagtcatttgttgcagccataagttgacgattgatagttttggtgttatatatcaaatgatccccagtggccaaaagtagcagatgagtttccctgagaatttaatatcagaaaagtcaccggaggagaggagggaacaattggcccaatgatgagttaatgcaaagtattttgagatattcactgtaaagtcgcttcactcttgctggctaagcacgtcctagtcaactatgacaatggaaaggcaagccgtcttagtctttctttgttacccaggagtgtggtttccacttctccaaagcctacttctgtcctatctctatagttagtgtgagggagatttgattggtgaaatgtttgtgtcctctccaacgtggtatctacatgtaagtgattggtactgctcgaaggttgccagaatgagtattgtaccgaagcccttatggttatatgactcagttataatggttcagtctctttgataccggatggctttttggaagaccatttttctgttatttaacagttgttaacaacaacaacaacaaaaagcttcctggttgtgtttgatagagtctaggggaaaaacaaagccactgttgcctcctctccatccccaaggagaatgtgggtcagggctggaggccggctctgggaatccctgagaagggagcattattaatgtcaccaccactgtgcctgctgagctgctctgtgcttcccccttgcacaagaaccaggcccagccagggaaaggaaacgcaggccattccctcagagccgaagttaagggagaaataataatacaggcacaggaggaccagcagcagccagagaggagaagtgacagggaccgaggcaaatccagtctctccccgggtttcaagaatttgagaaacacacctcttaaagatgaaatcagctgtgcgagagtgtgaggcccaggaaacctgggagtctgctgtataaatacagcaagtggctcacactcatccacccaagtgagcacttttgcaggcccagcatcttttaatggcgacaaaacaagaataaagaatgtaagtgggtgtctgaacttgaccaacattttgatgatgcgatttttccagtttcgcacactaagaggcttctgtgattttggatttgttttatatatggcagatctctagaatggtagtgttgagtctctggggttttgagcagctttgtggggggctgctgggcgggtgctgtactactgaataactatgaggttcttctaaaacatcctccgaacactctgagtttactctgaatgctaatgggattaatctgatcattttaaaggtgcatgtatgcatgctgcagggtgttcctttcccagttaattagtttgtgacccttattaagatgtctcaagtctgaggctgattaaggctgcatggtaactttgtcttttttcctaatttggaagcgcgtaaatggttaaactcctggcctgggctgggctggtgcacagcctgggcccggcgcggcgggggttaaggtgggcgcccgcgccccgcgccccgcgccctcccgccgggatgagagcgcagtccgcgccgccagcccgcccgctcgctccgaggcggcaccgggagaaagtggcggtcagggatggagctgctgccatgacaaccccggcggtcggggcccgcgcgcgtcggggctgctcccgggaggaaggcggcgcggaggccgggggcggccgctgagcttggcgtccgcgcggctccggtgcgggctgcgccgcgccttccccagcgagctaccgagcttggggccgccgcggtccgctcccgccgcccggcctctccctcctcggccaccgccgcagcccctgccccgccgagccccgccggacagcggcggccgcagcgcgcatttgggctccgaggaagttgaccgaggcggctgccgcaggatcccgggcccggatcgcacgaagcccgcgcggccgtctcctccgcgcgccacccctgcgcctcccgcgagctccacttcccatctgctattgtttccgattgttttccggtggcgagcccggctccgaaacttacaaagtgttggatgtcccccgttcgaactgagggactgcagaccgcctctgggtagctggatgaagcccaccccgtccccttctggtaccaaagtgcttactcctctccaaagtgccgtgtctgaactgccgctgggaagaagcggctcctgagacgcgcccacacctttcacctgccgcgcgcttccccctcctcggccaccttcccggcggaagcagcgaggagggagccccctttggccgtcctccgtggaaccggttttccgaggctggcaaaagccgaggctggatttgggggaggaatattagactcggaggagtctgcgcgcttttctcctccccgcgcctcccggtcgccgcgggttcaccgctcagtccccgcgctcgctccgcaccccacccacttcctgtgctcgcccggggggcgtgtgccgtgcggctgccggagttcggggaagttgtggctgtcgagaatgggggtctgtgggtacctgttcctgccctggaagtgcctcgtggtcgtgtctctcaggctgctgttccttgtacccacaggagtgcccgtgcgcagcggagatgccaccttccccaaagctatggacaacgtgacggtccggcagggggagagcgccaccctcaggtagggagctgacattgttctgcgaactgatggtttgtatggggtcggggtaaggggcaggggtgcaggtgtgtgcactgaggcgtgcctgggttggcggagaggtcgctggttccctgggctgcacaatttatggctgcgctgggggctctgcccgggaatgtggcag

SEQ ID NO: 5455 - DNA, 6000 bp, Homo sapiens
tgtgttactggtttgtgtatttactatattttttatcatgttagcatgtagtccttctacttactaaaaaaattaactataaaacagcctctcgggaggctgaggcagaagaattgcttgaacccaggaggcagaggttgcagtgagccaaggtcgtgccattgtactctagcctgggtgacagaacaagactctgtctctacaaaagaaaaaaaaaaaaaaaaacagcctcagcaggcaggtccttcaggaggtattccagaagaaggcattgctctcctaggacaggacagccccatgagtattcttacccctaagaccttccagtgggacaagatgaagaggtggaaaacagtgatactgatgatccagaccctatgtaggactaggctaatgtgtgtgcttgtgtcttcatttttaacaaaaacaagaaaagtttttaaaaatttttttaaataaaaaagcttataaaataagaatagaaagaaaatatttttgtgccactgtataacatgtttgtgttttaccctgttttattacaaaggtaaaaacatttacaattaaaaaatttctaaagtaaagtggcagtaaactagggttgattttttaaaataagcttagtgtggactaaatgtacaatatttaaaacatctacagtagtgtacagcaatgtcctaggccttcacattcgcccaccactcattcactgacttccaatctcacaagctccattcacagtaagtgccctgtacaggtgtaccatttttaaaatcttttgtgtcatatttttactgtatttttctatgtttagatatggtcagatacacaaatatttaccactgcattacagttgcctacagtattcagtatagtaacttgctgtacaggtttgtagcctaagagcaataggacataccacatagcctgagtgtgtactaggctattccatgtaagtttgtgtaactacacgctatgacgtttgcacagagacagatatgatggtgctatacaaagtaagtctagaagagagacaggttggctgctaattcaaccaatatttactggcatcctagcagtataaaccatggaagtgtaagcaaggttaaatgtacttagtcttgaaggagcctctgatgacagtgtcaagtggtcactgctgtaatgacgttctgaacaagggccacatttaagggtgcctaggacagctgaagactgttgactttagatagacttgagccgaagtcttcaaaaagagtgaggaggagaaaacctgtaacactccagggattctgatataagccacttttatgtggataattccaaggctggctttggtgagattattaccatcgttaaggctgttgtttgaatatgataattcaagtaaagcactttggtacgctgcacgacacatagtaaatgattaattggtagcaattattcataaattactgtctgttctccccaagcttctaggcttccctaattaaaattctgatagctttaaagcttttcaagttccaatgcgtaattactgttacaaagcagtaacttgtctgaatcaccagcagcctctagtacaatattagaagcttccagttatttagttaagacttcagcaactagagccatttctggaatactctatgtggactctgccacttgactaaacttcattaaattccaatccagatacccatcccctcagaggaggaggacaggacagttatgcctgcagttataaactgagaagtgttgtgttccaagctctgcatggaattgggtaaattagctacaagcctgaaataaggaagtatgcatctgcgtttttttctttccagcacagaagataagaaaccactttcagggcaaggacaaataccttcttataccccagtatctagcacacaggcactcagttatttttggagaagaaaatctaccataataccactctctcaactaatacatttttcacctaacatgctttttctgaatattaaaaaaactgtgataagatacttggagtatatacttctggcctttattttcctgtgtgcccaaggctatttttccaaaaatgggaccatgatggcgtgttttttgtagaaacttttccagtattactgaataatctaatgatttttaaaatgaagtttcaaatattttaaaaataaatcatccatgtggcaaattaaaaaaactcaatagaaacataaacgaagtgtattcttccatgatgataacactattaaattacttgggaatccttccagagaaaaataaatgcacttacctcaatgtatatgtgctttatttccacaaatgggtcacattctatacactgttctgcatctagggtttttattgagatataattcacagaccagaacgtttacattttaaagtgtataattcagtggctcttagtatatttacaaggttgtatgacttatcgcaactgtctaattccaggatctttctgtcaccttgaaaagaaacctgttagcagtcagtcctcattcctccctcctgcatgccccagcagtgactgatgtactttctgtcttcatagatttggctctcctgggcacttcatatgcaaggaatcatacagtattgtggcactttgcgactagcttttttttcactaaacataatgtttccaaggttcactcatgctgtggcatgtatcagtacttcattctgttgtggccacatagtattctattgtgtggatatatcacattttgtttatccattcaccagtaatggacatatgggttgtttccactttttagcaattttgaatcatggtgccatgaacattcatgtggaaacttgtgtgtgaacgtagttttcaattcaaactacgataagatacttggagtgtatacatctggcctttattttcctgtgtgcccaaggctatttttccaaaaatgagaccatgatagcatgttcttatagaaacttttcctgtattactgaataatctaatgatttttaaaatgaagtttcaaatattttaaaaattatccatgtggcaaatttgaaaaactcaatagaaacataaacgaagtgtattcttccatgatgataacagtattaaattacttgggaatccttccagagaatggcagaagtatatacacttgtgagtggaattgctcagtcaaatggataactctatctttaactttttgcagaaatgccaaatttgtccagagtatctacaccattttacattcccaccagcaatgtttgagggttccaattttttccacttccttgcaacatttgctatttaccattttcttgatcttagccatcctagtgagtataaagtggtatctcactgtgattttcatttgcatgttcctaatgactaatgatatcaagcatcttttcatgtacttattggccatttgagaatcttctttggagaaatgtttattcaaatcctttgcccatttttttttaaagaggcaaggtcttgctttgttgcctaggctggaatgcagcagtacaatcatagctcactgcagccttaaagtcctgagtccaagtgatcctcctgcctcagcctcccaagtagctaagactaaaggcgcaacaccctgcctggctaatttttttattttttatttttgtagagttgggatatcactatgttgcccaggctggccgcaggcaatcctctcacttcagcctcctaaagtgctgggattacaggtgtgagccatcacactggcctcattgtccatattttaattgggttagtctttttattgtagagtttaagaatgttttctatatcctggatactatgctcttacatatgactttaaaaaagaaatagagagggggtcttgccatgttgaccaggctggtctgaaacttcccgcctcaaacaattctcccatctcagcctcccaaagtgttgggattacaggtgtgagccaccgcacctggtggtttacatgtgatttgcaaacattttctccctttctgtgagttatctttttattttttgataatgtcctttgaagcacaaaagttttaaattttgatggagtccagtttacctatttttctgccccccccccacctttatttttttttttttaaatcaagctccttccatgttagcacttgaaggcccacgtcatttcttatctgcatggaacttgcattgtaaggaattctattgtaatttctttaacactttttaaaaattaatggactgggtttttcaggtttttttctgaccattcttgagcatatatcttatacatagctttggctgggcatggtggctcacccctataattctatcactttgggaggctgaagcaggaggaccacttgagcccaggagttcaagaccagatgaccgggcaagaaagtgagaccttatctctctaaaaaaaaaaaagaaaagaaaaggaaaaaatccccaagtaacttcatagcgtaaattctaaaagtggaattgctggatcaaagggggcatgtgtttaaaatcttggcagatattaccaaatttccctcttaacagtataaatgcctgttcctcctccgtcccacccccataactatactggctctgatgagaccttggttttctgtaaaagctctatttagaggtgtatcattatttacttaattgttctcctttacaacccacctgggatgagcatcttgcctagaagtctctacttgcacaggatacatacgaaatagaattgaggattcaaaagcagatacagaactcttcccacttactttcttacccttgtgtgtgtctccccacagggttacaagtgtataacaagtgttggaagtttgagcattgcaatttcaacgacgtcacaacccgcttgagggaaaatgagctaacgtactactgctgcaagaaggacctgtgtaactttaacgaacagcttgaaaatggtgggacatccttatcagagaaaacagttcttctgctggtgactccatttctggcagcagcctggagccttcatccctaagtcaacaccaggagagcttctcccaaactccccgttcctgcgtagtccgctttctcttgctgccacattctaaaggcttgatattttccaaatggatcctgttgggaaagaataaaattagcttgagcaacctggctaagatagaggggctctgggagactttgaagaccagtcctgtttgcagggaagccccacttgaaggaagaagtctaagagtgaagtaggtgtgacttgaactagattgcatgcttcctcctttgctcttgggaagaccagctttgcagtgacagcttgagtgggttctctgcagccctcagattatttttcctctggctccttggatgtagtcagttagcatcattagtacatctttggagggtggggcaggagtatatgagcatcctctctcacatggaacgctttcataaacttcagggatcccgtgttgccatggaggcatgccaaatgttccatatgtgggtgtcagtcagggacaacaagatccttaatgcagagctagaggacttctggcagggaagtggggaagtgttccagatagcagggcatgaaaacttagagaggtacaagtggctgaaaatcgagtttttcctctgtctttaaattttatatgggctttgttatcttccactggaaaagtgtaatagcatacatcaatggtgtgttaaagctatttccttgccttttttttattggaatggtaggatatcttggctttgccacacacagttacagagtgaacactctactacatgtgactggcagtattaagtgtgcttattttaaatgttactggtagaaaggcagttcaggtatgtgtgtatatagtatgaatgcagtggggacaccctttgtggttacagtttgagacttccaaaggtcatccttaataacaacagatctgcaggggtatgttttaccatctgcatccagcctcctgctaact

SEQ ID NO: 5456 - DNA, 6000 bp, Homo sapiens
gaagtatatccaggcacaaaacaggagccagcctaggcttttcctggggaggatgcgtccctgagtttaggggacctctagcaggagcacacgtactgggattgttacgttctttgtcttgtccctggtcccatctcgcctctgtgcacccttggaaggaaaagattctaggaggcattctggtgttcgtaaacctccgccatgtttgagtcctggagatgaccatgacatgttaagccttaagtttggtccctgcccagacagcatgctggacttttgcaaggcacattaggggtgcggccactgctttctggctgctgtggctgaatcggcctgaggggaaaatgaaagcaaaaacaagccccagttctactaggaaacccaaactgagcaacttcaggcttatccagctcctgggaagaccaggaagcaactgaggagcggtgcaccgagacggacagggtcgggggttaaccccctgccgctaatatttccgctccaaagggagcctctcctttcttggcaaaatgtagaaacctagattccctcgcaagatccacgcgaccagcgtcggccacgctgtacttcctggggtccccttgtttagtgattcttcgttatggccgcccgtgtgccttcgactcaatcgggaggacaccgaaatccagatttcggggttgcagggcgcgggccccggcttggttagggcaggggcagccattttgagaccagaagagggcggaagggaccatattgagaacgccggttgcctgggggccgccattttaagagaagccctgtacggtaaactccgtgacgtgggggctgccatgttggtacggccatcttggaatgggagtggctgtgggcgcagccatcttaggtataaaatcggctccagtcgcggtaactgaagccaagctccgcccctaccctcctaagagttcctctgctgtacgactgcactcccgcaccctcccctaaatcccccctcttcggcctgtttaccttttaacttggcttcgttgcacgtttgtgtgtgtgtgtttgctcttcgcagcctcttgagcgtcttttgtacttaattcttacactgtggacgctctctcgcgcccgccatcccccgacccctctgatctccgatccttgacgatgtctagcctgcattgattggcccttttccctgggtatggcagatctattgcttgatgatcctctccccccaagaattctaacacaggagctgtcctgaggctctggatgactttattcttcaaatggctttaccctcccagtagctccaggtgagactgagagcaagaacctggcccatccctctccattgtctgagcaggtcaccgagggaagcgggcaggacgcgctggcagagtctgacggggccctgctgtgggtggagcaaagggtgcctcatatctctggggtgcttggggtcggccacaaaggtggtaggaaatggggtcgacagataggtgagggtgggccttgtgcttcagataacctcacatggtcaggcaagggttagggatgggatgcaaggagcctaaggggctcacaacaattactgacctaaggaagggcccaggagagggaaaagggaggagttgtgagaagggacaggggagctcagaggagagcacagaagaacttcttctcccggaaggggttctccgaagtgggcacaggggtgatgaggggatcctcacaggcgtgggcatcacagtaagtcatcaggtctgctgctgccttggacacctgggacacagccaggaagggtattgttagccaggacctctgaaggggactgcagcctccctccccaaatgggttctcttttgccatctccagggctccttacgacttgtcttctccctcatcccccccagaggcctggggacagctctctctacagagccccagactcctcccctgacctcagggagtgaaggaaagaacgcatctcttatcttgagctttgggaacctgcagcacagcacagcctggccaactaatgggagccagccagggtcccacctacctttatccgacacaagctggcttcaatcttaagctgttccaccatcttgcgtgcttgcccaatactcatagtgctgttcaccggggtctcacctttcatcctggaaaaaagagggacctctcagagcacagtctcagctggaggcccccctccatgctcactccacaccaacctttacaaggctgtggtcataccccaatattttgttcccctcctatcctcctcctcctcctccagtggactgtctcatccctgtattcctcatggaaaaaaatagggtgggatgaggtgctccccaaactccctcatggcctgggccacagatcattaaaccttacacaaatgatttaaggcttttcagcccttcaaaccatgtgtgttcccagctctgaagacctcaaccaaccctgatgaggagggcacatcacccctgtctgctccagtgagccccaacaggagaaaaacaggccattacttacctgaagccacaagcggcagtagcagccctgggtgtagggtcagtggagggtaccaaaaccttctgcctgaaatgggtgccccacccagtagggagttgcagctgaaagtatctgatgcagaagcagtgactatacgaaaggaggcccctggggagggccaggccagaggtctggtctcagtttctgcagctcaagcactgtctggatggctggtacctgaaggatgaaggatgctagaaggagctgctcagatcctggagcataccaactgcctggccagtgggggagcctagctgcctgcatccctgcgcacacccccactgtcgctagttcactgcctgcccctcccccattgcaggcatcctgactctgggctagagacctccccaacagagctgaggccaaggccgactccccctctcaaatggcgtggtctgggcctatgacggcccctgcagtggagtctgtactggctgcgggggaccctgctcatttgaaaatctgacatcagctgggcagtcgcccccctcctcctttcctccctctactctgacacagcacttagcacctgaatcttcgtttctctcccagggaccctccattttccatatccaggaaaatgtgatgcgccacaggtatcagcgtctggatcgccacttcacgttttagccacaagtgactcagtggaagatccagagtcaacagaggctcgtcaggaagatgtctacagaaaaggtagaccaaaaggaggaagctggggaaaaagaggtgtgcggagaccagatcaaaggaccggacaaagaggaggtaggggcccttgtggggacagtcagcagaaatatactggaaataggtgggctggcgtgaagggggcggggggatggattggttttaagaatttcattcattttgaatagattacttcccacgcccgcagcagtgtgcaaagatgtacacaacactggccttgcctctgaaggactttatctggggtgattagacgtctacaaaatagaagactgccaaaagctagtctagataatgtgctgtggggactctgagggagagtgtatccagttagggtcagaggaggtccacaatgctaccacgctgggaacagggcactaatctgcctgcgcaacaacgcaagaggcccaggttgccgcaaactgcaacatgctctaggcgaatgcccccgccttagatgcctacaggtcctaggagctgtgggcgataaaaatcagcgccagctggatgaccgcctcactcggccgcttcgcgggtgaaatggcctgtggtgaaggtgtgcacggagggctgtgattgcagtctcaagggagagccgagcggaggctgcagtcagcgcatcccctggggcacatcttggggcctgcagggaggcaggcgtctttcccctttggtcacggtaaccggagggaaacctgccgcagagagagccagtggcgagcgcaaggagacagcgacctcgcagctcgggaaggctccgccccgtcccgccccgccccgccgtgctggaccccgccctgggctgaagccccgcctcccacggctacaaaagcggccggcggagaggggcgggacttccccgggagccggaagtcccgtctcacggttgccctggcagcgcgcgaggctggtgagtcggcagccctgtggcagccggcgggctggtttccatggttgcacgattaggtaggggctccgggcgctttgcccacccccgagctggaggggactggcgggaagcggcggttggctgcagggcgctccgccgggcgtggggtgtagccgtgtcggtgagcgagctctgctcgaggcggagaggagaaactcgggaagcaattgtggctactctaaggctactggtttcgagtcaggccgtgcgaccttaggcaagtcgcacattctctccgtgcagctgcctagcagtgtggattcagtatcaccgtgtgtgtaaagctctttctaagaatcgtaaggtgcttattctttgttatatagctgtgaatgagaatcaaggtggtttgtcccagcatcaaatgactggagaaggaattccactgaggagatttagcactgggcgggagggaacacagtggaggaaagggaaggggtaattggcagagtggcacaatcatttggagaaaggccatatatatgaaacaatgactttgctatcctgctatctctcgttcctcaaagccagtccagtaagctgttttgtccccacctccctggggaaaggagtcactcttttccctcaccctctctttccaggaaccaccagctgctgcatcccatggccaggggtggcgtccaggtggcagagcagctaggaacgcaaggcctgaacctggggccagacaccctgctctcccggccatggtcaacgaccctccagtacctgccttactgtgggcccaggaggtgggccaagtcttggcaggccgtgcccgcaggctgctgctgcagtttggggtgctcttctgcaccatcctccttttgctctgggtgtctgtcttcctctatggctccttctactattcctatatgccgacagtcagccacctcagccctgtgcatttctactacaggtgagaggggccttctatcaaaatagaggactcctatgggaattgtaaggcccttggagttcattcagttcaatcccctcatttacagataaggaaaactggagccaggtgtgcttccagggcctctcaactttcacagcccaaggctagatttgggttgccagggctagggttctagttctacctctgattactgaattctggttaaaaaaaaaaaaaaaaaaaggaaaaatatccacttctatcattatgaggatcaattctattttggttggatcacccctctctcagggccaatgtagaattttgagccaactcaaccctttagtgcagaaccaacctggctttcagtagaggagctattaggaaagcagcagtttgctttttacattactgcctctcagtccctgaaagtcggctacacaatagagattatggaaacataagatgagtaggcgcataaacttgcttcccagagagtcttgcgtcttgactggccccttaggttccttctcattttacaaaccctgccaagtgccaaattctctcttttttgaggtggagtctctctctgttgcccaggctggagtgcagtggtgcagtgtctgctcactgcaacctcccaggttcaagcaattctcgtgcctcagcctcccaagtagctgggattacaggtgtgtgccaccacatctggctaatttttgtatttttagtagagatgggtttttttttgttttgttattgtttttgtttttgagatggagtcttgctctgtcgcccaggctggagtgcagtggtgccatgtcggctcactgcaagctccgcctcctgggctcacgccattctcctg

SEQ ID NO: 5457 - DNA, 6000 bp, Homo sapiens
cgattccccactggcagctgctttaatggtgaaggatttcttgagtactagcagaaaacataatatataaagagagttgtgtgctagacaaatggactaagaaaccatgatttcttggggttttgttcttgctattttcaagctaaaatgcacccctgggattgcagatggtcataagaaaaattatcaagtgaaaagttaaccactgccaaactcatatgattgaaaattggccattgttatgtttagaatattttttgtgcatttgcaattaagaataaaaagtcagaatttaaaaatgaaaaaaagaaaagaaaaagccacttcaccaaacatttcctaaaattcacagattcccaggggtttgaagacagtattcccaatttggaatgtagtcctgactatcccaaggatcttggaatctcagggttagaagggatcttaaaaatcacccattttaacctcccctcaatgcaggaattctctctaaagcctcctcaacaggcggccaacccccatatccgcctgaatgcttccagagaaggcgagtcgaatcctttgttggacagccctgattgtttttcctgatgttggtgatgggccttgagaaaaagaaaaaaagaaaaaaaaaatctcagaacaattggcccatttagcaaacctcttgcctgtgaaacatggggctatttccatggtgcagctttaaagtactcaggaatgtatagggttaaaaaaaaatcaccatcagctgacgggtattcctgcacgctcccttccaaatactgatacccactctcacactagcctgccaagattccacttagcagctggtccccagttacatctcttcagttgacttcccaagcaagcctcccagaggcatatgtgaatgatgatgcacacacacaaatatttgttaatgaccatgggtttgggaaggtgttagtcatggctagcatcataccctttacagaagaatagagaggctgttgcagccccgtgctttctcctgctgctggccgattgcttgctctgaactaaccctctaacccttgggagtctgtgtgcagcagtgatgtgagctgcatccgggctgaaatgggagctcccgctatggcactggctcaaggagctaatctaaagagaaagtattttggggaagacatcttggttgcacccctcattgcatcttgactaattgcttccaactccgggggcttccagggacaatctcattgttcttttctctccaagggtcagccatgttaaccatttgttaatttcttctgaacagatcaagcaaaagtagataatcagccagaagaattagtgcgtagtgctgaagatggtaaatatctttatgtatttgcgtgtctgtctttgtattaacttctggggtgatttgggcagtctccgggacgcagctgttgggtaaacagaagaacgtcatttgccactatgtggtgaatagtgcctaagttactataaaacagttctgatttggtacatttaatatagtttgtattcttaaggcttcttctggtgatactgtcatgaggatctcatcagagacccttgtgaagcaagggtttctataaatagaaaattgtatttctttggatgtgagctgatttttgctactctgacttgcagaactctttgtaaaggcaggaagagtggagtgaattcctgggttaagttattcttctgtttgattctcaagtctcagcatttagatctctctgggcacaactggtaaaatcttaaattcaaaggaaagagtcccagaacaagggtgggaaatcgtgcctctgcttatataaataactaaatatagacagagggtgaagttgattctgaatataatggagccagaagatcttgaagcttgtcagtggatcaggtattacttggctctgttataagatgaatagtatagtggtgccttggttgagggagagacagaaatgagtctgatttttatattgcagaatttatgcaaatgtataatttgtatttgcatgctggattttatttacttgttgttaaatttgccttcactataatcataaaaatgtgtactcactgagctttcccatataaatgcagcaacagagctccttaaaggtcattctttacttttatgtaatcgttctgtctttcttattttatgtttacaacaacctcactgaagttgatggggcagggatttttatcttcattttgctgataagaaaaactcagagaaattaggtgacttttctaagatcctatagttagtcagtcactgggagggcaggaaatagaatctcagcttcattactcctagtccagtgctccttcccattttccatactgtggtctagtgaattacaggaaggatgctccgtatctcttttgtttgatcccagatttttagttgaacaggagaccttaaagaggctaatgaagaagagtcacagtgaggaatggatgaaagcaagatgaaaacctgtcagatgtattctgctgtctcagttgtgaaactgacatttgagctttactttcatgtctctttaatccttctgttaaaatggtatttattctcaatgttgccctcctgagtagatgagaaaccagatcagaagccagttacaaatgaatgcgtaccaagaagtgagtagcaggatctttctcacaaatgactaaacattccactttacatattaaatatactgaaataactaaccccattaataacacagtatttattattggcactaaactcctgcagcttgcaaagctatttcattacgataagggttttattgaaaacattttactattgtctgtgttgaaagaatgatttgtggttccactgagggagagttgtatattaaatatatatatatatgttattgctgatattattgtgcttttgtcagtctctatgctgtttgaatctctgcttaaaagcaagttggcaccttctgatttcatttggtttttatgttgcagtatgattttgagtattggatctcttgtggcctctgtacgaaactgtagatgtgaattcatttataacttatttggacctatgaaagaactgttagagtatgtgcttctctccatatccataaaagcaaatcttattatgcccagggtttaaactctgagtttcaaaactgccttgaatggtaaatgttctaagtataaaccaagtgaacaagtgaatctaagaagtaaatgtatacctgtggtgactaatgcccatctactaattaatgtctatcatcaagcaaagataatgtttgttcgatcttttctgttcaatcttaagattactctacttagctgtgactactatcttaaggacaaataacacatttaaaaagtactcagatggcctagtaaagcatgcagctctgtgtgtgtgtgtgtgtgtgtgtgtgtgtgtgtgtgtatgattttttagcttcttggtttcactctgtttcataaaccctaggcactgggggtatgaagataatgatacacatgtctaccctcagggccacaatattttaaataataatttcccaacagtctttggatatgctaatagggcttaatgaggaaagcagctaaacggaggagccattagatagaaaaccaatgtgctgatggctaaaagtcagtgacatgtagtgggaaacctgaaactttgcttatgaggtcctcctgccagcagtgaaggtgctgaactttggcacatgacttgacaaattcttaagaactgcctaggaaagaagagagtccaggcttcagctcttgtgagtatgtgctctctgtctgactactgcagatgaaacaagccttctgcccctaaggggtgttaggtaaaggggcttttccagttacttttgaactaggacatatttaattttgagcatcttataatatcttgctatgttttgttcaaaatttagtctgtggagtaaaagcaaaacacacatagacatatatgcctaaatatctgtatctttattcatgatctcctaattggcttagtttattggtcaaggcacatagactactcctgtgctgaactctgggtaaattaatttgtcccttttttgtgatattttccaaaatgactgttagtgccttttcactggtaaagagtatattcttaccacaaaaatcaaatacatgatccaaacacaaatgatgaaagcccataaatctaaaattgattacatttgagtagtgggtataattgaatttgaccttcatagcatcatccaacaatatactttgaaaatagtagggtgcaatgttataacaaaaaagtttttgcattctcattggaccatattgtgggacctaatcttacactgctaccagtataactctccctaatacacacacattgttgtttcatgggaagtgattaaagtaggtgtcattttagtgagacaccataaatgcattctgatgtgcatttacctatgggagcctaaggataggtgaaaattgttatgtgagcaaggatatctttagtacgtgtagctaaatttttagtttttccttcattagatttctttaaagatgaatttaatgtttaagcatgaatttgagtcttttgtgttatgtatataaatataatttgatttttacctattttcttaatatctcttataatgataaagtcaatgtatctgtttcattcacaatataatttaagattctttatcatatgatatttattagattagaaaatacttatatagagcttactctgtgctaggcactaagtgccttggaaaatattaacttattcattataagagctgtgattcaccataagaaaagcttagatgttgtgattcttagaaaaagaagaaaatagttttctaactaggtgtatgcaaattaggattataatttatcctcttcttgtaccttctacacatatactttctatatcagaaagaagacatatgctacattttcttattaaattcttagagtaccctaactttaaccattctaactttgccttgggatattgaaaattctgaatcagtgaggtatctaaataatttatattttcaaaaaataatgtttattttataattctgagtgtaaaacactatcagaaaagtaatcctcatgctcactaaacaaacctactctaagacactcaacaaccagaacagttttattattgagttgtgtacaaaaatcttgactgtccagatgaaatagtttttcagcctgcagtgtgttagtgatatatctcaaggagatgaaccaataaagtacagactttgtggtctgaagctctgttgtgaaaaaataagctaaaccaattcacactgacagtataatttgattcaagtgcagctccagttcaataaaaactaatgtttttaaaattaactttgttttgtatttggttcaactccttgctagttctctctctatataatttataaaaactgcatgttgctaatctcatgatcctgtgcatgtggactactctgcctttaacttttttacaaaaacatgtttgttcatagattaaataaaagtatgttttcaacttaatgtctaatgttttctgacaattgtaagaataattttgaaatggaaatgctgctgtttagtttccacagtgcctacacaacctgataatccattttctcaccctgacaaactcaaaaggatgagcaagtctgttccagcatttctccaagatgaggcaagtttgtcttttgtaccttcagaaaaatggagacagagggttggaattgctatgccaaggttggtgtgtttgtattccactgtggcagagatcaaagaggtcagaaggactggcccttgcctttcaagtcaatagaagtagtgttgttcatcctggaacagggaaaggcacatctcatttgactcaaacagtaactccttttggttagtgaagtcaaattgcatagatttgggaatgtgacttttgtttcaaagttagtacaaaataagaaa

SEQ ID NO: 5458 - DNA, 6000 bp, Homo sapiens
ttaaacctttaagcttatagcttgttttggggttattttctacctaatcttgttcccacatcttaggaatgtaacatctttacaatggaaaggtactaatctttataatgggaaggtactaatatacccaaattagtgtttttatgtacatttgatttgtatctataactttttgaaaacagttttgagccaggagccgctgaagtgaaataaggaaaacatatgaagtgttcattatctaaagagttgttggtagtttattaagattaatttcccaatgcttttgatacaatatggtcctcaaagttttatttttcttcacagtgacctatcggggagtggccctactatgtatctattaataatacacaagctaagaaaattgaaagtaataactcttcatacatctccccctctgccctgcacttttaaaaaataccctggtacaccaaattctgatagtttttgtttgtttttgaatatctttcgattgtctacttttttctcttctacttttatacctttctcttgtctgacgcagttgcttaactgagtccacccctctccctctttaaaatctttagtggcttcatctcagttttattttatataagtttgtccttaacttcaaggacattcatggtctggcctttaccagtttctccagccacatctttccctatgcttgttttttattccctgtattttagccacagtggcttcctttccttttcttgtatttgacatcttttgtataggactttgtaatgctctttcttctcccttgaaacacttcttcccctctactcttctggatttcaactcttgtagcacttacctagggaaaccttttgtggcctcactctgattgggtccagtccattgtagttctgtgtagtacttttcacagatgtaagttttttgtagttgtatttgataccacttctgttagaccataagcttattgaggggatatattgtgtctttacataactttttgttttcccagtgcctagcatattgtctaatgtgtagtaggtgctgaataaatacttttgaatgaataaatgttaaatgtcatctttttccacctaactagtttacttaaaatacataaagttcaggccgggcatggtggctcatgcctgttaatcccagccctttgggaagccaaggtgggcatatcgcctgaggtcagaccttcactaggcaacatggtaaaaccttgcctctactgaaaatacaaaaattggctggacgtggtggtacacgcctgtaatctcagctacttgggtggctgaggaacaagaattgcttgaatctgggaggcagaggttgcagtgagctgagataacgccactgcactccagcctgggtttcagagcaagactgtatctcaaaaacaaacaaacaaaaaccccgtaaagtttaatataactacattcttcttgttccctatcattctgtaatacatttctgttcttggtgaaatgtaatctttttatgtgtatatgtgttttagtaacagttattttttaatcacaatattttatagaatgttggatcttcttcaagccaggcatcctcagataagtcttacattataattcatgttctttttcttagataaagttctaaaggaaattgttgagcgtgtttttcagtcaaactactttgacagcacccacaaccaccagaatgggctgtgtgaggaagaagaggcagcctcagcacctgcagttgaagaccaggtacctgaagctggtgagtattaggtggatatcaactttagtttagggtcctggttttatttgattttgctacaaatttaaactatacacttacttagttttcatatatgtacactagattttatttttaaagagactttaagcatgacaaagtttttttttttttttttttttttttttttttttttggagacagagtctcgctctgttgcccaggctggagtgcagtggcgtgatctcggctcactgcaagctccgcctcctgggttcacgccattctcctgcctcagcctcctgagcagctgtgactacaggcgcccgccaccacgcccggctatttttttgaatttttagtaaagacggggtttcactgtgttggccaggatggtctcgatcccttgacctcgtgatccacccgcctcggcctcccaaagtgctgagattacaggcgtgagccactgcgcccggccttgacaaaatgttaagacagattatcaagagtaattcctaccagtattcattatatttgtcttagtagtcatttgtcttactagtcttgatcactattataaactgatagatagttcttttgcagtagtattgatgggcaggagtatgggtgagggccagctgttacaaggattttcaaataggtttctgtctgacatgcccagatttgctatttactatgccagtgcattggaggaatagtatgagttgcttttgttttgttttaatcatggggagattatagctccataatcttgaactataaattcctccaaggcaaggggtcttttccagttaattttatcatgtagcacaacactaattatatagctagacacttaactgtgaatacttttatgataactcttatgttgatgagtaaaattctgaatacaaggaaacattggagcataagttttgttagaatcagagtgcctgaatttaaatcttcgcttcaacacttactagctctgtaactttgggcaagttaatgaaactcttgtacctcaggttccccgtttagaaaatatgtcaagtgtgtatacagtgcctgacacgtggtaagcacttagtaactggtagctagtaggttgaaactagaagtgaagattgtacattggtggagttaatagttggagattaatataaggcaatctttttccccctcttaccactttactaagtaaagtaagatttttaatctgtatgctgcttcatactactacttatgagacgggagagggcttttaatatagtagctctttatttgcattatacattatctgaaatagctactgttgaacctaaagtaattctggaataaatggtaaagaaaactttctaaaatataaaacactgttaattaactttataaataagtttgtaagtaaattcagattatgtgatggcaaactatttacttatttggaatttaagttgaattcttttttttttttttgagacagtctctgtttgtcactcaggctggagtgcagtggtgtgatcctgactcactgcaacctctgcctcccgggttcaagcgattatcctgtctcaggctcctgagtagtggggactacaggcgcatcaccacaccaggctaatttttgtattttcagtagagatggggtttcaccatgttggtcaggctggtctcgaactcctgacctcaggttatccacccgccttggcctcccaaagtgctgggattacaggcatgagccactgtgcccagcctttttttttttttgagtcagagtctagttctgtcgcccacgctggagtgtagtcgcatgatcttggctcactgcagtttccacctccaagggtcaagcaattctcctgctttagcctctcgagtagctgggattacaggtgcatggcaccacacctgactcagttttttttgtatctttagtagagacagggtttcaccatatcggctaggctggtctcaaactcctgacctcaagtgatctgcccacattggcctcccaaagtcctgagattataggcgtgagccaccatgcccggccttaagttgaattcttttttgtgggggacagggggcactgagtctcactctgtcacccaggctggagtgcagtggcgcgatctcagcttgctgcaacctctgcctcccgggttcaagcgattctcatgcctcagccttcccagtagctggtattacaggcacacaccaccatgtctggctaatttttgtatttttagtagagacggggtttcaccatgttggccaggctggtctcaagctcctgacctcaggtgatcccccaacctcggcctcccagagtgctgggattacaggcgtgagccagcgcgcctggcctagttgaattcttaactttaaaaaagatttattacactttatggcatcatttctaaaaatagactttatttttattttttatttttattttttgagatggagttttgctcttgtttcccaggttggagcacaatggcctgatctcggctcactgcaacctccatctcccaggttcaagcgattctcctgcctcagcctcctgagtagctgggattgcaggcgtccgccaccatgcccggctaattttttgcatttttagtagagttggggtttcaccaggttggctaggttggtctcgaactcctgacctgaggtgatccacctgtcttggccttccaaagtgctgggattacagacatgagccactgtgcctggccgactttattttttagagcagttttaggctcacagcaaaactgaacagaaggtgtagagatttcccatttactttctaccctcacagatgcacagcctccctcattgtcagcatccccccaaccagagtggtacatttgttaacaatggataaacccaaactgacacattattatcacccaaagtccatagtttacatatgggtttactcttattgttaataattctctgggtttggacaaatgcataatgacgtgtatctaccaatatcacacagagtagagtagtatcactgacctaaaaatccttttgttttgcaccattttttaacctcttagaacctgagccagcagaagagtacactgagcaaagtgaagttgaatcaacagaggtatgattttaatttaatgctgcctttactttgctgcctttcaaacaaatgtctcaaacatttactttgctttgcagtatgtaaatagacagttcatggcagaaacacagttcaccagtggtgaaaaggagcaggtagatgagtggacagttgaaacggttgaggtaagagttctctgtattgcaaagttgttgtctttgtcttcagttagtaatttttatctctactgagaacaaattaagattgttttttgcattattagtacatttattataataacagactcattacaccagactgttacttccaaaaaatgaatgtttatccctgtggatgtttaataggatccctgctttgctgaaccaatctaaaaaaattattttatacaaagttatctgtggattaatctgttaccatgatttgtctcttactgaaattaggttgctctgtaaaaatctgggctcccacactgatagctgtgttttggggtatcatcttgcactcctcctttaccctaatgctgtttggtcaccaggctgtagacttcctctagcgttttctaatgctgtctctcaactgataatgatgatttttttcgggtcctcatgtctagttcagtgactctcttcatattactcctctctgactgcctccagaccatcctattcattgtcacaacttaattattggaaaagttagctttaagttacttgtacttgaggctctcagtgatgccttgttacctgtaagatacagtctaaaaaccttaccaactggtcctggccttccttttgatcttcttttagatgtctttctttacacccccaaggtgcaggaaaatagctgtaagctgagggtaatatgcttttccttttaatatgttattcttatatcaagaccattctcttggccgggcacggtggttcatgcctgtaaccccagcactttgtggggctgaggcaggtggatcacatgaggccaagagttagagaccagcctggccagcatggtgaaacccagtctctacttcaaaaacaaacaaaaacctgggcatggtggtgcatgcctgtaatcccagctacttgggaggctgaggtacgagaatcacttgaactggggagaca

SEQ ID NO: 5459 - DNA, 6000 bp, Homo sapiens
aatttaatcacatcaatgcaatctttcttacattgttaactaaagaaaaatgggtgccctttgaagatttttaaagattaagtaacaaaaaaaaaaaagtcagaaggagtcaaatttggactataaggtggatgcctaatggcttctccatagaaattctcaaaaaaattgcctttgtttgatgagaataatgagcaggagcattgtcatgtcatgatggaggaagactctctggtgaagcttttcgatacattttttcttcaaaagcttgggctacctttctgaaaacactctcataattagcagatgttatcgttctttgaccttccagaaagttaacaaacaaaatgccttgagcatctcagacaacggctgccatgaccttggctctacactggtccacctgctttgacttgtccacttttgctttgactggaccacttccacctcttggtagctattcctttgattgtgctttgtcttcaggatcacacacataaggccatgtttcatctcctgttataattctcaaagaaatgcttcaggatcttgatcccacttgtttaaaatttccattgaaagctcagctcttggttgcagctgatctgggcacaatggttttggcaaccactgagtggaaagtttgctcaactttaatttttcagtcagatttgtgtaagctgaaccagttgagatgtctatgatgctggccattgtttctgctgttaatcattggtcctcttcatttaagtcacaaataagattaatttttttctcccaaattgatgtggatggcatatcgctgcaggcttcatcttcaacatcatcttgtcccttcttcaaacaagttatctgtttgtaagctgctgatttctttgggacattgtcctgatgaacttttcataaagcatcaatgattttttcattcttccacctaagcttcaccaaaaattttggtgtgtgttcttgcttcaattttagcagaattcatgttgctctgagagaggatcttttcaaacatgtcttatccttgttagtgcctcaaactagatcctgttcagatatatcaagttagtgagagtttattttggtgcaaaaaaaaaaatttgaaatctatgtatagttttttcatagcacgtatttttcatggaacttttggaagacccgtcatatagacacactcacacaatggatgcatgtattgtcagtgaagttatgttggcttctgaaactcaagggattttgctgaaactcatgaaactcaagggattttactgaaaagtctcagcctcaattggttcctcttacatttgcatattctgtctgccaggtggcaaggtagaattgactgtaataagaaagaaactaccattgagctccaattattgtccatgcctcagagttgatttttaacctgagagtgacagcagccacctgggccaggggcagacaggtagtttgcctcacctggaatcagaggctcccctatcagccttatcttcaagaagctgataggaatgctttgtttttcttttgtgtgctggacaaggagaggccccggaaggtctgtcatgtagattgacagtttccttttgtaagactggccaactgaggccaaagttgaaaatgtcagtaaaaacaaatagtattgcaaaagggccttatgcatttccttctctatcctctcattgccccatcagccgagtgctgcatgagtggcttaagagaacaccattaggcttgaaaaagagtgaactgcaaaaacacattttctccatttcacctagttgttattttccccccatgtgctaatgatgcaaacaaaagaaaataaaaataatagacattggcttatgtcttttcaagttccatttcttgtttcttcttttactattttcagaatcaaggaagataatacagaattttaacagttttcttacctcattttgcatttgttagacattgtttcctcgtggttgagacctgcttcctgctcaggaaagagaaagcagtggttgcccatacaattcaataataatgactctttgtcattatttaacagttgtttaggtgtgcctctctcctttcttcagttgcactaatgatagaaaaggatccttgggcacatagtaaagtggttcaaatcatgggtttgggtggtaaacaggtctgagatagatttcctgctctgccacttaagagctgggtgacgttggggagtcatttaatttttctgagcttcacccataaataatacatacatacataaaactcacctttcaggtttctgaagatgatgcaacacagaatctcaaaggtactgggtacccagggacactgcagtaataggtcccctctcctattgctgtcagctcagaaatacagaacagagcaactgggattcagaaaggagactataggctctagatagaggtactcactcacttccttgggcaactcacttccctgagcctcaactttcttgttggtaaataagtggaatcttcctacccaccactagaactgtgcaaggaagagatggagctggttaatgccagttctgtctgattccagacctggttcttaactaacaacaaggagtggtgcctggccaggcacttggggcattgtcccaagaggatgtcaacatgtcttcttagagaaggacagtcattgaggcctgaggaagtgttcaggaggaataagcttcaccaggatagtttcaatgacttaaccctttgcatgcagtttcctcaagtgtaaaccgggggtcatatagtcccaggagttttcaattacagcctttgaagtcttttgagattgttacacaggatcaagtagaagaggatgatttctagctctctattggaatttcagattaatgtctacaaaactcactaaagtccttgtattgaataattctttacccaactgatagcagttaggcttcattttcaatgccattaactctgagagcaaacgacaggcttttggtctgccaatatattaaaagtgtgtttctgaggaaatttcaatgagtcattcgtttatataacaaatacttgttgagcatctactttctattgggtactgttatagggattagagataacagctgcaagcaagtaaaaggcccttgctttctcagagctttcattccaggaaggagagaaagagagtaaccacacacatcaatagatgaccaggctgttgtgaagacacaaaagccaaatgagttgagggagagactgggggttagacaagggtgtttagggaagcactctaaagtgaggtgacgtggagttaaaattctgaatgataaaaaaaatgaaccacctatgtgaccatttgaggatggaacattccagacagagaggaaggcagatacaaatattctaggatgggaaggagctcagaatgtctgagagaattgaagacaagctttgtgcttagagcagagcaagctactttgaggttagagagggagccaggagccagattatgttggttttagccataataagaacatttatactgggtatgaacataaactcttggaggttgtaagccagggagagatcacttgattgtgaaaaaatgctcataacataagattaagtggaaaaatgactcttaaatctagaactgtatattcagtaccatttcaattatgcaagcatatgtgtgagtatgtatatttgtgtgtatgtgtgtatgtgtatatagatacatactttatgtatatatgcataaagtacgtgtgtgcatgtgtgcacgtgtgaatgtgtgtattcagtaaacaaactggaagaagatatagaaaagtgtttgctgtagtttttgtagtggtggacttattttccttcattgctttcctgtgttttgtaagttttctgtaagtttgtatgacatcaataatcaaaattaaatcatttgctttttaaaaactttgttgcagagcaatcaatggagagaatgtaagagtgatattattttaccatgtcttttctcagatttgagcttaatatcatggtgctttggaatgctggagtgaattttgaaggctctggctagcagagaagtttatttggctttttgtttgtttgttctttttttttttttttttttgagatagagtctcgctctgtcacccaggctggagtgtagtggcatgatctcggctcactgtaacctctgcctcctggttcaagtgattcttctgcctcagcctcccaagtagctgggactacaggcatgtgccaccacacctgactaatttttgtatttttttttttttttttttttgaaacggagtcttgctctgtcgcccaggctggagtgcagtggcgcgatctcagctcactgtaagctccgcctcccaggttcatgccattctcctgcctcagcctccggagcagctgggactacaggcgcccgccaccacgcccagctaattttttatatttttagtagagacggggtttcaccgtgttagccaggatggtctcgatctcctgaccttgtgatccgcccgcctcggcctcccaaagtgctgggattacaggcttgagccaccgcgcccggcctaatttttgtatttttagtagagacggggtttcgccatgttaaccaggctggtcttgagctcctgacctcaggtgatccacccacctcggcctcccaaagtgctgggattgtaggcatgagccaccgcgcccggccttatttgactttttaaggagtctgtcctaaactgaacttattactgtctccaaattatttatgcaaaagaatctaacatttctatttcttcccatagatttgaatataacctgccgctttgcaggtgtattccacgtggagaaaaatggtcgctacagcatctctcggacggaggccgctgacctctgcaaggctttcaatagcaccttgcccacaatggcccagatggagaaagctctgagcatcggatttgagacctgcaggtaagagaccagcacccgaccactggggaaagctggcggcctgggaccaggcagctgggcttagaactggaaggctcctttcccacagctgaatggattattgcctaaggagtcaaccccacgtattaatttggccaagtcaatctgcaacctgtatgacaactggagtttaaagtcagctaaagacacctttgtgaatcatagagcgggaacccagaggaagccattaggggtcctctcggctggaatcctcttgtctaacctgcttccacagagctctcctggctttgaagaagctgcagtatcattgtcagaaccacaagaaaacataaaccaaataacagtgtttgaaataaatatgtggctgttagagtcttggccctgcagacttggatcaaagcagacttttcaaactactctctcttactctctcttaaaaaaaattttttttggtttctcttctatgtttctctggtttgaaaaagtaaataaaaaggcatgaaagttattaagctatattatattaagatatattatttttgggagccctgagagggctcctaccagttattctagagctgcatagagccttcctcaaactatggctccaagcaagataatcacaacaagcaaggactttattttttgaatttccaatggccttgcggtaagcggtgcacaagaagagcaagccacggtggcaatcacagtgaattgttgtggttcgatttgttttcactagaagaggactgagtaacctctgcaactgctctgaagtttctaccccagcctgtagctgtgcttttgcagtgtctttaggtaatatgattcccctttctctgcaacacacactcacatgcacacagactgcttttgaaaagtcaagctgcagaactctacggaaaccatgaagtgtaagttaagtgcttctatcctccaacactgggtacagtcatgcacccacattatgagtgatggctgagactcttgctgaaagggaaaaggaaagtctttt

SEQ ID NO: 5460 - DNA, 6000 bp, Homo sapiens
ctgagaaatgcctgacctcaggcatttctggttctatttcggtggctgtgggtacccttagaaggctcctgtataagtagggatccctggatccctagcccctgttctcaagttatacacatattctggaaatggcttaaggtggcaaaatctcactgaaaggcttagcagagtctgcttaggatttcttgaaattctagggttttgtgttttccccctgaaaggataagggaagctggggacctggtaaagttctctgcccctcctctgttcagaaacctcggggacccacggagccccagaccagttgtggttgtaatgcctgcctagctgtcaaggatcttatgggcttaaagggaatggagtttcagggaaccacaaaatctgtgactggaagaacccacagctcctatgagccattctgagtactcgtgatctgccttattcgtgacttttcccatcggtgccctggggagccctgcaggacagctgggcccagttcctctgggacctgggaagcctagagcaggtggatgctgaacagaagcctgcccctccttgaatggagatccagggcagggatcaggaagccctaggcaggtctgcaaggacttcagggaaagggagctctatgcagagagctggagagacatcagcagggaagggctagcaggtcccttttgagaccgccacgttctctgtcgtctcctgtgtcctcttctgcccacctgggcgtgtgcttcctctcagcatccttctctctctgtgggcctgtgtccgtgcctgtgcctaactgcatgcccccacccccatggtccctgtcctgggcttcagccctcctcctcgcttctctgtcacgtctcagcttcattgtctattctcttctacttcctgtcctcccacaggctgcctgccgacactacggccactgtcgaggacatgctgccttctgtcaccaccgtcaccactaactctgacactatcaccgaaacctttgccactgctcagaacagccccaccagtgagaccaccaccctgacctccagtattgccccgccggccacggccacgcctgactcaaactctgtaccggctggccaggccaccccttccaaggggcccagcgcctctgccccctccccggccccagcttcagcccccaaggtcgcccccctcgttgacctgagcgacaccccgacctcaacccctgccgctagcaatttgtcttctagtgtcctggctaaccaaggggctgtcctcagcccaagcgcccctgctggtgtcggggaggcctctaaggctcctccggccagcaagcccacccctgcaccagtccccaccccgactggggcagccagtcctctagcagcagcggctgcccctgccacagaagcccctcaggccaagcaggaggctcccagcaccaaaggcccggacccggagcccacccagcccggagccgcgaagagcccggccgaggcagccacagcccttgctagcccgaagagcgaggctgcctccgtcagcaccacaaacccttcccagggcgaggactttaaaatggacgaagggaacttcaagaccccagatattgaccttgcaaaggatgtttttgcagccctgggctctcctgctcccgccgctggggccagtggacaagcccctgagcttgctccttccactgcagacagctctgtttcgcctgcgccagcaaagaccgagtacggcctctctttgtctgctgtcatcgggttgtgtcctgtggtggtgtgcatttgtgctgtgctgtgtcctccttgttagatgtgtcttcagcctcatccagggcttctctgaggcgaccgtcaaccaaggggctgggataaggcagagagagcaggacaggcagctgggccccaggagcagccgcctgctggctaattaggccatgttaattatgttttatccttatcatcctagcagcggcttctgttttccctgggggagcccttgcagtcaggccactgatgagaatagcttgggaagcaggctaagaaggccaaggtgcccttatcagccaccctggggcccccagtcggtgtgttattcagtgccaggctgagtccctaccagaaaggcactgatgtgcaggaagaaaagaggtaggccccaggcccgtggcaggggagggtgcagttcagaggtcccctcacactgtggctcagatgctcaccctcccctcccaaccccggcccccagcccactcttgcttctcctgctcttagagtggctgggaagactcggggctccccagcatcaaatggctgctgggtctcaaagttcaagagaaaggccttaacctttcaggtttgtaagtgtcttgccaaaattcagtggcaccagctgaggctggggtctgtgcctgtccccatgcatcctcagacccgactccctttcctggaactgatggaggcagagtcagacctagatttttatagaggctcctatggctgctccccagataagctgccatgctgccaccatgggctgcaaggggctctcgccaggagccctgaatctcagcatcgggagggaaaaggactctgatagccctgcccactcagctgccctcaactctcgcatagccaccaggcccactctagtaccccaccaggctgccatgaaaagctgcctccatcagtgttttctcaccctacccaggcaggccctagaggcatcatcctgcaacagcacagggtggggtggggaagggacaggcaagagtgggttgcaaaggggcccctgaaatcagtgctgggagcccagcccagcccagcaggctgcatttacatccagctgagctgttgccactgcagctggtcagggtgaggaggagctgcctctgctgcccccttccaccaccccaggtaaaaacacagcctctggcatcaacttagggctggaagaggaaaggactcgttcttctgactcagtgcttctcaactatggctgcacattagagtcacttgggtgcttttaaaagtcactgtgtccggaccaattaaatcaggatttccgcgaacacagctcgggcttgggtgatttttagtgctcccaggtgatttgacgggcagaggttggagccgggtgctgtcactggagaacccctcctcctccctgctgtccccaaggcctggatgcaggggcgagatgtctgcagaccgtggtctcagtggttctgttttcctgattctctgcaggaagggccccgtagaagcaaagccagagtgccaggagacagaaacgaagccagcgccagccgaagtcaagacggtccccaatgacgccacacagacaaaggagaacgagagcaaagcatgatgggtgaagagaaccgagcaaagatcaaaataaaaagtgacacagcagcttcaccagagcatttccaacaccacagacacacacacgcacgcacacacacaaacacacatgcacacacacacatctcatttctctagtgtcttttgcctttaaaaaaaactaaacagataaaacatgggaatctcctttttgtaggtttatagaaagggtccctttgttgcacactcacttgtaagaaaatgagacaaaaaggttaaacccacagccaaactaggacactccgttccctgaaaccgttaaaaaatcaaacaaaaggaccccaaattaagaatctaggaagctcagaaacgaaatctaggttcaggaagaccacacttggtgttacccgattggcacagaccagtttcagagaaatactttcaggcactaagactaatcgaatgaacaaagtccacagtttatttttatactttcagtcaagtttgaactctgtaaaacctcataaataagttataatttctgttcactttgtatttgttcagtatgcaaagtgtgtcaccctttctagctgaattcaattcccacgtagactcttattttataggacgaatgccaaattgcagcttctgggggtagatctcaatttgcagtattcagacttctttttctttcttttacattcttttttctttctttctttctgccaactttgttttccagtgtttacaaggtgacaaatgtttgactttggttgtgtttaaatgtccgtgtaaaatagctgccttttattttttaaggtaacaaataccacctagaggtaggtaggatcatcccacgcttgctttagcacaggacaactttacaaaacatgattgtttacagctgctcttcccctcttttctgatctgcagtttttgcctgggtcccactcaggtgaaaatccatctcattctggaatggttttgcttttgaatttttggttatttttgtgtttctttgggggttagaccactttctgattagccgccacctgcctgcatctgtgaaaagggatctgctcccaggcgttctcacccttcttttgaaggactccttaggctttgttgaatgaagcagagaagattgtatagttggggctggtcttggtgaacacacattattaccccacacatcccctttgtgtagaaagccaaataaaatctatacataccatttccttttgagcccagaatctagatttgagcggaagagcatgtgtgcttcagggaattagtgtctttttttggaaatctgttgaagtaaagtaacatcggccttctgttcacttaggcagcatttatagaaacaaaagaagaaagaaacaacctactgtctggagtcataacacaactttcctggattggaaaccaagtgggggaaaaaatacagaaactttaagggggatgggaggggggggagaagggaaaagccagccctttgtatagaaattttgcttttttttccctcattctactttagaactgcaagcttgtgcactgtggatgcgtgaatattttagtgtgaaacgtgtttttgtcatagtattgaaataaaacttcaacatagtttggttgtggaaggtatagcagatagttcagaaaaaatattcaggaaacaaaaatcactcaaacggaatcgaagccttttaacaaagaaaatgaaatacagatgatgatgatgatgatgaagatgatgctaagtaaacagaaatcagtactccgcatgcgctcctctcctaaggtacaaagcagcaagaggttagggtggcaaggctgcctctgggtccattctgtgggccactctccccaacgttctgacacttctgcagtctgatcagtggcgatgctagattataatttcaaactgtgaagaataatggtcttgtcatttgctcaatgtggggttatgttgcattttctcagctcctggggatggaaatggaggatcccagaacacacagccctggcccctttgattctagggcctgcacagatctctggttcaaatgcacaggccctcagaatagaggaacatgaagagagatcttagagcacacagtagaatgtgagagcctgggtgtctgagaccgggagggcccagcagtgaggggcaggctcttctggtcaccaggctgttcagtggactcagttcttcatcttgtaatgtcgatggctttgccacaccaggccaagcccatgccataccttgtcaagactgtcaaagtggttgtggttaggtcaaactggttttggttctgatggttaggaagaaacaggtcagccctcagatcacctggcccgggacagctgaccccctagaaccctggctctgccattagctaggacctaagactctgcccacattttggtctgttctctcccattacacataggtttgtctcagcatgcaagagtttttcctttaaaaaaaaaaaaaaaaaaaaaaaaaaagcaatgctttctctaaaatcaaagagggagtcattttattccaagatgttttatcttttatgttaagagatcaaagcttataattttcttttttaatttttgaaggagggatcaactccagtttccaatgtctatgtgtctatgtgtgtat

SEQ ID NO: 5461 - DNA, 6000 bp, Homo sapiens
acagctgaagactgttgactttagatagacttgagccgaagtcttcaaaaagagtgaggaggagaaaacctgtaacactccagggattctgatataagccacttttatgtggataattccaaggctggctttggtgagattattaccatcgttaaggctgttgtttgaatatgataattcaagtaaagcactttggtacgctgcacgacacatagtaaatgattaattggtagcaattattcataaattactgtctgttctccccaagcttctaggcttccctaattaaaattctgatagctttaaagcttttcaagttccaatgcgtaattactgttacaaagcagtaacttgtctgaatcaccagcagcctctagtacaatattagaagcttccagttatttagttaagacttcagcaactagagccatttctggaatactctatgtggactctgccacttgactaaacttcattaaattccaatccagatacccatcccctcagaggaggaggacaggacagttatgcctgcagttataaactgagaagtgttgtgttccaagctctgcatggaattgggtaaattagctacaagcctgaaataaggaagtatgcatctgcgtttttttctttccagcacagaagataagaaaccactttcagggcaaggacaaataccttcttataccccagtatctagcacacaggcactcagttatttttggagaagaaaatctaccataataccactctctcaactaatacatttttcacctaacatgctttttctgaatattaaaaaaactgtgataagatacttggagtatatacttctggcctttattttcctgtgtgcccaaggctatttttccaaaaatgggaccatgatggcgtgttttttgtagaaacttttccagtattactgaataatctaatgatttttaaaatgaagtttcaaatattttaaaaataaatcatccatgtggcaaattaaaaaaactcaatagaaacataaacgaagtgtattcttccatgatgataacactattaaattacttgggaatccttccagagaaaaataaatgcacttacctcaatgtatatgtgctttatttccacaaatgggtcacattctatacactgttctgcatctagggtttttattgagatataattcacagaccagaacgtttacattttaaagtgtataattcagtggctcttagtatatttacaaggttgtatgacttatcgcaactgtctaattccaggatctttctgtcaccttgaaaagaaacctgttagcagtcagtcctcattcctccctcctgcatgccccagcagtgactgatgtactttctgtcttcatagatttggctctcctgggcacttcatatgcaaggaatcatacagtattgtggcactttgcgactagcttttttttcactaaacataatgtttccaaggttcactcatgctgtggcatgtatcagtacttcattctgttgtggccacatagtattctattgtgtggatatatcacattttgtttatccattcaccagtaatggacatatgggttgtttccactttttagcaattttgaatcatggtgccatgaacattcatgtggaaacttgtgtgtgaacgtagttttcaattcaaactacgataagatacttggagtgtatacatctggcctttattttcctgtgtgcccaaggctatttttccaaaaatgagaccatgatagcatgttcttatagaaacttttcctgtattactgaataatctaatgatttttaaaatgaagtttcaaatattttaaaaattatccatgtggcaaatttgaaaaactcaatagaaacataaacgaagtgtattcttccatgatgataacagtattaaattacttgggaatccttccagagaatggcagaagtatatacacttgtgagtggaattgctcagtcaaatggataactctatctttaactttttgcagaaatgccaaatttgtccagagtatctacaccattttacattcccaccagcaatgtttgagggttccaattttttccacttccttgcaacatttgctatttaccattttcttgatcttagccatcctagtgagtataaagtggtatctcactgtgattttcatttgcatgttcctaatgactaatgatatcaagcatcttttcatgtacttattggccatttgagaatcttctttggagaaatgtttattcaaatcctttgcccatttttttttaaagaggcaaggtcttgctttgttgcctaggctggaatgcagcagtacaatcatagctcactgcagccttaaagtcctgagtccaagtgatcctcctgcctcagcctcccaagtagctaagactaaaggcgcaacaccctgcctggctaatttttttattttttatttttgtagagttgggatatcactatgttgcccaggctggccgcaggcaatcctctcacttcagcctcctaaagtgctgggattacaggtgtgagccatcacactggcctcattgtccatattttaattgggttagtctttttattgtagagtttaagaatgttttctatatcctggatactatgctcttacatatgactttaaaaaagaaatagagagggggtcttgccatgttgaccaggctggtctgaaacttcccgcctcaaacaattctcccatctcagcctcccaaagtgttgggattacaggtgtgagccaccgcacctggtggtttacatgtgatttgcaaacattttctccctttctgtgagttatctttttattttttgataatgtcctttgaagcacaaaagttttaaattttgatggagtccagtttacctatttttctgccccccccccacctttatttttttttttttaaatcaagctccttccatgttagcacttgaaggcccacgtcatttcttatctgcatggaacttgcattgtaaggaattctattgtaatttctttaacactttttaaaaattaatggactgggtttttcaggtttttttctgaccattcttgagcatatatcttatacatagctttggctgggcatggtggctcacccctataattctatcactttgggaggctgaagcaggaggaccacttgagcccaggagttcaagaccagatgaccgggcaagaaagtgagaccttatctctctaaaaaaaaaaaagaaaagaaaaggaaaaaatccccaagtaacttcatagcgtaaattctaaaagtggaattgctggatcaaagggggcatgtgtttaaaatcttggcagatattaccaaatttccctcttaacagtataaatgcctgttcctcctccgtcccacccccataactatactggctctgatgagaccttggttttctgtaaaagctctatttagaggtgtatcattatttacttaattgttctcctttacaacccacctgggatgagcatcttgcctagaagtctctacttgcacaggatacatacgaaatagaattgaggattcaaaagcagatacagaactcttcccacttactttcttacccttgtgtgtgtctccccacagggttacaagtgtataacaagtgttggaagtttgagcattgcaatttcaacgacgtcacaacccgcttgagggaaaatgagctaacgtactactgctgcaagaaggacctgtgtaactttaacgaacagcttgaaaatggtgggacatccttatcagagaaaacagttcttctgctggtgactccatttctggcagcagcctggagccttcatccctaagtcaacaccaggagagcttctcccaaactccccgttcctgcgtagtccgctttctcttgctgccacattctaaaggcttgatattttccaaatggatcctgttgggaaagaataaaattagcttgagcaacctggctaagatagaggggctctgggagactttgaagaccagtcctgtttgcagggaagccccacttgaaggaagaagtctaagagtgaagtaggtgtgacttgaactagattgcatgcttcctcctttgctcttgggaagaccagctttgcagtgacagcttgagtgggttctctgcagccctcagattatttttcctctggctccttggatgtagtcagttagcatcattagtacatctttggagggtggggcaggagtatatgagcatcctctctcacatggaacgctttcataaacttcagggatcccgtgttgccatggaggcatgccaaatgttccatatgtgggtgtcagtcagggacaacaagatccttaatgcagagctagaggacttctggcagggaagtggggaagtgttccagatagcagggcatgaaaacttagagaggtacaagtggctgaaaatcgagtttttcctctgtctttaaattttatatgggctttgttatcttccactggaaaagtgtaatagcatacatcaatggtgtgttaaagctatttccttgccttttttttattggaatggtaggatatcttggctttgccacacacagttacagagtgaacactctactacatgtgactggcagtattaagtgtgcttattttaaatgttactggtagaaaggcagttcaggtatgtgtgtatatagtatgaatgcagtggggacaccctttgtggttacagtttgagacttccaaaggtcatccttaataacaacagatctgcaggggtatgttttaccatctgcatccagcctcctgctaactcctagctgactcagcatagattgtataaaatacctttgtaacggctcttagcacactcacagatgtttgaggctttcagaagctcttctaaaaaatgatacacacctttcacaagggcaaactttttccttttccctgtgtattctagtgaatgaatctcaagattcagtagacctaatgacatttgtattttatgatcttggctgtatttaatggcataggctgacttttgcagatggaggaatttcttgattaatgttgaaaaaaaacccttgattatactctgttggacaaaccgagtgcaatgaatgatgcttttctgaaaatgaaatataacaagtgggtgaatgtggttatggccgaaaaggatatgcagtatgcttaatggtagcaactgaaagaagacatcctgagcagtgccagctttcttctgttgatgccgttccctgaacataggaaaatagaaacttgcttatcaaaacttagcattaccttggtgctctgtgttctctgttagctcagtgtctttccttacatcaataggtttttttttttttttttggcctgaggaagtactgaccatgcccacagccaccggctgagcaaagaagctcatttcatgtgagttctaaggaatgagaaacaattttgatgaatttaagcagaaaatgaatttctgggaacttttttgggggcgggggggtggggaattcagccacactccagaaagccaggagtcgacagttttggaagcctctctcaggattgagattctaggatgagattggcttactgctatcttgtgtcatgtacccactttttggccagactacactgggaagaaggtagtcctctaaagcaaaatctgagtgccactaaatggggagatggggctgttaagctgtccaaatcaacaagggtcatataaatggccttaaactttggggttgctttctgcaaaaagttgctgtgactcatgccatagacaaggttgagtgcctggacccaaaggcaatactgtaatgtaaagacatttatagtactaggcaaacagcaccccaggtactccaggccctcctggctggagagggctgtggcaatagaaaattagtgccaactgcagtgagtcagcctaggttaaatagagagtgtaagagtgctggacaggaacctccaccctcatgtcacatttcttcaatgt

SEQ ID NO: 5462 - DNA, 6000 bp, Homo sapiens
accctctcaatactgctcattggggattaagtattcaacacttgtactttggtgggacataactcaaaccatagcagtgggctaaaattgtacaagttaaagagatcttatccctggtcagtgcacaccttattgaggtctcttagcaactggagtgacactctacatctaaaatgtaaatctgaagaggaacttaatggtcgtgagcacttgtagataaatgaatgaacagagagaagcaataattttgactcattgttttcttggtttgttttggtttggttttgagacagagtctcaccctgttgcccagcctggagtgcagtggtgtgatctcagctcactgcaacgtccacctcctgggttcaagtgatcctcttgcttcagcctcccaagtagctgagattacaagcatgtgccaccatgcctagctaatttttgtatttttagtagagatggggtttcgccatattgcccaggctggtcttggaactcctgacttcaggtgatttgcccgccttggtctcctaaagtgcttagattataggcatacgccgctgtgcctagccgccttggctcgttttgaaaaagatacagaaagggaaatagtgagccaggcgcggtggctgacgcctgtaatcccagcactttgggaggttgaggtgggtggattacaaggtcaggagctcacaaccagcctggccaagatggtgaaaccctgtctctactaaaaatacaaaaaaaattagtcgggcatggtggtgggcgcttgtaatcacagctactcgggaggctgaggcagagaattgcttgaacctaggtggcagagtttgcggtgagctgggattgtgccactgcactccagcctggacaacagagtgagaagactcggtctcaaaaaaaaaaaagtgaccgtagggtaatttaaactcaaaggatcaagggagaggcttctgtgaatcagttatttgttaagtaaatatttctggtacatctactgtttgtctacatttcttattctgctttttttttttttttttttaaagacagagtcttgcccttgtcgcccaggttggagtacagtggcgcgatctcggctcactgcaacctccgcctcccgggttcaagcgattctcctgcctcagcctcttgagtagctgggattacaggtgcccgcccagctaatttttgtacttttagtagagacagggtttcgccatgttggtcaggctggtctcgaactcctgacctcaggtgatctgcccgcctcggcctcccaaagtgctgggattacaggtgtgtgccactgcgcctggccgcagggagagattattatggttcagattaaaatatggcagttggagtgaatgatctcattggtataacttgatttctggtatcacgttatgtttgtgttttgtttgttaatttggctgaagtctgtaatgcaatacataagacagagagtaatgtctacataagaaatattaatattttgattgatcctcctattcccttaaaacgtgattttttttcccattgctgcctttagttcctgacatcccaccgagtctagcaactgcttgctcttcaaatactgataatccccaggcatgggaactggtttgcatatctatgagccagatcctcagagtttactgagaatgaactatgccagtccataactcttacttaggcactcagagaaatgtagctcagttttataaaattgagggccaactggattcatctaagaatcatgagagccccattgaactgaatttccactgggactcagcttctgaagttgacgtccagagactggcagatgtgctggcctatcacggacaggtggtaaatgagagcccttgtactcttgtcttctcttctccttgtatagatgagcagatgcctttaggcttgggtcagtttctcattgagtctctcttctgtcagcgaggccagagtgcagtggcactcagcctcccgagtagctgggataacaggcacctgccaccatgcctggctaattgttgtatttttagtagagacagggtttcaccatgttggccaggctggtctcgaactcctgacctcaagcagtccgcctgccttggcctcccaaaatgctgggattacaggcgtgagccaccatgcccggccatctctgagtctctttttaaaatgttatttcttagcatcttatctgaccaacaccagaactttctcagttacttttagcctctggttacctgcttctgtcctgatgagaaactttaacccagttcactcctaatttattatagatcacttaagaacttgtaaatctacatagccctttgcctgggtctgttacaatttagggaaaacttagagtagaaaaagttaatgtcattatttagatgcgagtgggtataaacgtagcacatttttgtgcagtaatagatgaggcatagaaagtcatatgcttcttgtagagttttcataatgagttcttacccatctatgcacttttcaggcccacaagcttctctcttactcttatagccaacttctctttgcctgaaaaatgcgactatatggatgaggtgacatatggggagctggagaaggaggaagctcagcccattgtcactaagtacaaggaggaggcaaggaagcttctgcccccctccgagaagcggacaaatcgccgaaacaaccgaaacaagcgtaaccggcagaaccgaagccggggccaaggctatggtgagtcttggggacctgccagccccctacttcagtccattctttgtgcttagtacagcaagatgtgcaagggaaggccaaggaaaccaagtcaggtcattaacaatacggaagtgccttcttcatggagcttatttcttcctgtgttctttatccctgcctttttcttgtgctttttccataattcttcaacaacaacaaaaatcctcttttttaaaaaagagttacttttcacaaaagtatttgtttctttgaaaagcaatgcttgggctttctcatctatctagttttcattttaacatatgggttcccagtgtcactgttcctgtcttatctgaaggatttgtgcagtgaaatcaaattctcatcttcagttttcttgcttctgtgtcatttcgattaacaagaaagcgaatgctttattcagtgttttttgtggggggaagaacttaaccaagcaagttaggctattagtagaattaattttccccctgaatgtctagtttgtcagttaaaaccccagtgtgcattcactgctctttaaaaatgtgtgtgtatgtgtgtgtgtaactgttaagtcagcagaatttccgagtgcctgctatgtgctaggtactgtaaatgctgacagttcccgcccttgaggagctgattacagagactttgtttcttttgcataaaatgataggtatgggttatacgatatctgaaatcccttccagggctgaaagtctgattctatgaatggcagtttttccttatgtttctaactctgccatgtatccttttgccatcttaaatgttttgcaggaattggggagcttcaaaaacaaagtggcttggttttcttgtgtctctgttcctctgccctcccccctcagactttttaaaagttcctggctggtgctttaattaacatgtgtgagcctggccgaagcaggcctcatattcccccagaattgcctttggctccaagtttttgatttccacccagatgtggagccaggaccccatgccagctgtctgagcgcgctctccatttctcttccagtgggcgggcagcgccgaggctacgacaaccgggcctacgggcagcagtactgggggcagcctggaaacagaggggtgagtgcagctctccttctgctcctcactctgggctgtgagagccattctgttggcttgggggagcagagtggtttgcctgttttcttagggcttagggttttgcccatttaatatgttctggaagatttactatgggaaaattaaaccaatttataatatcgagctaagatgtgtcgcatttaaaagggggtcacggtgggtcatgctgccaaaaacccataaaccttcactcctttttcttttcctttctcagggttaccgtaatttctatgatcgatacaggggagactatgatcgattttacgggcgagattatgagtacaacagatacagagactattacagacaatacaatcgggatgtgagtatcttcttgggatagacacagggtgaaggggggcaggagcagaaggatgagtgttatgcctcttcatcctcagccagctctggctccaagtgatggggtttccctctcttctagtggcagagttactactaccaccacccccaggacagagaccgatactacaggaattactacgggtaccaagggtatcggtgaagcccctgccatggtcacctgtcagccatgaagctgaatctctgggggtgccaggcacccccgcaaaacacaaccaaggaaaacaggggctgtcggggtggggctgagctgccggggaggggtggtggggggggagggtgctcaagcaggggtgggggaggggggaggtggaaacaaacaacaaaactgtacattttttttaaagtttgttgaaaagaatattgtcttattctataaaacatttcaaacctagttagagatttgtaatcaaaaaacatttgcgcagaaagcagcacttagggctgcctgttctataccctacagtcagacaggaaaagaactgaaaatggcacccttctgacattctgaggcagctggactggcagccaagtaaaggagagtgatgaggtggtgtggggagggtggggaggcagcgcgagggtgctctccacagcaggtaggagcaggcaggagtggggacagagggagagcttgtgactgggacagtgaaaataaacgattggctcttatcaatcacttgcaccaactaaccgtttgtattttctttaccgacctttcccttttgggatatgtggtctggtgggctgggaggcttacagtgtcccaactctccattttcctgtgcctttgtgctgtttggctgaggcatggagactgccagtgggtggttctattttacaggattcccaggccaagaaagcctggggactgtccttgatggcagagcagaatagcctgccccttctatagacccattgattaattcctgtaaaatcttggggagaatgggattgcagccctcagcctaaagattgtgatttgccagtctctagtctctgtcttccaaggttgagagaggtgggaggtctctgaaatcatccctgttagagtgtctgtcctcttacagtgcgagagaaggaacgtttctcagggtttcagctcacacgaaaacacagcaggattcttttcactgcagcgggatatgtatataggtgaatcctgtggtgtgggctcacaggcccaggtgctgagaatagcaactagcaactattttctacagtgtggagggctcgtgccctgctggtttttttgatacacaggtagagaatgaatagaagaggggagggtggtgggggggggtgggaggcagctcagtggggctgctgaaccttgggaagagtgtgagtgtgaacgtgtgtaaatgtgcgtgtgaaagggagcaccccttcccgacttctagaaacaaaattccttttggggcgctttccctgtgtgtccccagagaggcctctagccaggagccttcagttgggatagtttcatttgtgactttaccaataccctcccagttcttgatagacagctgtaggttgctgggttcaagaatatgggtgggatatggaatgctctttcaatgtctagcttcagttttcattcatcctcctgctcagcactgtcagccaagagcttactcagcagacaccacatactgcagcagttcctagtgagaaaatctgtgccactagaaaatgcttcacttc

SEQ ID NO: 5463 - DNA, 6000 bp, Homo sapiens
tactcatttcctaaggctgctgtaacaaagtaccgtaaactgggtggcttagaacaagagaaatgtattgtttcaacattttggagaccagaagtctgaaatgaaggtgttattttggccattcttcctgcgaaggcactagggaaatacctggtctaggcctcttctctgccttgtggtagtttttgggtttgtggcaccataactcccatctccacaaaacattctccctgtgtgcacctctgtgctcaaatttcctgtttttatgagaacatcagccatattgaactagatggaagtagtggcccaccgtattccagtgtgacctcatcttaactaataacatctgcaacaattctatttcccaataaggtcacattctgaggtactgggggcaaggacttcaacatgtgaattttggggtgacacatttcaacccacaacattgaccaatctctggaattgttgtatcaaagtcatacacaggataggctgaatatattagaaagtacctataaagcatcagaaagaaaaataagggagggttgtttgtttttaaaaaacaagttataattgagaaatttataatgtagggacagtaagaaatttgtgtaaggatataggactaagaagtagtgaagataagacttcaaatacattcatttaataaatacatattacatataacattcatttaatgtgtacatattatgtggcaagtcctgttctggtgctggagattcaaccaaggacaaaaaagacaacgaccctggcctcatggagcttacattctagttgggtagaggagcaaaagtaaagaaatgaacaaagaactataaaatatttcatatatacatttaatatacaatatttagtatataatgtttaagcagagataagtactataaattttttagaagtctaataagagggagagataaatggaggaatagaggatgctgttctatacaggatgtcagagaaatctcttcttccaaggagacacttgagcagatggaattctggctgcagtgaaaggagcaaattccaagtgaaaggggagctgctgaagggagctgagcaaggagtgttggtgtctgaattttgttttaaaaacatggctggctgctgtgtggaggaagggtggcggcaaggcaagaatggaaacaaagaaaccagtgaggaggtggttgcagaaatccatgtgagaaatgatagtggtatagattagggagatgagggtggagatggaaaaaagacagagggtacattttgaagacagagttgacaggatttgatgatgaataaggcatggggtgtaagataaaaaggagagtcaagaatgactcccaggtttttggccagagcaactaggtcaatgattgcgccatttatttaaatggtgcatactgggagtagagcagattcaggagaggaaaccaagagtttagttttgagcattttaaatatcagaagcctattattaaacaatcaagtagagatgcttagatgtggtatgcagctggatataagagtctggagcttagagcacagattgagactggagatctacatgtggtagcctttgatctacagatggcattttagtcttgataccggatggctagccttgggagcgagtataaaaaagaagtctaatgacaaacttggggacactcaaatttaaaatatcagaaagcagagaagcgcccagcaaaggagacgtagaaggatagattagtgaagtaggagaaaaaccaagggggtcttgataaccaaacagagacaatgatcgattcagggaagttgtaattgattctgccaaatgctgggaatggttgaataaactgaaaactgtgcaccggatattgattttgtgagtgacaatgttttcatttaccttgataagaacaattgtagtgggaagcctgattgaagtcattaaaggagagaatgggatgtgaggaagtgaaaacagacactaatgttttatgttacctgttgccgcaagtgcttagaagcagtggatatgagatttaagagaacaggtgctgtggtcttagacctcagctattattgtgactgtgccatctgttagtaagttacctaacctttctagccagagtcctcacctatacggtaaagataatagtacagaccatttcaaaaagttgttgtcaagcttaaatgagagatatgcataaagttttgtatattgtcagcccataataagtgctcaataaatactagcaccatcactaatttaagcaaaatattgatacagcttcaaggttctacataattcattatgtctgagagtaattgttggttgaagtggtaattatgaaagaatatgtataaaattatgattattcgtgacaggggaacagagaaatgctacaatataagagttatcatgactcatatatattaatttttcatggaatgatggtggtatagccaggtagcaggggaaaatggacagggaagaaatggctcctgaggggatttgggggctaaatgtaggtggaaggcactgagaagacttcgagaccaagccatttcagataataagtggatacctacttcagacatataggaagtaaccattgatcttgtagctgtagttatcacctgttctttgtttacatctgacttttcttaccagtttagaagcacatgtcttactccaccccttacctccaattatatttcttacctctgctcctatagtacctactattaagtatggtcaggaaagacggcatctcatccatgcgtattccagaccttctagtaagacgctcagaggaaaagctaaacaaagagagaacagactgtatgtgagcaaattaagttggccacagagttattctctggaaacatggagctaagaaaatctctcatgtctaaacctgcatatcctgcaacattacagcatcaccttgtcccacagagggttacttctgatggctctcaaggaatgctgactgcataccttgaagatagcagtttctgatcgggaggagctcatcagatagagacctcaccagtggccaaatactaggttatactgacttacggtaggagttagcagtggaacgttcaagacagagatacctgtcttcctgcttggcacaccatgacttagtggctgtaagtgtatagttacatataaaagttcattgtttttatgggttttgtggtaggagcttgtttgaaaagggtgagagaagccaagatggtctcacagtggatagcagacatgttgcaaatttgctttcttgggctgatgaatttatttgagtaatggtggaagtaaagcagagagaagctagtgagctgggccagcagcccagcacagagccctgggcccttcattctcttatagaaagcccatctctggtagagagatgttaggtctctttagggctttttccccttcactgactggcaggttagaagactccttagcacagtaaaattaacatcttaaaaggtagttgagggagaaggtgtggcagaaattcattttgtcaaaggaaatacggcaggaatgagaaccatttgggggtacatactataaactaggcactatattttcttgatattctccatttagtcttgtgatgtacgtttcaatatacccattttacagataaaacaatctgcgttttagtaaattagtggcaaagacagggttaaacacaattctgttgaatttcaaaacttatctttttatcctttctactaaaggccatagtaaatcagtctgctctcattgttcatctgcctctagcagtttagtgtaaaacactacttggggccagataatatatatgagtctgggctttgaaactaaattgcgtggagtccattagagctctgccacttaacagatatatgatcctgcgtggattagttgacctccctgaatctcagcttcttctctgcaatatgttgctcatgatagtacttaccttacagggacattttgaagattgagtcaatacatgctaagcatttagaatactgcatggcacctaaaatgtgttcaatagatattagctattattatccaaaacatattttccagtgctgttattcgatgaacctaaaaaggttaaactgaccttgtcagggagggaacaaaaagctcaggcactgctccccatgaagcctgcctattaatgatttttggtcaacagtactgtttatgatttccagtcttctcgtttgctgggctttcatgctccagaggcagcatggtagaatagaaaggcactgtactttgccatcagaagacctgggtttgggttcaagttcaaatcacactttgtgtgacctgggcaagtcactttatctttcttgccaggggttccttatctgctcagtaagggggtaggactccctaatctctaggactccttgcattccataaattcagtgaataccaaataaagccatttagtctctctgatctctggtgctcatctgtactgtagcactcctgataccttctttagtcactgagagactcagtgagagtgaaagtgtttggtagactgtgacaggctatgcaaatataggagttgatccttactattaagagctttaaccctgagtaatacgccttgctgtatgtgcattggtgcaggggctttttccacattttgttgtctttgcctactcctcactgagctgggtggatccaccttaacaaggtgtaggggaacacgagcagaggatgggggtacactactgatggtgggaaagcatcttattggttaatagtggtacatcccaaacaccaattactgtcactgcttctaaggctgatatatttatcaggatgagttacaaggaaatatatgtacccagtgagcgagaatgctgcatggtcaccccctgtgatgtaaaatatgagaatctaggaggggctgttttataattcatcaggttccgctagtgagttctgtcagagtcttagttataaaggcaagtgtgaaccggacagcagacaggagaacctggcaccaaggagacggagaagctgcctttggtgcctcctgcctcctccctgctttgttccaataattttgtgctcggtaagttcctggctttgcagctaatcgttgttgttgaataagcttggcaaacgtacccatagtttggaataggcacttgctgtcagaagtgtgtgtcagtgtttgggctcctgacaaattccacaatttccttttaacgagcaaaatagcttaaaagatgaaagaaaagccgatgaatcaattattcaccttgatccttggaaggctgctttctttggttgctaaagtttctcaggtttcattctatcagtttcatttgttgggtgagctttgaaaaaaacaagtctctttgtcacgaaattgtttttcttagctgccaaaaggaggtatgtacagggtggtttgtccatccccaccccactaattcactctcctcagcaatcggcaaatcttaaaacagactgtttgcctggtaaccagctccaactgagctgaacctgtgcaaggcaagattcaaattgcaatcttttgtgtgaacagaacagaggggctgtgaataattggcattgtggcgattattgtgaaactcagtatggtggtagtcctgcgttttgccgggatgggatcagaatccaatgagatttgcatttggcgtgcctgttgatgatgtgggagagggagtgaaagaaaagactagatcgttatggaaagagctgtacgacgtacccgcaggacggacaaatgcagaaggcatgactgttgtatttgcatgacttgtggctggctgttttctctagtttcattatcaccattaacaattacctgaagctgcattttggtctcatttgggtgggctccgggtatttgctccaggtcctagctccaggcgggatgcgtgctaactcctggtcagctaactataggaagtcatttcctcttcagaaggaaagag

SEQ ID NO: 5464 - DNA, 6000 bp, Homo sapiens
acactgttaattaactttataaataagtttgtaagtaaattcagattatgtgatggcaaactatttacttatttggaatttaagttgaattcttttttttttttttgagacagtctctgtttgtcactcaggctggagtgcagtggtgtgatcctgactcactgcaacctctgcctcccgggttcaagcgattatcctgtctcaggctcctgagtagtggggactacaggcgcatcaccacaccaggctaatttttgtattttcagtagagatggggtttcaccatgttggtcaggctggtctcgaactcctgacctcaggttatccacccgccttggcctcccaaagtgctgggattacaggcatgagccactgtgcccagcctttttttttttttgagtcagagtctagttctgtcgcccacgctggagtgtagtcgcatgatcttggctcactgcagtttccacctccaagggtcaagcaattctcctgctttagcctctcgagtagctgggattacaggtgcatggcaccacacctgactcagttttttttgtatctttagtagagacagggtttcaccatatcggctaggctggtctcaaactcctgacctcaagtgatctgcccacattggcctcccaaagtcctgagattataggcgtgagccaccatgcccggccttaagttgaattcttttttgtgggggacagggggcactgagtctcactctgtcacccaggctggagtgcagtggcgcgatctcagcttgctgcaacctctgcctcccgggttcaagcgattctcatgcctcagccttcccagtagctggtattacaggcacacaccaccatgtctggctaatttttgtatttttagtagagacggggtttcaccatgttggccaggctggtctcaagctcctgacctcaggtgatcccccaacctcggcctcccagagtgctgggattacaggcgtgagccagcgcgcctggcctagttgaattcttaactttaaaaaagatttattacactttatggcatcatttctaaaaatagactttatttttattttttatttttattttttgagatggagttttgctcttgtttcccaggttggagcacaatggcctgatctcggctcactgcaacctccatctcccaggttcaagcgattctcctgcctcagcctcctgagtagctgggattgcaggcgtccgccaccatgcccggctaattttttgcatttttagtagagttggggtttcaccaggttggctaggttggtctcgaactcctgacctgaggtgatccacctgtcttggccttccaaagtgctgggattacagacatgagccactgtgcctggccgactttattttttagagcagttttaggctcacagcaaaactgaacagaaggtgtagagatttcccatttactttctaccctcacagatgcacagcctccctcattgtcagcatccccccaaccagagtggtacatttgttaacaatggataaacccaaactgacacattattatcacccaaagtccatagtttacatatgggtttactcttattgttaataattctctgggtttggacaaatgcataatgacgtgtatctaccaatatcacacagagtagagtagtatcactgacctaaaaatccttttgttttgcaccattttttaacctcttagaacctgagccagcagaagagtacactgagcaaagtgaagttgaatcaacagaggtatgattttaatttaatgctgcctttactttgctgcctttcaaacaaatgtctcaaacatttactttgctttgcagtatgtaaatagacagttcatggcagaaacacagttcaccagtggtgaaaaggagcaggtagatgagtggacagttgaaacggttgaggtaagagttctctgtattgcaaagttgttgtctttgtcttcagttagtaatttttatctctactgagaacaaattaagattgttttttgcattattagtacatttattataataacagactcattacaccagactgttacttccaaaaaatgaatgtttatccctgtggatgtttaataggatccctgctttgctgaaccaatctaaaaaaattattttatacaaagttatctgtggattaatctgttaccatgatttgtctcttactgaaattaggttgctctgtaaaaatctgggctcccacactgatagctgtgttttggggtatcatcttgcactcctcctttaccctaatgctgtttggtcaccaggctgtagacttcctctagcgttttctaatgctgtctctcaactgataatgatgatttttttcgggtcctcatgtctagttcagtgactctcttcatattactcctctctgactgcctccagaccatcctattcattgtcacaacttaattattggaaaagttagctttaagttacttgtacttgaggctctcagtgatgccttgttacctgtaagatacagtctaaaaaccttaccaactggtcctggccttccttttgatcttcttttagatgtctttctttacacccccaaggtgcaggaaaatagctgtaagctgagggtaatatgcttttccttttaatatgttattcttatatcaagaccattctcttggccgggcacggtggttcatgcctgtaaccccagcactttgtggggctgaggcaggtggatcacatgaggccaagagttagagaccagcctggccagcatggtgaaacccagtctctacttcaaaaacaaacaaaaacctgggcatggtggtgcatgcctgtaatcccagctacttgggaggctgaggtacgagaatcacttgaactggggagacagaagttgtagtgagctgagatcgtgccactgcattccaacctggttgacagagactctgtctcaagaagaaaaaaacccattttccaaagagattgcaaagttttttttttttgagagtctcactcttgcccagtagagatggggtttcaccattttggccaggctcgtcttgaattcctgacctcaagtgatctgcccgtttcagcctcccaaagtgctgggattacagtcatgagccactgcgcctggcccatagatgttataattgtgccagcaacttcatccctctgttggagcaccaaaatgtcccattggtaaggtaaagagagtaggcacttaccccagaaaggtacttgggatgaaaatactgctcaggaagtcccaacaaaatagtgtatatttgctgaattaaagaatgcagttcagaaatgttataggaggattagaagagaaatcaatcaaaaagattagtagaggtgatttacagttgttccttgttataccaggggcattggttttaggacactcccacacaccgaagtctgctcatactcaagttgtgccatgtatctgcgggacccacatatatacaggtgtttcacatctcaagagtactggaggataagtgaacctgtgcagttcaagcccatgttgttcaaatgtcagctgtatatatgaggtgtacaaacccattgagccttgactaagtcgatgggatgtatgtttttaggggagccaggtaatagggatgtatagcatggatgtagaagtagaaatgaactattaacatatttgttttattgaacatagaatgcaaggtaaatattgacatagtaggaagaagttgggaagcagtatacagtgctttgtagttaagtattttttggattttatttgagaagagcatactacttgccactgtgccagtgtggtttgttctttgtatctagtaggtgggcctttctaaaggctatccacatgagattccacgaatttttggagcatcctgaagttggtattacacagattgttggtttcgctttggtagtgatttttatctgtgttgtttataaagggaatagctgattttgcctagtttcaaccagtatgacttgtccagttttaaatccagacagaataatataaatttgatgtaataaaagataggatttccttgcagagcagggaattactaagaacaataagcagaggaaattattagagctgggaaaaggctaatagagtgagctttggcttctgtagcagtttagatgagttggtaaagcttgatcctatggtgttggctgagaaaatggaatgggaaaaacccaaatcttgatgataataatagctaacatttcttgagtgctatgtaccaggttgtgagatagatatatatttgacatagatatataaatccagttactatagaaggcataacagttttaagaaaaatacattattttaggatgtaaacacaggtaatctttctttgaaagcagcttataaaataaatctgaggctgggcatggtggctcatgcctgtattcccagcacttgggatgccaaggcgggtgggtcacaaggtcaggagttcaagaccagcctggccaatatggtgtgaaaccctgtctccgctaaaaatacaaaaattagccgggtgtgttgatgggtgcctgtaatcccagctacctgagaggctgaggcaggagaattgcttgaacccgggagatggatgttgcagtgagtcgagatcccgccactgctgtccagcctgggttacagagctagattccgtctcgaaagaaaaaaaaataaataaataagtaaatcaacatgaaatgctacatagtggtcttatggaactgaaacactgtagaagtgatgacatttttcagaatgttaaatttggcataaatgtaattcatttgggtaactgcattaaagcccgttctgtttatagtatagatggtttatgtagtgtgggggacccatcatggtggtagtgagtggagcttttttgctctcctattccttctaatccttttttttctaccttaggtggtaaattcactccagcagcaacctcaggctgcatccccttcagtaccagagccccactctttgactccagtggctcaggcagatccccttgtgagaagacagcgagtacaagaccttatggcacaaatgcagggtccctataatttcatacaggtatgttcattttagtcagactctgtaacagaaagtttaagtgtttatattatttgactttattctatcctaacttaacctgtaggattcaatgctggattttgaaaatcagacacttgatcctgccattgtatctgcacagcctatgaatccaacacaaaacatggacatgccccagctggtttgccctccaggttagtagtggtacatttttatgtgagagagaaatataaggccagtactttcaggttttaaaaagattgtgaaaataaattttgtttattttaatgactgtttaattttgactcttaggtcttttaatttgatagaaagaatgttattgttcctatgatttgaattaaaaatgtagtttataactgtttatttttaaacttttcattggcatgtagatatagaaaaatatacgcaagtttaatgagtttttataaactgaaaacacctgcagctagattaagaaatgaaacattaccagtaccccagaaacctacgttgtttcctttcaatcactagttaccctcacccctagcgatagcaaccacttccgtacttgtaactgtaatagaccagttttgtctgtttttgtaactttaacaagtgaaattttgcttggcttttaaaatttcaaaattaatctaggagtaaaaataatagaggtgcctttttttgaatgcttttagctttctaggagaatttctggattttattaccttaaaaaaatacacagcaatgaagtgggtaagggaatatgtaagaggcaaagggaagagagaaaccacaagacagtttcagactctttctggacttacaccattatttgaagtagtagcactaaatacagttggtgccttccattgggttaagtggaccttctctc

SEQ ID NO: 5465 - DNA, 6000 bp, Homo sapiens
acaggagattttgggagggcggctgcttatcacatggggcgtggctgagtaatcattttgaccaaatactccctgtggcatgctcaccagactgctggggccgacagtgtggtccctctgtctatagtcttggcctggtcttatatttttccttggctggtgtctgttttattacttaatccgtgcaccattcaccccaatcacttttggcaaccacactttctttccaacagcatctaatacgctcagcatcgcccatttgctcagtagctcttcactgctcgggccttgcgtgcatcacagaacggtttgggagcaggcagacctagctttgcatctcagatgtgtcacttattagctccatgagcttgggtatgcaacctcacatctccaggcctctgttcttatgtgaaaggggaataaaagtactctgtgacttattaatcagtgcactcaggtattagaaagtgtcctgcacatacacttcttctccaggagctttggatacaagagtctgtggtaaatggttcctcccctccatgttcacagtctagtgaatgaatgagacatttgtttaagaagaaaagtcacgataaggggtatatactccatggtgacaatggtgacaacgaactctgcttttatcccttcccacagcagcgtcctttccctctgcccccttcataggcatgccccctcctttagtcctctttattcttgggatgacttactcacatctctgtgcttggcttagaagttgaaaaataggcctcgtatttctcattttattggagactctttttagcagggtcaacttggattccaaagaggaaggaatgagtggagagatagggaggagaagctgccaagtgggcatgggcgtgggggtacaggccgtgtttgtcactggggacagctggaattattgacattcatgacctgcaattggagagtaactaaaatacttcaagttgtgagggtgtgtgtgtgtgtgtgtgtgtgtgtgtgtgtgtgtgtgtgtgcatgcgtgcaggcacacatgatatattaaaaattaatccttgggggagattatatagagcaaaaaacgagagcagaaacattaaacccatctttattttttctgggagctgtacagtttaagggaggctttttgccttctcattggacaaaacctgataggtgaagtctgggaagagccaccagaataacagctttctcctttcacttctggattggagaagtgtagggccaagtctcctttgaatttcacatggggcctctcatttccctaagaggaccctttgggtctgacaaatgaagatattttcaataaaaatctctcattagcttggtatcttagggccaagttttgcttttgaagattaaactgttgtcctggcagattggtttctacataattttctgtgcatgcggagctggagctgtacgtctccactggctacatcttcactataatgagattctttttgggtgtgtttcctagggactctatagacaaggacctgtattttttttatgccagtaacagtgactaagacatatgagcatccatcatttgctctctaaaatggctgctcagtcacagctgtgagatgaacacagggatgaacttggtcaggaagactaaatcctgttcatttcatccactgattaaatatggcgttattctggaaaaactccttagaactgatctttctctactcatgccataggagcccaaaaatgtcaaatgaatacactggcaccaagattcctaggagagaggcaggaatgtggatttcaagatttcttatgagactgcgcagcattgtgaacatcctgaataaagaagatatgtgttcagtgacaagggtgaacagcctcaattcatcctgcccttgaggttcttttcagcccattgctagttaagtaaataggccagcaatttagcataatgctctggtagcttcaggttttgctgtgttagacactcatttcatgtaggacacacaggcttgccctttttaatgttattatcacgttttttaacagcactaacagcacttatggccctctggatgtacacgtgggtgtctaagggccccctttttggtgataccattaattcaaataagaagatggccacatagaagacaggctttgcccactacatcttccaaatgtcagtgtcttgtgtttgacagtagagatccttataaatttgaagcctcgttcagtattcacattggcgagcaggctctagctattgttggcagagtgtctgcaaacaatatttttaggagcattggaattaacttttttaaaaattaatttctggttttagaagcttgtcatggttttcctttgcttgacagatatttattgtgcatcttctatgtgcctagcactgtgcaagacactggggcacaacactgaacaaaacagagaaaatccctgccttcattaagcttattaaatacattcaatgagtcaattaaacagtatgccacaaagtgatgtatattaatagggaaacaaatcaaacaactagggcaactaggattgggagtgccaaggaacagtggtgttggcaaattaggtgagtttgaaaagaaatttggatacaaataataggctgaattctgcccaatgactgggctgtagatacctttgtgacatcatttgtaccattgtcttgttattttatttgatctttcatgctatgtcctgcttctgttagtagtttgtaagcaacttgaagacaggaatgataaatcataagtcctggcttcccctagtagtacacattgcaactgctccccacctgtggattggattaaatgcatttatacctccccatcagcaaaagataagtgtgaccttgtgcgtggctatttcctaaacctgtatcaagtgtgtgatgggggtgtgtgtgatatttaggatattcttcctaaggtagaatggtggtattgttgcagtccttcgtcgaattgttcatagtaactctctccttgcagcactggttggactatgaggaaaactactagagaccttttcttttctattcctcctctggaaaaatttgcttccttagcctaaaagtcacaggacagacggttagtaacggcttgacctaaaccaactgggaacagttgcctccgtattcatatttagctctgaagagcttcagaccttgtggtctgatccaagatattccagctgctgtcaggaaattcttttttatgttctttctaaatttaattgaagtctatttgtcttttttcgaggtaggctgtggaagaggcaaactagttgatgtgattagcagtgagccctgtcatggcctgtcaggagcctttctcttgatgctttccaccctctgggctgtgtgagggatgacacaaaaccacctgtcccaccccaaaagatagtctgctgtgcctcctcactgggcttccaggacattttctccaagcccattttactcagggattcattgattgtaaggaacaacacacatgcagaagagcttaaaagagaaagagggatgtgttggaagcacacagatgtatctaatggaagctaaacctggcagtgcgccacccttgcaaggggtatgtaagtgaagtcatcataacagatgaagcctcagacctcagtggctcaggacagcaggggttgatgtctcgtgctcagaaactcccacagctgggtgaggcaggctgtgctccacacagtcattcaggggtccaggatgtcaaatctctgctgtcttcccccagacgtccccagccaggcagctgataggagagatgagtggaagatcgagcaggtggttttaggggccagtcacaaaagtggcataaatgatttccacccataatcccctggccagaacccagccacgtggttatggcttactggtcgggagatgaggaaatgaagtctagctgtatgcccattggtaaagggaagtaggtttggaggacagttagccatctctgccataaccaggaacttgaagtccgtctggagctaggtgagccacttcctttgccctgccagaaaactgtgtgtcttctgtgcttgtttctgttcagatgaggagagggacagagatggtttttagtgagtaaagaaacgcacatcctctccctcctccatgactttgcagtcctctgtgtggacactgttttagcttgctggaacaccatgctgggcttcggtaaggcccttcatcgccccttgctcttggccaggggtcaaaggtcagctgagttgttagcatattctgtgcaggctcatctcagacagctaacaacaggcactgaaataatgtctgtaaaatatgtgagcaaagacagttctcccaggagactctgacctaaattttgagccaggctctgcaaatttgcctctttaactaggaaaagatgaaacaaaggacaggttccttcaattcacatctgttcagtcctgcctcagctctagataatgtgtgttccttaatgcccccaagggagagggggctttaccttctctcctttcggggtttctacactgtatcttctccccagtatagcagtcaacacaactcccagctcctaggctcagccgcacagctttaagggggttcagatgagtttgggatcaggcatatattaggaagcatgtgtgtgtgtgtgtgtgtgtgtgtgtgtgtgtgtgtgtgtgtgtgtcagagcgggggtgggggagctggagagagagagagagcgtgtttaggaaccgctggggaacactgcagttccccagtgaacactgtccatttcccctgtttagtgtttgaggcagcaaagctattacaggaataggaaggacagttggcctgacccaccccatagaggtctgtcctacccctattgagactggagaattgtcaccaccttcccacaccagaggcctcttccacagggccatgtatactgtctgttttataagccacatctcagaaatgttagggagtatggaaatgttggggccagtgccatggttgtatgttgagggagtgaaactctcttctcaggttcaggagaaggtattacaagaagaggaacccatacccagacagccctgctgttgtcctgcattgttgagggaggaattatgtcctatgtgtttgtagtaacagaatccacagctaagaaaagacaagctcaggagggaagtccttgggtagatgctaaagagccttctctttgttctttgtgccagaagctataggtttctaattatgatggcaggagaagtgtccttatgaagtgtgtcgctgtgtataaaaatatctctatgttttgttattgctgtgttctttgtgtgatagatgttattaggagcacactctgtcctttccaaggacgtaatctgactgttttctgtttcctcttcttttttgctttgctttccaacctgatgatgtgctgctgtgttctgttgcaatgaaattccttcatctgtttcacatcgcaacaaaaaggtaaggaactgcaaaccgtattaacatgctgaaacagcaccaacttatataacatgcaaaaggagatgcattttaatcactgggaatttttttactttaagagaaaaagtgatggattgtgaggacctcaattctcgtattggtgtttggctgatggatttcacatctcctggggcctggtgttgaataagactcaggtttatgtgtgtgatgggggaggaagtcaggggggaatctttgtgtttatgagtttttgtcagcagctcacaaacttggagaaacattcacagacatttcacagttaagctgtgtaaagacaaaaatattaaataaaaaggtgagagggatgttaatattgctttggctccagactttgaagcaaaagtaattcaactaataatgagttcattaaatatgtgtcatgataggggagaggccatttaggttctttgccaaatgagaaaatttgtaattttgta

SEQ ID NO: 5466 - DNA, 6000 bp, Homo sapiens
accagggcacacatttaccaatgtgacaaacctggacatattgcatatgtaccccagaacttaaaagttaaaggcaaaaaaataaaaataaaaaaagaaacgtcaaggatgcaagtgtgttttgagtggaatgaaggagggaaaaattagctaatgaagggaagacatgtgagattaataacagggatgggggacaggggcattagtcatggcatgccttagccagtctaggtcttataaggtagagagcctgcccctgctttaacagagtctatgcaagaaaaacccaggtaatttgtgtttggtcttattgctcagtggtcctagcccacatttgtcttcatagaatagctatccaaaaattgcttgcattatctgggtttagaacattgcttcagacatgtttcaactacactcactcatatgaactcacttttgggtcattattattacagtgtttctggtcaatggataaaaaatacagttagataaaagaaatagatctttctagtgttcagtagtgcaatagggtggctatagttaataatgtattgtgtatttcgaaataactaagagtagaattaaaatgttcctaacactaagaaatgataaatgtttaaggtaatggatatcccaattatcctgatttgatcattacacattgtatacttgtatcaaattatcatgtgcaccctatttacatttattatgtatccataacaactaaaaattaaaaatggaaaaaaaattctttacatttactttggccgtgctcgatagcagcaggtaatacaacgcacagtatgtactcaggagatgcttattgaaagaatggatgtgtgaatgaataaatgaatgaggatagatgcaatcttatagcacagatagatatttccacctgtaaataaacataaattctcaatgtagacataaactacagatttattcatcatctgaattgaatatttagaatatgattaagtgttaaataaattttaattgtttttaaacacatgcatgttatgtcaaagtaaaggaaattggaaaaattactagttgtgtacattcagaaacatgctctggctctgagaggaacatttactaaaaataccttgcttcaccttgaatagagtcactagttaaaaagaagcacataaacccaatctcaagaaaaaatgttactcgatttttatctatctatctatctatctatctatctatctatctatctatcatctatctatctacagtatccatagtgctttcattgtctttgtgcagtcttcaacttcaaatgtcaactacatacttgctctgtttgttgaacttacccgtttttatggtggtaatttatttctacagctcttcttgtagctaagaccgtggcatttactgctggcatagtggatgtaaattggagtctctgaatttgttttagccttctcttttcagagtttggaataacctctgtacttttataaatatggtagattgaccttagcacgtggctaagaaacttttgtaaatacattttttaaaacttccctattttcatgtataataaagtaacagttttgggaaacatgagctgatatgtattttaaattttataggaaaagccagtttggggtattttactctttggtcatcatttgcttaataaacaaattgtaaatctgaggcaaacaaatatattcattgttccatggggtggcaaagcatcagtaaaaataattactcacatcacaaggaaattagataacacttgctttaattgccctatcaatttaaatcaattttccatttatttttaacaactattatggttaatttaacgatcattgcatttcaaatataattccagagatgttgctttataatttactatgccatcatttttcaattaactatttatgctatcttaagagtgcataaccttacccaatatttattcaataaaagtatagtgaagtagagttaatatttttaagtattttttattattgttgtataaaatgccaaatattttaatgatagctttattattttactaggtgtgtggtttttctaaaaaagtcttaagccaagtaagctatagaaattatgtctgtagtcaaaaggcccttgattaatatctgtcttcttgagtaatttgcatgttaattatcttatgattgtaaaatgcaatgaaaatgtatgctgcaagtattgtactgaatgagcattcaaacatattctgaaagagatttttaaaaattcttatacgtttaaagagtctattaattattcctttaaaatgatctcataataactttttaaaatacattcatgtgtcatttaacaatgggcatgcattctgagaaatacatcattagacaatgtcatcattgttatgggaacataatagagcgtacttagcaaactgaaatagaatagactactacaagcctaggctatgtagtatagcctgttgttccttggatacaaacctgtataccatgttactatactgcgtactgtaggcaattgcaaaacaacgataactatttgtgtaacttaacatatctaaacatagaaaaagtacagtaaaaaataaaagataaacaacggtacatctgtacagggcatttagcatgagtggaacctataggactgaaaattgctctgggtaaatcagtgaatgagtaatgagtaaatgtgaagtcctagtacattattgtacactactgtagacttaaagaacactgtacacttaggctagattaagtttatttttaaaaagtttcaataattaaccttagctcactgtaacttttttactttatgaactttttgactcttttgtaataacacttagcttaaaacaaacatattgtacagctatacaaagtattttcttttttctattcttattctataagcttttctttttttttttttttttttacacgttaaactttttgttaaaaatgaagacacaaacacacacattagcctaggcctacccagggtcaggatcatcagtatcattgtcttctaccttcacatcttgtccaactggaagatgttcaggagcaataacatgtaaaatgttacagcatggatctgtcatctcctgtaataataatgccttcttgtaggatacctcctgaaagagttgcttgaggcttttctacaattaacattttttttaataaggagaggggtacactcaaatataacaataaaaagcatagtgtagtaaatacataaaccaggaacatagttatttattatcattatcaagtattatttattgtttacaattgtatatgctatacttttatatatgtgactagaaatgcagtaggttcatttacactgcatcaccacaaacaccttagtaatcattatgctatgatgttacaatgactatgatgtcacttggcaatagccatttctcagctccattataatcttttgggcccatcatcgtatgtgtactctatcactgatcaaaacattgttatgcagtgcatgactgtcctctattcttgttattgcttcatagtttaatataagttaagattgtataagccatagtacagtgaaaatcatctcttaaaagagacaatcgccatgtttaaaatgatttgatattctgccatgttataaaaataatatagcctaagtatacattttaaagtttttggcaggacgtggtggctcatgcctgtaatcccagcactttgggaggccaagttaggtggatcacctgaggtcaggagttcaagaccagcctggccaacattttcagtgtctactaaaaatttaaaaaagtagtcagacatggtggcgtgtgcctgttatcccagctactcaggaggctgaggcaggagaaccgcttgaagccgggaggcagaggttgcagcgagctgaaatcataccactgcactccagcctgggcgacagagcgagactatctcaaaaattaaattaattaattaattaattaattttttaacattctttttattctttattttccaatagaatatttttaaggaatatttttaattttttagactgtatactggaataattcacttttttgtgtgactagtctcacaattagttaatcagttaataacaataaatgctaggaaatataaaatatgacaaggtggcaagagaacaaaacatgaaaggcaagcatctagcttcttttccttatcttctctctgaaattattacatgtatataaacagtgtaacttattcatggctcttgcctcagaatttgtgcaatttttgaacaattctatttctcatcttgaaatatcaagagtatccaggtctctgcccaagtgattggcagtacttctgttctctatgctagagtaacaacagcaatgaaaatgagcccatagagtcaacaatgagcaggactatacttgtctttttcctggctcacctaggattcctccacacccttcacctgatccctgctctggccagttacccttataaacaggatagctgaggaacagcagttaggcatacagtctggaaatagaacaaaactactcacatggggttgacttcaaaatctttgcctcatttgcattaacaattcttcaaatatttaaataacgagattgaaatacagtttttagtgttatttattgctgttacaataagttgaggattcatttttaaaaactgttaaaatgtggctaactgcattttctaaaaacaactacaacaacaaaacaaggctttccattttctgttcctttcttataggtttaggcttcagtattgcaggaggtgtggggaaccaacacattcctggagacaacagcatttatgtaactaaaattatagatggaggagctgcacaaaaagatggaaggttgcaagtaggagatagactactaatggtgagtgtgactccagcaaaactgtgtgtatatttataaagctcttgttttccagtgtatgactgtctttgtcagttcaggctgccatcacaaaataccacagggtgggtggcttaaaatggcagaaatctattttctcacaattctggagactacaaagtccaaggttccaaccgattaggtttctggtgagggctctcttcctgacttgcaggtggccaccttctcactgtgtcctcacatggcctttcctgggtgtttatgcagagagagatctgtctctctctttctcttcttacaaagccacctcttacaaggcccagtcctattggattacagcaccatctttaactcatttaaccttaattatctcctatagagcctatcctcaaatacagtcacagggaggttagggcttcaacatatgattttgtgaggggtccacaatttagaacttggacaaaaattgaaaagaagagacagcagatttatgagtaagagatttcaaaagtacatgtacaatgtatctattttgttgacattttcaaaacaaatctaaattttcattaattttcttagatacacatggcatagagattatctgttgttcttccaacataatgtgtctcctattagggagagcaattactatttatagactgctggagaggtggggtttgcataacaatagaaacaacaccctggcttactgataagcgtatttccacagtcctttgtgcaaccagtatagacacagctcctgacttccaagaatttataatctgagttctgctacatgtgtaaatggatctcttcctttcctccccttagacagggttatagctatttcatttgccagcttctcacatgcttcagtagtcctaggcagtgattgacattgacacacagccagtctttctgaaccatggagttatatgataacctaaagcaaaattaaggcgattataagcaacaaagcatttgggactgtgttaataaaactgccttatgtccatttactgttgtatgccaaaatctacaggataataatcgaatattgtaaattaatagtaggtagc

SEQ ID NO: 5467 - DNA, 6000 bp, Homo sapiens
tctgtttcccgggctggaatgcagtgacacaatctcgactcagtgtagtctccacctcctgggttcaagtgattctcgtgcctcagcctcctgagtagctgggattacaggttcatgccaccacgcccagctaatttttgtatttttagtagagacgagattttgtcatgttgaccaagatggtcttgaactcctgacctcaagtgatctgcctgccttggcctcccaaagtgttgggattacaggtgtgagccatggcgtcgggacctgtacctttgatttactacatttttttgactgggcaattcagttcgctgggtataaggaactgtggtctgctctttgaaaattctgtaaaagagtcttgagattgttgagttatgatttacatacttatttccttacagtaaactcatcagttcttcaccttttaaaaatctcagttattggattgaaacatgagaaatatgttaatagtaatactaaatcagaataaataggcatgtgagctttaataaaatgcacagttgttttttttttttaatttttattttattggccaagatactgtgctgtcacccaggctggagagcagtcgtgcacatcacgacttccgacttgtggtctcgtgatcatcctgtctcagcctcccaagtagctaggaccataggcactaagttaaaaaatttccacgcctcggtaatttttaaattttttgtagagacaggttctcactatgttgtccaggctggtcttgaactcctggcctcaagtgatccttctgccttggcctcccaaagtgctgggattgcaggcctgagcaaccatgcctggccataatgtgtagatctttattttggctatgcagagttctttttgcatactttcttttgtcataatgttccatgaagatgtgtaccatgaagctgagtttcacatactggctgtttcccttttcatttcccctttaaccttgttccagttattgccgtgtaacagattaatccaaaatttaagggattaaaaccatgattttcttatgcacaaagattctgcctgtcagggattcagacagggcacacaggagttttgatgtttctgttcgatgacactgggggcctcgtgggaagactaagacttgttcattcatatgtttgttgcttggactaaaatgagtggaaccacagggattgctgatcagaagcaagaggcctttcttcatggcatggcttcctcatcatgtggcagtctcagagttactgtatttgtatgatggctgaaggctccaaatacaaggtgtttggatcaccagcaaacaaggcagagatagattgcttttatgactcagccttggaaatcatacagcatcacttatacagtactcttggttgaagctcactcaagtacaatggcaggggaagtagactagttgttaatggagtagtgccaaggtcacattttagaacagtatgtgagactgcatgcagattttgtagctatctttggaaaatgtaatctgcgatagctctcggtttggatgaattctaaatttgttattgtgtagaaaattggaggttttctactctaggatagcttgtcctactataggatagtataggttcataattaaggattgttattggtgagagtcctaacaatgtactgaagtctgtcaattttagtatcttttctgttgcgtggaattcttattgttttcattaaacaaactatatgttcattgcacagtagttaagtgtataaaacaaagcaaaaggaacacagctctggctataattttaccactcaggtaccattcttacctttttcattgtttatctttttatatttattttcatcgctacacaaacattttttaggagtttgattctacctccattttggttagatatacaaactctaccccatgagggatgtatggtgtatttctagatttagcaacaattttcttgaaaaatgtacaatactatagaaaaatgaagatagtaaataccaggtataagttaataacagtgtttcttttgttcagtaataatgaactgtgtactagcactgaactttaggccctcctatttgcgtattttctgtttgtatatttttaaatagaggaattgtgattataatattattattttggaatatcctaaatcataaattcaaaacttatttagttttttttttttttttttaagatggagtctcgctttgtcccaggctggagtgcagtggcatgatctcagctctctgcaacctctgcctcccgggttcaagcgattctcctgcctcagccttctgagtagctgggattacaagtgcgcgccaccatgcctggctaatttttgtatttttggtagagacggggtttcacagtgttggccaggctggtcttgaactcatgaccttgttatctgccgacgttggcctcccaaaatgctgggattacaggtgtgagccaccgggcctggtctagttttttatttcttaaaaatagcctaccctttaagcaaatagaattttttattttaaaaatttttagcttcccaagcttatgagtcttcccttttcttcccttttaaaaaagagaatgaactatctgttgatcctcagagtattttgtgaggtaattggacacatcttctgcacctggggtcaggtctgtcatatcagtgtaaaaaaaaatttttttccctcaaatcagtagactgaaattttatacctgtttatttggaggcttatagatggtgtgaaatagttcatctaataataaaattgggtactattaaaagcctttaatgtcttagtgattatcttggttttatttacctccagtgttaggaaggaattgtggtagggttttcaatttggggtagaatggctaggcaagttgacatttgtttatggtacaaagaaaatagatcatttgacctaaaaaaaaaaaaaaaaaagaaaaaacaaaacttattaccattgcttttaaactggcttctgtggtttctgaatgccctttattagaatttaactttgtactttgtttcacaattttattattggtaagggggtaaggaactatgtatgttcataatttattgggattaagtgttgtcctgttaatttagatttatcctcattcactgtcctcttgacctttacaataataatagtttgtgactctgttgcattacctgaatatctgtggggtcttacttaatagtagcctgggaaacctgcaaagttttaatcttagcaagaaaatgggatcttaaaccagatgttagttttctgtcctcacccttgaactaacaaagcaaagctgttgacttgtgtattagtgaggtggtagctatcttgttcaagataaatggatgaagtacattaaagacaatatgcccatgagtttattcagaaaaaaaatactttttttccccttggggtggggagcagcatctcacgctgtcgcctaggctggagttttggcattatttcagctaactgcagccttcacctccagggttcaagtgattctcccacctcaacctcccaagtacctgggactacagtctcgtaccaccatacccagctaatttttgtgttttttggtagagatggggtttcatcatgttggccaggctggtcttaatctcctgacctcaaatgatccacccaccttggccttccagaatgctgggattacaggcaggagccaccgtgcctggcccgaaaaaatactcttttttttttggatgcaaaatttcactcttgttgcccaggctggagtgcaatggtgcgatctcggctcaccgcagcctctgcctcttgggttcaagtgattctcccgcctcagcctcctgagtagctgggattacaggcatgcaccaccatgcccagctgattttgtatttttagtagagacgaggtttctccatgttggtcaggctggtctcgagctcctgacctcaggtgatccgcccaccttggcctcccaaagtgctgggattacaggtgtgagccaccgtgttcagcctaaaaatactcttatatcacctagtcacatgaattctttggggagagggagaggcaaaaatttaacttgataaatgtctgatatgctcacttgggtataagcaggatcctaaccaaattgtggcccttacccatgtgggtaggagccatatgcctagtccatctaatactctttcttgattaagctaaagaatgaataatgttgtgccattggtttacagtacagcctttgatatcattcagcaatggttggagtatatctaaaaagttttatgtacttaggctgggcgcggtggctcatgcctgtaatcctaacacttggggaggccgaggcaggtggatcacctgaggtcaggagtttgagatcagcctggccacatggtgaaaccctgtctctacaaaaaatacaaaaaaattagctgggcgtggtggtgagtgcctgtaatcccagctactttaggggctgatgcagtagaatagcttgaacgtgggaggcagaggttgcattgagacaagatcgtgccattgcacgctagcctgggtgacgagcgaaactctgtctcaaaaaaaaaaaatttatgtacttaaactggaatatatcttaaaagtttatttaagtcaaaatttgagacaaacttagaggattgtgagggttttgtcaagcatgcttaagctggtatataccttcaaaacggaatgtaattcttttttttcttttaacatagggtaagcttgatgattaccaggaacgaatgaacaaaggggaaaggcttaatcaagatcagctggtaaagatgttatattttttattttagacctaatgctcactattttaaagacaaaaattaattctgtggttttttgtctttccagtaaagtttgggttctttgtcattttaggatgccgtttctaagtaccaggaagtcacaaataatttggagtttgcaaaagaattacagaggagtttcatggcactaagtcaagatgtaagtaaaagaaagtatacatatttatgaaatacttttgttgtttctttgggttttagtccttccattactattgataagctctctgcaaggtgagacagttgtatccaattatatctaagatgccttcacattctgtaaagtaaaatgtaacacctgaaagatgtcttttaaaaatactaagtttgaaattgggggcggtggcatgtgcttgtagccctggctcctcaataggttgaggccaagagttcatggctgtggtgcatatgattgttcctgtgaatagccaccgcacttcagcctgggcaacgtgataaaaccccatctctaaaaaaaaaaaaaaacattaaatttaaaaatttttttaaaaggaccaagtttgagatttgacaaccatgtatagtagctatgctaaaggtctcattggtttaaaatgttagctctgcaaatacataaaaatcagatagtcattagaaatacataaatgttttttatttatcatgttccttatgtctaatgactcacaatttaaactgtcagaaaataaagaggctcgtttatataattggtaattattctctgctttaggaaccttaaggggtatggcaaactgatgtgctcctatatcagcactcgatccaacttaatagtgggtttttgatgtgacaaaaacctttgggaataaggacaaaagttaaatgcaagcaaagtcagataatttgttgaggccagaaaattaagccatctgaataagtgtcatcttctttggagaagactaataacattgaaatacaggcatgtactccataatgatgtttcagtcaactttggaccacatatatgatgatggtcccataacattgtaatactgtatttttactgtacctattctgtgtttcgatatataaatacctctgtgttacagttgcctacagtagtcagtacagtaacatgctgtacacatttgtagtctag

SEQ ID NO: 5468 - DNA, 6000 bp, Homo sapiens
agtcactccaccttttcctcatctggaaaatgaggaggcaggatgtggtgatgtctgagacccctttgggctctcacagtgtagaatcaagtggcacctgaactccatcctgaggagaatgacaggagaaagcacccacagataatcacacttgcactgcgggcagtgaccccgcggcatagtattccagcacagctctgtgtgctgcgaccacattcaggagaggcaggggaagactttttattgctctcaggcaagaattcagtcctgagcctcagggagccggcagtggtggtctgagcaggggagaaactagctgccctagattactctatttcttccaaaccagtttttggaagtctgggttttcccctctgattttcacagatgacagcgtcagcatcttccccctgcctctgcccagggccccatttctccccttatgccctcctccttcccttttccatccctgtctccaccacatcacctctttctctctgaagcctctgctggctttctccgtgacctgccttgtctgttgctggcatggttaggaaggccgcacccccttcccagccccaagcaggccctctaatccctgcagtcggctgaggacaactgtagtctctccatcaaataagcatagaccaagacctgcagcagctctgcctgcgagccggtcaccatggcaacgagcatcacctccattctactgtgaaaagaaaatggctgttggaaggaagggctcactgaatctccattccccaggctgttttgttcaagcctgtccctcctgttggccagaagaagccccatgcactgaaccaaatacctgtttgcctttagatttggggtttacttaagagaaggaaaggcagaaagaagttgaattcaaaggaataaagcatttttccacctcgaaactctattttcatgaggaatggttgtctgctcccagcagataaacgaggagcagatgaacacagggatctgtgagatctggcgcagtgtattttgtcttatcggtgcagtggaatgacagagcatatggatgttcaaataaatattcagggaaagtagccaagggacccagggaattccacagggcacgggctacagaatttccaaagggtgtctgactaattggggtggtgatatgtgatgttggctcctgttatggaaaaaggtgtgttggtcctgtagtcgtgagggaaggtgagggtttacccttaccatccccacttcaaaatcagtgtgagccctcctagtgattgtgtccggacagcctggggaactggcaggagacccctgagcttgattctggagtgcagccttactgcacttgacacagctgtggagacacttcagatgacatccagaaggaactggttgggtcaccatttctgtgaatcccaggatgttgctgttttggagcaggatcataagtcttctcaaggggttggaaacatttagtgcagagatcacccagaatctcccagggcaccttgcactctctgaggggaaatagctattccataggagaatggtctgggccgtgtctctctctggctgcacatggccctggctgttggtggcacaagttctcaaactccacacaacctcctcccttcactctttcttaaagtcagttgggaagcctatttttgaatggaagatctgggtttcattcttgaacattggaatgtacgtttgaactgaactttgtgggtttttttttgttttttgttttgttttgttttgttttgttttttcagtttctctgcaggtggatattgttcccagccagggggagatcagcgttggagagtccaaattcttcttatgccaaggcaagtgcctagtgctcagctgcattttagaacttgcttcagaaactcactgggtagagcaggagccctcaggccatgtgagctggctggtcaagccacacctagaattcttggcattgctctattacagggtcaatagtatggccatttaagagccagggcctcttccttccttttgcaaaaatctgcctcaacatagcaaatctgtcatctagacttcaccttgactacagaggaagtctaggagttttcttagaaaaatcagcacaacttccagaatagtgaatcatcccccatctcctattctgtatacattcagagttctgtaaatgacaatggagaacagcactggctcagaaacaatacttcggtggatctgtttaaggcttatttcttagaattccccagagcttgaaaatctaagtctaaaacttgcctgtaggtaaatagaatactggtatggcttttgttgtgaggacatatatcctgggtttaccaggtctattgtgaatatcgatattctgtgccatggtccccaccagagctctgagatatgccagacctggtgaccttgttttacatttagaaaacatgccccatttccacagcccagataattgccagaaaatgtcctgtggaggaaaaggtttcaaattaagcctcagattctctgtatatgacatgactgggattcagaacatggaagaaccaggaaagagctgagctaggtgtaaatggtgacatttagcaagcagcttttggcagggaggggcctttaaatgctgtcatgatttgcgtggacgaggtggcttgtggccgtcggatgtgttcactccagctttgccttcattacagcaatttcaatgatctggagacgcagccgtggagcccacagcacatcttgcaaatagcgatatttattgaaaacatgatgggccctgaaaggaagactgcttcatttccatactaagcatctgtgcagggctgggtggtgcaggctgagaagggcgccacgcgaagaggcaggggcccatgcaaacaggcagggcgccgccacatccgccggatctgagcgcccttccagctcagtgtcctgggcagtttcagtgtcagagccctgttccagctcagtgccgggggcagctcagccaccacagtctgttcctcctcattgctgcctggggaaaggaagaatgggtggttctggctaccttctttgcagcatgcaaggaaatgaatttgtctgagcagggagtgacgaaatgacagtcatgccagtttgtgcaggcagatgctagaataaatgtggctggaaaaaatgaaataaaaagtggttggaatctgcactcctatactagccagtatttctcgccttcatctcaggagacccattatccaaggcttcaaaaacaagctgatcagtagactcagaccagttaggctctggcgcccgaatcctaaatacactaattcccttggttacccgttgtgtgaggcatgtgtgttcctagcttagtgcccagcacacagtatgttctcaacaagtatctcttctcttccatcattagggataggaccatgataacaactagtacaagtggttgttgagttctttccaaatattgtaagaggtgttaagtatataatagttaaatgcagaggccaaagaagggctgcatgtcattccagcagccatactcacccctccctgatgttcaagccttgactgatctgttgttcagtaactcttactgatcagccactgtcagtctggaggggacttattagtcttttcgacttcagtagcttaaaaataatctcttcctctttagtggcaggagatgccaaagataaagacatctcctggttctcccccaatggagaaaagctcaccccaaaccagcagcggatctcagtggtgtggaatgatgattcctcctccaccctcaccatctataacgccaacatcgacgacgccggcatttacaagtgtgtggttacaggcgaggatggcagtgagtcagaggccaccgtcaacgtgaagatctttcgtaagagcctccttcttcttctgcattctctggcctctccttgccaaggagacatgtgggtagtggaaaggtggaaatgatgacagaaggaccagctgagggcctaaccagtcccattctctctccctaagtcttttctgaccttggccaacccagaactcacaaccctggttcacactggtcacagctactcccccacaggcgttcattctcaaaattcaaattacatagttcccagagggctattacgggtttctctatcccttccccaaatgttggctgactgttctgcaatttgggctcctctcccttcttatttccctctcccctgctggtaatggagcccagggctcagtggggtgggggatcattatctgaacactctctgccactcagagcaggcagttcctattgcctctgaaaccccatctgtaggtggcatctcgttaccttgttatttatatcatgcatccatcccagtggttggagtaatggtgggtgacagctaatggaacagtattgattgcacggtatttattgccattaaatgtgcttttttcctgttcttttcatcagcattctgtctgccgtaggaaagttggggtgggactgggagtagcagttcgagtgggagacaagaaaaggactgatgattcttactattcgttgtggaatggatgttccaccagttcattctacctataacctgtgcttcactggcatcatcctgcatgacaaggaacccttggtgaagatattcctttcattctgtagacccttttctgcacaaaatgtgataaatttagcactcaatgagcagatattggttgccaagcattggtaacctatgcttgggccagctgctctgcctgacgtctctgagggtgcccctcttatacaactgtacatcaggatcgagacttgcccaggactcaagtccaggtaccatggctctagtgaaaggggttctttgtgagagaagcagctgttttccctcactcttctgttcatcttccagagaagctcatgttcaagaatgcgccaaccccacaggagttccgggagggggaagatgccgtgattgtgtgtgatgtggtcagctccctcccaccaaccatcatctggaaacacaaaggccgagatgtcatcctgaaaaaagatggtgagacctgaatttcctggcatctgccttttccccaggccaccaagttccctagctttttcacctgtactgaggcattccagtccaaactccaattcatgtgtgcccgaaccctcatgtggtttctgggtcctgaatagatgcatatctgaagttggtatacttaggtacctgattttctctccagtacgaaagacaaatttctaatagacatttactcttggctgtatttcaaagccagggacgcattttcttatttgggcttaaaaccccaccctatgatactgaagttaggaaaaaggaaagagactcagccacctgcctgcagatgctctctgactgattcttggatgaacctgcctcttatctcttctagtccgattcatagtcctgtccaacaactacctgcagatccggggcatcaagaaaacagatgagggcacttatcgctgtgagggcagaatcctggcacggggggagatcaacttcaaggacattcaggtcattgtgaatggtgaggagagtccgttcttcctgatctctgcattgctacaaccttggttctccaaaatcattctctttaacttcctcttgggtctgtaaattaaatcctgtcctgactcaatcatccgtctgagctaaatcccctccccaccgtaacatctagatttctttttttttttttttttaatatacttgcctgttggatcttccttcaactacgagggattttagtgcagcaactgaatgtccttcaccgttctgcagcactaaaaactttccccctgcttacctattaatcctcattgtccttgatgttaccataattgtgaagttattccgctgcttaaatgttcaaagaaagtattaagtcaactcaggcctcagaatagtcagaatcatggtccataggcttgttaatcttaacttgcagtgt

SEQ ID NO: 5469 - DNA, 6000 bp, Homo sapiens
aaacaacagtatttcgtgaaatctgaaataactattctgaacatattgtacctctacaaaacatgaagtcctgtttctaagcataatattacacgcaagaaaaggtggacataggaaaatataagcggaaaaggatgttatctcagctgatgaccaaaatgtaagaattcagagacagtatggaccaatagtaataataatattaaaaccgtactgatatgttaatacagtaggcaatacttagtgacaaaatagttgtgccaggcatgctattgcttatgaggatccagagatggaaaaacaaaacgactgctctttttctttgaaaagcttagagtttagtggtggttcatggacacatagacaatcattgattgaattacaataaaaaagactgtactggaaaaattatgatagaaatgtctactcctgacttgtagtaaaatgatggaaaaacaaatttaagaaactttaagagccttagctatgtgaacagtgtagttcacactttggtcaggtttctgtcaacctgaaacaaagaggcagttcatataattcagatgaagattcctctcttttgctacaaataagcattagcttattgggtgactcaagttcaagcagttgaattattttgctaaaatgatcaggataaatagtttaattattcactttgtggaaacttcaaagtgctgtggtctaatgaattgaacaagcaaatgtcagcttgaaagatttgttattgaaatatattattttgcatattgttgtatttgctttatgttaatatatttaatattggcatatattaaagtataccaaggtttttaaatttataaaccatttataaacatattctgctcctccagtgtgttttctgggaaccctttatttcttcaatgatgcaatgactgcaagttactgcatagctctgtactagaaaaaagggtttaaaaaatgagtatttaaaattcacataaacatagcttcagtcaagtaggaaatacacaaatttgaatgactgagaccttggcattgatctgggcaggaagtgagctttaggacacagctttgccttaaatttattggtctttctggacttgctgacctgaacagacaaacgcagaatgtcagaacaccaatgaaatgggattgggatgatataggaagtgaaagcgtgacagcttcatatattcaccaaatatttctggctcatctgcttcctacccggcatctgatagaataccatctcttgactcccttatagttggatagggtcatgtgactctttttggccaatgaatttaagcagatgtgatgcatatctacttgtctaaagcatttaattgactgagatattcctgagttctcttgtggtacagtgatcagcaacacttgagatatggcatcagcatgaatctactgagtgactactacgaacagggccctctgttgaactgtgatggatgtgtaccatttgcagttgttttttgttttttgagacagtctcactctgttgcttaggctggaatgcagtggcacaatcttggctcactgcagcctctgcctcccgggttctcgtgcctcaacctcctgagcagctgtaattacaggcatgcgccaccacacccagcaaatttttttgtatttttagtagagacaggatttgccatattggccaggctggtctcgaactcctgacctcaagtgatctgccagccttggcttcccaaagtgttggaattacaggcatgagccccttcacctggcccctttgtagttttaaaccagggattggcaaacactttttttgtaaaagaagagatagtattctaggttttgcacaccctactgtctgttgcacacccaagtactcaactctgctgtgctatggcagagaggcagtcatagaatggatgtgcatagatggattggatgtctcccaataaaactttagacattggtcaattccgaggaacaaaacagtgatttctgaaactttaatgtacacacaaatctcctgaagatcttgttaaaatgtagattcagttaagtctgctatgcagtccaagatagtagtgatagtggtagtgagagaggttgggctgaataaactttgagttgcaaggagctaaaggattatcatctccgtttctagcctctaggcctggcataattgctcagcgtagtgctaaggatggtttaggtgactaaattttgaaactatgactccccatctaatgcagcaaaagccaaagtccttaccgtggtctttcaggccctacaagaccagccccctttaatatgtttgacctcatctcctactctctgctcttgccactatggtttccgtgctgttccttgaacccaaaaagcacactccgtctcagatcttagtacttggtgtttcctctacctggaaaattcctcctccaaggtagctgcttagccttcttcctcacttccttcagtactagctcaaatgtcagtaaggctttccctgaccaccgttttttcttttctctaccatttcactatctgacatgtatttacttgtcttccccttacttagattgtaagctccatgtaaatatgttttgttcataatccctagcacttaagagttcccagcacacagtaaggtgcttaataaatatttgaatgaatatataacagactttgcagctaaccaggatatcttgaggtcggaggctgctgttgtttctccaggctccctcaggatgcactgttgccagtcagcgttactcattttattccctagggaacagtgggtttggtagaactctcttctaaatctctttttcatagaatttaaattataaattggtcatttactgttgtcacacaatattgcgttgctgaattttccactgattatattcattttatttcctcccagaacttggtttcttgtttttctgctcactgtccacacccactccaccccaaggctggaataattctcttggagcaaaaaaatcatctttttctttgtatttcattgaacgttctctttacagtgttaggtaaacctaaaaaaaaaggaaacaaaagtctaataattcgtaatactcaggcctactggatgtataacatcatagggtagctgaagactctttgtgaggccagagctttaggatttaaaaagccaccaaccatgaccgtgtccgacacgttctacagagaactcctaggttactgggtgattgtttggtggggaagcggcgagttgtctttttttcaaaagacgttttggggtatggagtttgctcgctctgcatacagaaggaattctagaagctgggatcgcaccacccaccccacgcaccccttacttgcagaaacctttgccccccaacccccacccccaccccaaataagggctcttcaaggggcagttgccagctccagagccagctgcttgacacctattgtccccgtttgggcgtcaaacgatttcgcctgaaggaccctagcgtcgattgctctcaaaactcaaggggcctttccttcggccttgccggggccatccccacctgcgtccaggaggcgccccacagcgccggggccgggggacggcggagaagctagcgggcggcctcttccgggcaggcgttcgcgccgggcagcccgagcggccgcgaaggcccccgctctccgcttctcccgcccctcgcgacccagagggctgctggctggctaagtccctcccgctcccggctctcgcctcactaggagcggctctcggtgcagcgggacagggcgaagcggcctgcgcccacggagcgcgcgacactgcccggaagggaccaccacccttgccccctcagctgcccactcgtgatttccagcggcctccgcgcgcgcacggtgagcgccacccgggaccgagccgctgcaggggaagagggccgctgcgcccgggtgtcctttatctccggacccgctggagcttccgaggggcttgcccccaagtccccccaccccaccccggtcatttcccatgcccttctctgcccccaagccccgacctctctctttcctcccttctccggaagccggcaaaagccggccctccccggtagggaccgttgcagtggccgttggcggccggcgcggcgatgccccgcctccggcgcgagcctcggagcccccgggctggtaggccgagccggcggctccgcgggggaggggcgggtcggggggcggtgcgaggcccagccgggcgccccgctggcgggtcgcgcgcgcgcccgcgcactcttcctgccctcgaggcgcgccgcgccccctcccccacccgctcgcgtaggctaccgctcgctgcgcgttttgtcccgcgtctcgccccgtccgtctcctgactggccgctcttgtccttcctcccgctttttcttctctctccttgcggtctgaagatgccctcggccaccagccacagcgggagcggcagcaagtcgtccggaccgccaccgccgtcgggttcctccgggagtgaggcggccgcgggagccggggccgccgcgccggcttctcagcaccccgcaaccggcaccggcgctgtccagaccgaggccatgaagcagattctcggggtgatcgacaagaaacttcggaacctggagaagaaaaaggtgccaggagttggcggggaagggaggggtggctgcggccgggctctgcggcccctccgaccctggtcgctggagccttcgcttcttttcgtctcgggagcgttactaggtcccctcctcccaccccctggcccacacgccccgtctccacgttcagcgggagcttcgtgcccagaaaacgggctcttggaagaggcacttgtcacctgactcggacgcggcactgtaccccaggcctctttattactcttccgctgtgggtccggctttttggcctttaggagtgggacatgtgagggtgggggcctgtcgtcaggacttcactgtatggtgcccttctttccgtctctgaggcccgatttctctgacgagggcccaaaatgaagaggtccctgcgcggggggctccgggttcaaccgaccgcctcgtggagttggggcggcctgcgtcctgcagccttggggtctgtccgctcggttaccatgcactcgagacctgtcgagcgtcccctcttcttccgtaggagagaagtgtgtttagaatcttaaggtagaactgcctttccggcaggcccattttgaatgggtcttcgatttgctacccccgcgcccatgcgatgggctcccctgcgtttccctctttgtttcaattgtttaggtgtccccccgagcctcaggctcagctcaatcgcgagatgattttctgcagcgactttttgttcctaggggactgtgaaggggcgggggactgccacgatttagattcgttgggggctgggtcctggggagactggagaggatggctgggactcggggcacatggagagagcgtctaacatggcggcggctgcggggagagggaagcgctttactggagctgcattgtgagcacaaagcgaaagcagagggggagggcagagaccaggcagccgccccgactggcctccttaggcccccctctaaaaaaaaaaaaaatcgagccacacccacgattttttggattcaatatttagtccttgtagatcaaactactgaggtatatcttcatctgcaagtcagccttttgttttatgctttcatcgcaggacagtgtaaactcttgtttagaggggcgtgtgtatgtatgtagagaaaaggtctgggcagagtgaataattaaaatgagtaagatcagaggtggaaggggagaaacaaattagtcgtttgtaaaaacgaggtaattacgtctgtgactatcatgttaacttgaattttaccttataaagtaaaatgaagccttgataacttctacttgtctgcctctaggaaaacatatttataacatcttgaatttccaggaaatcat

SEQ ID NO: 5470 - DNA, 6000 bp, Homo sapiens
agaactccacaaaagaaaaatgtaacgcacagcaacatatggttcaatagaagctctttggtttgcaggacagtggctaactcagcagacgaaccagagcttcctgccctttgcagatggcatgaagataagagtttgccaaacaactaagatgggctcttgattgagcaaagaaaccacaacatgggacacacagagccaccctattgccctactgtcattcaagcttaaaggagacatatctacagacagggtttgagcctagtaatggtgagaactttcttggatgtctcaacagcctggagatgaaattcccaagaaggcagaaaatagaggtggcacattggttttattgttttttattacaattataaaagtaatgcatgctttttgtaaaaattcaaacagtacagaggatataaaggggtaaataaaaaccttctccctgccaatttcactccttagggatacctaatgtcagcagtttcttgtgcatgcttctatacactttcacttgtatttaatgtttctcaaagtaataaatgcacaacgcttttaaaaagaaagtcacataaacacaaagcttgtaacaaaaaccaataatccctgttctgcctctccctccccatttccccaagtcccttttctccaaagtaaccattttagacatttttttttaatagcctaatcttggaagtgacattttagaggcttcttctggcatttatatatctctgcttttcctaaataatacactgctaatgctaatttttgattaatcaattttagacataatgtaatgacttcttgtatagtggattcaggatttagctctcttacaccactgtcccatctgcttcttctcccctatactcccaatagaattgtactacaattttttcgctacatcagtatttagtatttacattattatgccttacaactatttacttgttatgttattacaagcacaccaaaattatatatatattttgtttttttgagacagggtctcactctgtcacccaggctgaagtgcagttgcataacttggctcactgcagcctccgtgcccccagctcaagcaattcttccacctcagcctcccgagtagctgggactacaggtgcctgccaccatgtgtggctaatttttgtattttttgtagacacagggtctcactatgttgcccaggttggtcttgaactcctggcctcaatccgccctcctgccttggtctcccaaagtgcaaggattacagatgtgagccaccatgccctgctcaaaattatatttcttttccaacttttgcttttcctaaatctaataattgccttggtttttcacctgcttaattttctttgtaattattacctatagttatttctttgacactttacaataatctttcactacagattcccttgtagtcaattacatcaggtaatctgtctgttccaatttttctcttgaaaaattgaaaatgagtctcctagagactcccggagactcattttcttatctgattgcaccctagcccttctgcttagctgtcttcccagcacttttcttccctgtcatcctgagaattcttttttgcctttttctgagttgggatccctgttgcctagaatttgtatctttctctttctcagtttgcacccctgtttgggagatatctgttccagtagtttcatcagttttaacctgatgatactcctcagtgaacctctcttgaatcaccttactctttggcctgattatgctcgacacttggtgcaatgctgtgatcctagaatctctactgattgtcactcttcaggtgctcttcatctctttccttgttggatcttgtttgtttgtttgtttgtttactcctatattttggtgggaaagtgtatatgtcagagaaaatttcttcatcctatcttcacacttgattatagtctgaaaagtatagaattcttaggaagtatttgcttgcagaatttttaagccattgctccattcccttcttgattccaatgttgttaaggatcctcaagacattttgattcctgattgtatacaacccattgtttctttttggaagttttcagaatcttctcttatttatttatttatttatttatttatttatttatctttattttagagacagggtctcgctctgtcacccaggctgaagtgcagtggcaggatcatagctcactgcagcctggacctagtgagcttaagcaatcctcctgcctcagcctcctgagtagcttggactactcaggcatgcaccaccacacctggctaattttttaatttgttgtagacataaggtcttgctaggttgcccaaactgatctctaactcctgggctaaagtaatcctcccaaagtgttaggattacaggcattacaggattacaggattccactacaccctgctagaatcttctctttttctttggtgttctgaaattatacaacagtgttctgaatttcactaagtgctgagatatgaatatattttcattcactgtgctgagcaacttctggaagacaaaatcctctccacaattggctcagcaagtgaagagatcttaggaggtcacatgccagctattttacactttggtccagagtgagatactaatcacctcagcctgcctaattgctaagttcctgggaaatgtgaggagcagaacagaatatttggtaaacaccactatctctgacataggaagagtggactatagaaattttgttataaagggaaggagagataaggtagtagctagggtgacaggaggtgagtggattttttgtttttcttttttttttgagacagagtctcactctgtcgcccaggctggagtgcagtggcgtgatctcagctcactgcaacctccacctcccaggttcaagcaattctcctgcctctgcctcccaagtagctgggattacaggcccgtgccaccacacccagctaatttttgtatttttagtagagacggagtttcaccatattggtcaggctggtcacaaactcctgaccttaggtgatccgcctgccttggcctcccaaagtgttgggaatacaggtgtgagccactatgccaggcctgttttttgttcttctaattagaagagaattgcatgtgtttagaggagaaggagtggttaatcaaggggcatggtattggtcttggagaaggtggaaggaagaatgatgtgccttagaaaggagatctgaccctctttctctgagactggcaggaaggaagtgaaggaagtatagttagctaaatgtgtaggtgtagaagcaggaaattgaagttcacacctgatattttaaatttcctaagaagtaggaagcaagtcaattgccaaaattggtagtagtggtggtgtggtggagaagggaccagaagtaggttatgggcgttcaggagcttggagaagtttcttgaatctatctccactaagccatctgccttcggatggacaactattaatacaatagcttcccatctgatttacttacctccattaagccctttcaacatactacaaacaggctgaccttttttaaaaggacgtatcagatcatgccaccctctgcgtgaaactgtacacttgctcaaaatccttgaaatgacccaaatatttggttcacattgtcttcttagtcttagcctcaaccttccatacactctaacaggaacccttttcatttccttcctcctttcctccttgaggccttcacagatactcttccttgcacgaggagagcacttccatttcactcctactcctttcacttggctaattttaaccctttctttaggtctcgaattaaatgtcactttctcagagaggccttccctgattctttggtctaggctaggtcttcctattgtaagctcttatgatacttggagttttttccttggtagcactcttcacaattgtaattatagttggcccttgaacaacatgggattgaacttcatgggtccatgtttacaggaatttccttctgcctctgccacccctgagacagcaagaccaatccctcctcttcttcctgctgcttgggctattcaacaggaagatgatgaggataaagacctttatgatgatccatttctgcttaataaatagtaaatatattttctcttctcttccctgtgattttccttttctttttctttttcttttttttttgagacagagtctcactctgtcgcccagcctggagtgaagtggtgtgatcttggctcactgcaacctctgcctctccagttcaagcgatcctcctgcctcagcctcctgagtagctgggactacaggcatgcatcaccatacctggctaatttttttgtatttttagtaaagacggggtttcaccatgttggtcaggatggtctcaaactcctgagctcaaatgatctgcccacctcggcctccgaaaatgctgggattacaggtgtgagtcactgcacccagctccctgtgattttcttaataacattttcttttctctagctgactttagtgtaagaacatagtatataatacgtataacatacaaaatatgtgttcatcaactgtttatgttatcaataagatcaacagtaggctattagtagttgtatttttggggagtcaaaagctatacatggattttcaactgtgcagggggtcagccccttaacccccatgttgttcaagggtcaattgaatatgtttgtatatagtgaacaagggatctgtcctccactagaccataattccatgaaggtaggcactgtgtctgtttggtctactgctacatgtttaacatgtagcacattgcctggcatgtaacagatgacaaatagttgtcaaatgaataggttaatcaattttgttaattaacccatatctattgtgaagagagaatcaaggtcacaatacctatgagagcccaatcaagaatggagaccgcttttcccaggcggctgccgaagatggcggaggtgcaggtcgaggccatctcctgggcctcctggtagccatcgtggctaagcaggtactgctgggccggaaggtggtggttgtacactgcgacggcatcaacatttctggcaatttcttttcttcttttttgagagagcttcgctcttgttgcccaggctggagtgcaatgatgtgatcttggctcaaagcaacctccatctcccgggttcaagtgattctcctgcctcagcctcctgagtagccgggattacaggcgccaccaccacgcccagctaattttttgtatttttagtagagatggggtttcatcacgttggctaggctggtcttgaactcctgacctcaggtgatccacccggctcggcctcctaaagtgctgggattacaggcgtgagcaccacacccggccatttctggcaatttccacagaaataagttgaagtacctggttttcctccacaagtggatgaacgccaacccttcccgaggcccccttaccacttccaggcccccagcagcattttctggccgaccctgcgaggcatgctgccccacaagaccaagcgaggccatgccaccctggactgcctcaaggtgtttgacagcatcacaccaccctaagaaaagaaaaagtggatggtggttcctgctgccctcaaggtcgtgtgtctgaagcctacaaaaaagtttgcctatctggggcacctggctcatgaggttggctggaagtaccaggcagtgacagctaccctggaggagaagaggaaggagaaagccaagacccactactggaagaagaaacagctcacgaggctacggaaactggccgagaaaaacgtggagaagaaaattgacaaatacacagaggtcctccagacccacggactcctggtctgagcccaataaagactgttaattccaaaaaaaaaaaaaaaaaaaaaaaggagaccacagcactactgcagagtcagtctgcagggttatg

SEQ ID NO: 5471 - DNA, 6000 bp, Homo sapiens
tacaggcatgtgccatcatgcctggctaattttatatttttagtagaaatggggtttctccacgttggtcaggctggtctcaaattcctgacctcaggtgatccgctgcccgcctcggcctcctaaagtgctgggattacaggcataagccaccgtgcctggcctgtttttatttttattttgttttgttttgtttttggttttcatgtagcaagaacatttaatgtgagatgtaccctctttacacatgtttaagtgcacagtgccttattgttactataggcacaatgttataccagagtagacttgaaaagctcatcttgctcattattgtagtcccagtacaaagcaggtgctcagtaaaaatgtattgaatgaatgatcgggtttggaggggaaatggtgagttcactttgggaaatgtgaactccctgaagcagatgtccaagaggtagcagaatggacaatcaaggagacatctgagagtcacaggtgattgaaatcagggaagagatgagatccccagagcaagggaaagagaaggctgaaaggcagagggtgagctgcttgattgatgaagccagaggtcaggtggagccgcactcctccttggctttctagaggctctttgcatctggtccttgggttccatgagataccctggtatccttgtgataaaatcctctttaggcttaatctagctcagggtggctcctgttaatttgccatggcaagtctcacgtgataaaccatccccattattcacccagtcacccatgatggtcccctgggtgtccattcagtcaatcattcgtcaaacattcacatagttgccaactaatgctgggtgagataggggtccatcctagattctccttcccttcaacatccacaccccctgccctggctcaggtttgccccttcctcctcgctgatctccccgcctccacagtcagccccaatatcctgcctgcccagggagagcaatgtttctaaagcgcgactctggtcatgttccttacatgcttaaaagccctctgtgccaaaactgactggaagaaatatctcaaaatatagagtaaaaatgcagagatgaaaatcatgagggaagagatacaaacacatctagaaaaaaaaaacaaaacaaacaaacaaaacatccctccataccctaaggacagaggccagcgtccttatcctggccctctgcaccctctgcaggctcgcacctgccactcctgcttggcttctgtagtgcagaacaacgtcgcaggtgcggctccgtggttaccctccctgtggctctgcacacatcgcccctctccttgggacacccttctcctggatacctactcttcaaggcttaacccgagggccacctcctccaggaagccctctgactcctctgggctctggtatcaccctgtgctgtcctctgtcactgtccttatcacactgtgctgcccttatatgtgcctggctcctcttctggccagtgagttccttgagggcagggaccatgtatgccaaggccagggactggggaggccccagcatgtttgctgagagtctgaggaactttctcagcgcagctaacagtgtagaccactgcagagcaggtgggtggctggccttggtgaccagtgtcaggggagatgtggtgggaaccggagggatggggtgggcatgggcccaaggagctggggatgctgagcaattccttttctagcccaagggagctgcgcttctgtcctccctctcatcctgctcggagcaattctgtcatcagtttctcatccaggcccttgctgaacataccctcctgggaatgtgaccccaaatctccccacaggaatcccaaacttcccatggctcccaaccttcctaggtatcccaaacttcatcaaagtttcctggaaactttttctcatgactcctaaaattccaccgttcatctcccaaatttcacctcaaaaccacttttcctgcccagcacccaggaggagagtggtgcactccttacctaggccttgtcctgggtggggaagctgctgctgatctccaccatggccaccaggagaggggaggacaagtttctttttgatattgttagtccccaccccttgaacctcccccacacagctgctcagaaacgtgacacgcccccatctatttctggatgtctcctcagggctcaggaacaccagcctctgcccagtctgacctgcccagtgttcttctaagggaggaaaccatacctcatattgtcttatgtccgatttctgcctccaaagtaaacactaaaaggcagaaatgaaatccacaagcagacagccagacagcccagcgccacaccctgggcctggcagttaaagattgacccctgacctaatcggttatttgtataaaaaagcactgtgaagatccctgtcctgttctgttcccttctaattaccggtgtatgcatcccccagtcacgtacccgctgcttgctcaatcgatcacgacgctctcacgcggacccccttagagttgtgagcccttaaaagggataggaattgctcactcagggagctcagctcttgagacaggagtcttgccgatgctcccagctgaataaaccccttccttctttaactcagcatctgaggggttttgtctgaggctcttcctgctacatttcccacaaaaaagggaatccctgaagccagagaggaggtggactgaagcactggggatccaggctgggacaactgcctcctcactggctgtggtcctgtactctggtcagccaaggaggaggaagagaggaggaagcttcagcaccccgacctcagagagcgtctccttagattttgtacctttcacacaaacactgagacttagctaaggtgccaggagagattcgaactaaggaggctgtattctgagtcccagttccagctctgacttaccagtgatcttgcaggacttcttaatgctatacttaggatccctgcccaatgactagtttttttttttagatggagtctcgctctgtcaccaggctggagtgcagtggcgcaatcttggctcactgtaacctctgcctctcgggttcaagcgattctcctgcctcagcctcctgaatagctgggactacaggcgcctgccaccacgcccagctaatttttgtatttttagtagagatggggtttcaccatgttggccaggatggtctcgatctcttgacctcgtgatccgcctgcctcggcctcccaaagtgctgggattacaggtgtgagccaccgcacccggcccccaatgactagatttgaatccatctcttggggccttattttgggttccaggtcctgggatgggagaagcaatcccccaaagccagagggtggagagggacaaagcagtgattccaatacatctggtctcgggtcatcccagcaggccaagctgtcctcaggtggtatcttttcaagcaactgcaaacactcaacttcctccagagagtgggcaggcaggatatataggcaaatgctgtttttcaccatgatgggaaacggtaggatgattccttattttagaatctgggagggctttgggatggctagactcatagaagggggcaaaagaacttgtcctggagctgtttttctttctttctttcttttttctttttttttttttttgagatggagtttcgcccttttgcccaggctggagtgcagtggctccatctcagctcactgcaatctccaccttccggtttcaggcgattctcctgcctcagccacccaagtagctgggattacaggcccctgccaccacgcccggctaatctttgttggccaggctggtcccgaactcctgacctcgtgatcctcccacttcagcctcccaaagtgctgggattacaggcgggagccactgcgccctgccctggagctgtttttctaacaagcactcagaagcacctccctccccaccctcctccaagcctggacccaccgtatgtcttcccgtttggtctacagaaaggattctgggagatagcaggattctaggtggaggaaactttttatttggctgacactctgaggggatggggggacagggatggggaaaattaatgagccagaccaggatggattcctttgggtagctctaatctttcgtgcccacctcagccccagcaggcagcatttctcaaatcctagctttcggcgaccctccggccgctgggggaaggaggggtgacaaccccacctcctcctggctctggctgctaggaagctcttccctgagttaccaattcctccgctggccccttctcccatgacctctgacggggcatccaaaactcagagccaggttatttatagataagcccagaggaggtgggggaaaggccagtgtttacaaacatgggtcacctgagtctgagcggccacgagagcggtctgggggaggggcgagaccggaccctgtggatctgcgaccaagggctctgtctctggcccaaccccactgaaggcgaatggggagagggcccagagcaggcagggagtgggcgctgctcagatgctggagcacgtggcccagggtgtgggccaaatgcaaactgtatgcaaatcgcagtgctccgggggcgacctctcggccggcgggacccccgcggggcccctggcctggtgggccggggaccaggggccgaccgggtcagggcccgcctgagggagaggccgagtctcacaagtttcctccccatcactcacagccaaagagggtcccgcagaaagaccccgcaggccttgagaaagggaattgctcctcagtccctgccctggcgcgcccgctcccggccccgcgtgcggcgctgggaaaggggtgtcgggttaccagcgcgggggctacagttagcctcgagaacctttgctttcagccggactccggactcctccggggacagcgcagcgcccgccagagccctcggcgctccctcccgctggcggcttccgcagccttcaagtgggtcctccgcccccggccctcccctctcaggcggagccaaactgcggccccgcctttacagtctcggaaaggtccccagactggaggctctgaggaaggggtgtggggagtcgggggcggagacttggggcggggggcgggcaataaactcccaggccccgcccacgccccgccggggccctaatcctggacccgggatcccgtgcgcctggagacagggtccagatctgcctccagcccctcgaaaccaggactccagcacctctggtcccgccctcacccggacccctggccctcacgtctcctccagggatggcgctggcggctttgatgatcgccctcggcagcctcggcctccacacctggcaggtaactccaggaaccatctcctagccccaagggggacattaagggacagaccctgaggaagtggacccggggctgactcctcacatccctctcccagggactcttccctaggattccactcttaactctcttcctctcaggaacctccatctctgcagggagccccaagttcccattctgtctcctagaacccccatctccatccctctctggatgcctccaacgttctcctccccacctctcatctcccagcgcaggcacagcccggcaaagcctccttgggttacctgtgtgctgcagtcctggcagcccgtcccaaccaaggcttggcctccccaccacccctaccccaaatgtgggtacagagcaggggaggactcaggcgtctcagagctcacagtgatttggtgtggtggctgagcacctacctgcaagggcttcctgctggatgagagggaaagagagcccgaggagaatggggctgggggttaggcagctggacactggctgtgtgtaatatttgcacatcacctgcctgccagatcttacagccggaaaagtgcttgatagtcatctagtcccacctcccaccgactgcaagaa

SEQ ID NO: 5472 - DNA, 6000 bp, Homo sapiens; identical to SEQ ID NO: 3601

SEQ ID NO: 5473 - DNA, 6000 bp, Homo sapiens
gaaaacaggcaagaaagtagtaaaacggccttgtttactatttcctctcccctttcatcctaacttagaaaaattaccaacacactttctaagtcactaagcaaaataaattcttctttttttgagatggggtctcactgtcacccaggctggagtatagtggtgtgatcactgctcactgcagacttgaactccccaggctcagggcttctcccccatcagcctcctgagtagctgggactacaggtgtgcaccaccaagcttgggtgatttttgtattttctgaagagccagggtctctctatgttgcccaggcttgtctcaaactcccaggctcaagcaatccacccatcttggcttcccaaagtgctgggattataagtgtgagctaccacacctggccagcaaataaactcttgtttttacttctagatgtctttaagatgtatacttatttccatcttactaaaaataaaagtagagtactttatgtacacaaaagaatacaagaggttgaaaggttaaagaatcatgactactcttcaataattatgacacaattattggctgggcaaacatgagaatcaaaataaaggtttgaaaggttaaagatactcagcaagcttgatattttagacaattaatttcatcaagatttcacatattttaaaaataggcattttttcttaaaaccagaaaagatatttaatacttaagaaataatattagaaaatttaagatcttgcaaatgccagtatcttccacgattttcaaaatcataagacaacgaaagggcttttgttgttatttcaattcatgcagtagtaagacaattacattagtactattaatattttaaaggaacaacattcaatccccatactctccccaatagaaacctctgactaagctatacattttgggtaaatgaggtcaaattaatacactagaatatgaaagcctttcttcaatgttagagaaagtaaaagggaaaagaaatgaaagtcaagaaagataacagtgatttatgccagtcctttccagacctctatataaaggaataattttgcttaaaattacaaaaaagtatttctgggaaaatgcaatgtaaaaaacaagttcatattctttccttggttcatagtaatagccttaactacttaattaatgctggatctcaaatttaattgcagttattttgataacaactctactttttcttccccaagcattataaaacatagtgactactcttcattatgacacaattattagctggacaaacatgagaatcaaaataaagctaggaactgtgaatagttctatagattaagtcacatgaaataattttacatagcaataaaaaatacatttttcttaaatatacagctaattatattggttggtaaaatatcataaccaagattgtgttaaatatgtagtccaagctcaatgtatattatcccatgctacacattaacataataaaggaaataagcccactagtgtttactttttgacatcaatgttaaaaaatggctgttaccattaagcttctttcagggtactcttcctagactattatttacctcaaatccctatctgacattcccttcactatcaaaatttaacagcacagaggtcaaatctgcagttacccttcctttaagcatttttctggaggatgaagttgtggttaattcttccaggttagatatatggttctatgatggagtatataccttttacagggaatggggttgggtgggcggggcgggggagggggggcggagggcagggggcatttctgccagaattctttagttgctataatctttctttggaaacccctggaagagaaatggagtacctcttcaatcgatggaatatctatctttccttttccaaaatataagtgttatttacatacagtgtcctcaaataacaatataaatatcccagaagggcaaggttgagaacatgggttagataatctgggaatttaaacaattttaatgtagctaacttgggaaatgtatatcaatatctcataatacaattaggttgtcagaacaaaaacattatatattaggtcatttgaaaaatgcagatattgaaaattttcaaattcatgaaatgctttggaataagtaatggaattatcagtgtatcatcaaatgactaacaattagcatgtatgatgcctttcaaatatattttgcatccatgtttaaaattacaatgacgtcacggtggcagtagtaaaatgtcaccgtactacacggaagctataatatttacttgttacacagtaaccacataatatattcaggcaataatcacaatattacagtatagttttaccgttctaacaccataacatcctattatcattaccttttgtcacaatatagtcatattaggcttgtcgcaacttgagtcaaataacattttcaagtaataacatagtctaaactgcttatacagaaaatcagatacaaaaatgtcattaagaggttaaaactaaaatacttctggacatatttatttttcaagatgtagtcaattctattataacctcttcaacttttgtgcactttgagaattcactgcatacatgcaaaatatatttcaaagtattcaacaaccaatactgtttctaccatcttaatgaacagtaatttttagcataagcttgttacacttaaataccctactcgagtctcccattccaagcaaatacggaaactttaaaaattactgttcaagtttgtatctctgaagaaacacgtatagaaggtgctttgggttctctttttggtgggtactttaagagacgatagttaaatcattaatccgaggttcaataaatggtcaaaacccctggaaagaatacgtaaaaatttcagacagcggtagcctagtgcaaagagcactaaatttgaagcctaacaatcagtacacatggtcactggttttgtgagactgttcatatcacttaatttgtttttagagctcaaacatgaaactccattctacatgtttcataatttcttgtctcagtttttttctacacattatttttcttgtattcaacaacttactgagaatctactaagtgccaggaggtacactaggaacattttgttattctaatgaggaactgaagacattataatagaaacataacctttttgtttggaaagttttagtatcaagtaaatgaagttacatatcccattgaattaaaaaatatataaggcctagaaatagctaccaaacttaaagttcaaatgtaagaggatatcaactgaggctcacaagggaaaaacggtggactatatatttgctaactagatattttgaatcacttctatttacagtaccatgcaactcaggaggaaaatatatttgaaacaattaagtgaaaaatacttaaacttatctagaaataaccggaaaatgaaatgagagaatcaagaagccatactctttctcataggttgctggtcttcttactttctctgcactaaacctatgaaaagcctactttgaggggaaaataaccgaaagaaatgtcaaacgaagtacaagaacaagcaatgagttatattttatgaaagtgtacaagatttaacagacacatatcacacactatgaaaaaagttatgtaaacacagacggggttttaatgaaacagcattcagaaattaatctagaagctttattaacacagcaaatctgtcctaccaacttaatctggtcattcctttgaatataacagttatgaaacaagcatattcttcagcaggcttctcataaaaaattccagagattttaaaggaaagcctaagaactagacttttctcgttaaaatgtgagttaaatttaaagatgtcgtatggaatgtagcagcaatcaatactgggaagcaaaatgtatatagaaaaaataaaaaatatatacacagatttaacgcagacactatctaaatatcaacgacaggctcaaaatactttataaggattatgtgtcaacataagcctttaacattcgctctcttaaagccaaaatgttttaagatttagaaccagagaacaggcagtctgacggtcaaagaggggaaatcatttttttccagcatcttctaatgaagtctgtctctcacaattataaaaacttttgcaggctggtctaaaccgtgagctgcctggagaaagcagaagggaggtatcctgaatgaaagccaaaccatctccataaattaatgtcttcccttgactagaaagcatttcagggtaaaaagcatgtacgaattcctccgtaatatgaaaaggggttggagggcagggaatgaaatagagagcgagggcactaaaacatgtttagttaacagcgctcagaagtctccacacaacccgtattcccctccatctcaatcagaccaggctattctctcctcctccgaaggtttaggggtcagaaagagatgtggggtcaaagtggcttccccgacaggtcccctccctaagtttcccctcggctgagcccagatctccgctctgaaccgacctaagagctggtctagggctgggagcccggttgataccagcagctgtccattccgcaccgacggtcgcgtgcccgcaatggacaccagtcgagggccgctgtcgttggtcacgctggctctaggacccctcctctggaaactggtgacgttgctcttgctggctgtcgccactgcagacccagtactcgcggcaacactaccgcaggttgccactgccgccatcttagagcctccagtgttaacccaataggaactctgggaacgcaaacacccgtcctatcagaaccagtgccaaactcccgcctcctcgccccaaccgcggctctcgtaaccaataggactgagacgtcagtcccgagccaaccaatcggaaggcgtattgctgaaaagtgcgccctacgaaaggacggtcgacttcggcggggcccaggtgagaaaggcccacctgtgtcctggttgagggtctccagggttctttggggcccgaggtaggtaatatcacgtaacgttcttctccttttgagtgccttcattcacattgagttaaagaaaaggttggtgaaacaataaacccttagggcttatcaagcaattgctagcacctttctccgctgtgtgtgaggatagacttttttcctgctcatttatcttctgatttctgatagaaaattcactccgccttccccacgatgtctttttcttaattttgtgttatatggaaaggatgggatctcttaccttaatgagttggttgctgagcgtctgggcttagttcgttagtgcctagtggtaggtggtttggaattaaaccttagagcgaaaactcttgaactttgaggctatctggttttcctgtgtctgacaaactatagctctctgacaagttccgataagaagcttttgttaattttaattagtgtttctggaagtcttggatgtctttcctaagcggtgtaaatgacaagtgttactctgacaaccttgttcacacatttaattgtcgtttgctgttaaagcagctgcaaataacagaaaatacttagggtttctttcccccaaaaaactgctaggaagaattagaagtatacctactttattttatgaaccctgaatcgagagtttattactaaaataccaattttatgtgtggaaaaaacatgtattttgagttgtatttttgtatttaatttttttttcaaaactgagcagggacagtgggtaactgatgtttaaaggcaatcatgattgacaaatgtctaaattgaaaaggactcccaaatcattaccgcactactgagttattgactttgacagtgatctgtgataccttttaattagagccaaacctcattgaaattcttgccatcgaattgttttaaatctcactgacctgttgaaatttttgggctgattctgtttgataaatt

SEQ ID NO: 5474 - DNA, 6000 bp, Homo sapiens
gagaagcaggccaagcttcacggctgctgagaagtctgagaccagggagggccaaagccttgcctgaggtcacccagcatgtcagggaagggctagggtttgaacctgggcttccaggtgggggtgtaaccatggtccatggcaacaggatagatgcatgtcaggcagcagacaggcccttggaagcaagacatgtggtcatgggggataggaaaagacttacagtctatggagatctgccaggaccaagtgtgtgagatggagagatggtgcttcttcaccagagctcactgggcaccacagggctcccagcttggctggaccatggggactcagggaagaatcagacaggccctgctcttgagggagggctggggataggtgaagaaggaagagggcattatagactggggagatggtgggggctacttctcgttggatggcagttttcttcctgcatcttgaaagatctaactttcaaatttctttaccctcaaaactcggcatggagtacattctcagtaaatatttatggcatgaatgaattaatgaaagtatgatattggcaggcagatatgcctttggaagggtattcaaaatgggagggcaacaggttgggcaaaggcaaagaggtggaagaaaagccagaggttcagggtacagctgagtcaggcatggctggacgggaagtggtaggagaagcagcaggaaaaagtcacgtggggatgagccttgcatcttatactgagtttggatgttgccttggaggccatggggagcccagtgaagattatgagcagagggtgaacatggtcagagtgaacctgccctggctttggggggtcctgggctacatagtagctgcttatccttggtgcaaagagcactgggtttggagtctataggccagggttcacattcctatagtaaccagctgtgccatctcaggtaagcatctacatttctctgagcctcactttccttatttgtaaaatggggctaatgccgtgcctcctgaggctgttggatctggcctgggtgaggaaatgctttgccagcacaaggccctaccaatgagaggtgtcatttttattaggaacaaggcagggctggttcctagacagggcctgaggttgagtgggcccaggacccaggctgacagctgagtcaccttttccaggccaagtggcctctaaggtgggaagacaaaaagagttggctagaggggctgggctatgcattcctaagctggagctgggaggaaagctggggctgggactgggcttcctggtgtccgagatgggcagagggtgcagacaccgggatagtaggaccctcagccactgcattcttggggacaaaagaggagctgggaaatctgatttccttacctggctttgctcaagaagcaaggaatgtatttaaggcacagactggagtgagatggcctgggtttgaattttgactacttacaagctatgtgactgtgggcagtttactttgtgcctgagttttccttatctgtgaagtgtgactaataatagatcccaccctataacattgttgagaagatgaaatgtgaggcacacagtatgtgctcaataaatgcgaaagcctcccagccccagatgtatacactcggccagtaggggccagccctggccctcacctccatgggacagaggtcagccagggaggagatgcatctactccagggttctctgacctggcagcaaattagaatcaccgggggacattcacaaacatctgggatgggggttccagatatcagtatttaaaatgctcccaggcaattctaacatgagtcagggtgagaacccagaacaggatcacagattgtgcagttggagtgaggtagggatctgcgtgtgagtggaggagtccttggagtggggtcactcctagctataagagctcggcaaggcctttaaatgtgccaactcaaggagccttggttgccccctcaggaagggtgctggttggggaatttcaaggattgtgtgagagggtttttctgaaagggctctgcactctaccaagcactggaagaaagcagtgcacttgtttattgagtctagtgtaataacatttcacagatggggaaatagaggcctagagaggtgctgtggcctgctcagaatcccacagcaagtctatggcacagttaggactcaaaccctctgaggaatgcttggatctgaaaggttgacacagaaagactctttgagctgagggacacatagagcacacaccagggaccccagtcattgagctgtagtttgagagattcaagtaagactgaagaaataacttcttggctgggtgcagtggctcacacctgtaatcccaacactttgggaggctgaggtgggtggatcatgaggtcaagagatcgagaccatcctggccaacatggcgaaatcccatctgtactaaaaatataaaaattagctgggcatggtggtgcatgcctgtagtcccatctactcgggaggctgaggcaggagaattgcttgaacccgggaggcggaggttgcagtgagctgagatcgcgccactgcgctccagcctggtgacagagcgagactccgtctcaaaaaaataaaataaaataaaataaaataaaataaaataaaataaaataaataaaataacttctcaagaggtgagtgccatggaggtggtgcctggagttgggagcccaagagatggtggcggtgccaggccagggtcggctgttgaccatggtctgaggtggcctcccctgaagaacaagtaactctggccagtggctgtaacagatacctcccgggcacctgtatctcacccagccttgtccagagcccaggactgagccagtgacacatgctcagaatttaccaagagacttgtgcactgagctcagactcagacctagtccttccaacagcccttacatgggtcatccccttttacggaagagaaaactgaggccaaaaataggaagggaggccctgtgggggccagaacctttacacatcttagcccaggtaattttttctacagtgttaataagtaggatgaattgcccctgtttggaagattcagtaaaatacattgacttggcccagatcacttactctacacctctcctaagtccccagatgtgactcccaggaaagacacaaaaaagggctacccagagggataaggtagtaaccagggaagccctcccagaggaggtgggccttcaaatggcccctaaatgacaggcaggagggaaggatctgggagggtattgggggtggggtggcatgggcaaaggcctggaggtgagagtcagtcagtcattgatgtgagaagagcaagaagtagaaatgtaaggaatggtggggaggggagtcagagctggatgaccaagcaagggttcagctgtagagggtctggcccgccaggctcagggctcgggctttattgtgctggtggtagggagccactgagggtgagtgggggagagcatgccagagcatgcctcagaaagaaaggtgggagaaacgctggcatggagggctgccccctgagttggtggggtggccgggctctgccaaggctatgtgccagctgcctggactgtgtccaggaatgggcacaatgactcaacattgagaaaatcactccccagggagaaagggccctgatgaatcacccagctgaggtggggaggctgggaggctgggaggctgggaggctgggagctcactgagtcaccgtccaagagttggtgaggaggggagctgcagagagaggggccggcagtgcagttgacggggggattcaggtcagaccacattgagggctgtcgggggactctaccttcccgccattcccgggtttggtcctcctggccgtcctgtgagggagatgagaaaactgaggcccaggaagtggggggaggggatccgagcaaggtcatgcggcaagtcgctggcaaaggcctagcgagacccaagcgcaccctccagtccagacacgtcctgccgccccaaccgctttcatgccaagcagaggcctaagaaccgggtcggtccgggcagggagctgaccccggtgacccgctgaatccccggacgcggcccctccgggcagccggcaactgaggccggattgcgccgccgcgatgggacggcagggggcgcaggagcgtcgcggctgccgcaggctcctgaacccagaagccgctctgcggagaaacgcgctcccggagcgcgggtcccaccgcggaactgcggaccgtgtggccctggggcctgcaccctctccggctccggggacggcgacagagacctgcccacccaggcctgggggccccagtcagtggcggccgccgtgtgtgcgctcggtgtctgtgcgcacgtgtctccctcgcagatgggcgactgctccagggcctgtccgtctcacagcgacctccaacattctcccgacttccccctgcctcctaggctgagggagaggagcaagcccgaggctcctgcggtgtccgcggcccctgccccccttccccttccctccccaccccaccccactgcgccggtctctgcctggggctctggccgggccccggaccccagagtggtggcggggaaacagggtgcgatcagacagggtggaggctctgagagcggcccctgcgagatgcgagagaagtggcgacggggcgaggggcagcgagcgcaggctgacagcaggccagctggaagggccgagggaacccagggcgagacagaagcggggtgacagcggccgggtgtccggtggggtcggaggatccgacgggccgagaggtgcggtccgcggtggcggggacataggcggggccggggcgggccgggggcgggcggggggcgggccggggcggggccggggcggacactcgggcggaccaggcgaagctgtcgcggacgcgctgaccgagcgcagcggccgggccggcgggcgggcgggcggctgcgagcatggtcctggtgctgcaccacatcctcatcgctgttgtccaattcctcaggcggggccagcaggtcttcctcaagccggacgagccgccgccgccgccgcagccatgcgccgacagcctgcaggtaggggggcccccgcgctgggcaccaggagaacggggtgtccggcgagcgccgggccgggtctgcccgcccccgaacccttctcagggaggagacccctcctctagttctgaattctactcctgtgctgggacggcagcgcagaccaagagcccttgaagccccagctctcagtccacacgtcaccccagactctgaactcctttcggatccggggctccaccccaagcactgagcttccagtccacggtgggaccgcagtgcacactgagagctgtgcccaagcctcgaattccctttccttagattagtggggaccctgcccacgcctcggaaccttcaccatatatgtggggctcccggcacacctggagcacctgaacccccagctgtcatccaggactccacctcagagccggcctcacccaaagccccaaacctccattccaagcctcaactggacacccgctcagattcccacccaaacatctggacttcagtcctcagcctggaacctaccccagagtccaaatctctccttccatcagggcttcactggctttctctgtgggacccactccccgatcccttccctccctcctgtgttggagatctccgagtctttcctcgtggggggcccctcctcttgttcctctccaggtacagtggtcccactttattctctgggcttctcctctggtttctcttcaagtatttctgggctctctaatttggtctgttgccccatgtgcccacctctcttggtctatcttggtctctctcctgtttctctaggtctccatcttcgttttggggtctctttctgcagccaccccttcctcttgtatctacctctgctttg

SEQ ID NO: 5475 - DNA, 6000 bp, Homo sapiens
aaggagctaacccagccatgtgggtgcacggtagacattcctaaatgactgaatcagatgatggtctacacttgtttttgtgtagaaatgagaatgagtcactgtctggaacttgtcccccgacttgggaatgttaagcctttggaccacttttccctggctccctggtgggcctttcatccttgcaagggcctcagggacatgatggagtttccttttctctttaatgtccctttcggttactcaaacctctaggattcttttacccactctaccagtttatgctgcatactgggatggagctttcctaggttcctcttttctcttcctgaaaaaacacacaggctctttttacattgaattttaatactaatccctcctggtaattagacatgaaataacaaaaatggtaaactatatcaaattacaatggttaagaaatcttactgaattctatcaggcatgtttcctggtctataatttttgacttcttgagggaaatgctaactaggagtcccaaacatttattctttaaggtaaatttctccagaagtcttattctaaggctagcatatccaatcagagaaagaaaattaatatgatctaggttaattaggtgctatcctaggctaaataatagccacctaaagataacatatcctaatctcaggaacttgtaaagttactttataaggaaaaagggactttgcagaagtgattaaatttaagtatcctgcatagggatattatcctggattatctgggtgagccctgaatacaatcaaaagtgtcctggtaagagagaggcagagggtgatttgacacacacacagattgaagaggaggaggcaatgtgaccaccgaggcagagattagagtgatacagccacaaatcaaagaatgtcagcagccactggaatctggaagagacaaggaacagattctctttagcacatcagaaaagatggtgcattagttgcagtggctcatgcatgtaatcccaggactttgggaggctgagtctggtggatcacttgaacccaggagtttgataccagcctgggcaaaatggcaaaatctcgtctctacaaaaacaaaaaacaaaaccaaacaaacaaaaagcaaactaactaaaaatgaaccaggcgtggtggtgtgcacctgtagtcccagctacactggaggctaaggagagaagatcacctgagcttgggtggtcaaggctgcagtgagccatgattgcaccactccactccagcttgggtgacacagcgagatcctgtctcaaaagaagaaaagaaaatattgtgatctggtgaacaccttgattttgaaccaataatactgatttcagacttctgacattcagaactgtgagacgataaatttctgttgttttagcccatgacatctgtagtgatttgttagcacagccataggaaactaacagaagggcccacttgtcttaaattcctatcgtttaacctgtggggttggtaacatccattttaaggggttcttgccccgtttctttaccttttctggtcattaattgtcaagctgagcagaaactatttttatattactggagagttatgcttgagaaattgggatttgagaaaggcacggaaagaaagatgatatacttaaccactattccttcatctaataaacgttgtgtaaattcctactatgtgtcaagctatgtgctaagtcctagaataaaaatggagtaagacaggatttttgtccttaagaagttcagttgagtaggagaattagacacacacatacgtataattaaattaatttgtggaaaatgcagtaatgattatgtagaaagagtattgtatttccccagtgcatttcatattttgaaaaacactgtctacaaaaaagtttctgtgtttaagtaatatataataggttaagaacagttctaactgccaataggttttataattaacataggaagatcagtgttatactactagcttaccattatttcagccaaaaatcaaaggtatctgtcatttgagtttttattgtaaagtctgttcctggagaaagtgtgaattttcttataatatttaaaatactgatgtagctacagaactctctccccattactttcaagaatggcctttcctagtttgggaaatacagcaactatgtcattaaacaatctggttggccaggcacggtggctcacgcctgtaatcccagcagttagggaggccgaggctggtggatcacctgaggtcaggagttcaaaagcagcctggccaatgtggtgaaaccccgtctctactaaaaatacacaaattagctgggcgggttggcacatgcctgtgatcccagctactctacttgggaggctgaggtgagagaattgcttgaacccaggaggtggaggttacagtcagccgagattacgacattgcactccagcctgggcaacaagagcaaaactccatctaaaataataataataataataataataataataataataataataaaacaatctggcttagagaaaattgtattgcaaacaatctcattaatgagagttcctgcgtaacaggacactagctctgtcccttggggatggcttggagtactgtttcctggtaaagcaacataaacagatctcagtcccctcttacagagttatgaaataatagccataagtaataaccaacatttatataagcattccatcattttacaaaataattttacaaaagtaactgattataggttgttttaattggaagcaaacccagtttcattacctcaagcaaatttcttcatctcttttagcttccgtttctcatctcttttttttttttgagatagagtcttgctctgtcgcacaggctgggttgggtgcagtggtgcgatcttggctcaccgcaacctctgcctcccaggttcaagcaattcttctgcctcagcctcctgaatagctgggactacaggcgcctgccaccacgcccggctaatttttgtatttttagtagagacggggtttcaccatgttggccaggatggcctccatctcctgactccgtgatccacccgcctcggcctcccaaagtgttgggattacaggcgtgagccaccgcgcccggcagtccgtttctcatctttaaagtgagagtgctaacacgcacatggagggctactatgagaatggagtgagattttgtatatgaagtagcaaagacagagcctgggacttagtaggtacattattaagagttggagccattttttaaaccttttgtctttttgttatttttgctgttctgaaagtctctaagcttttaaaaatggtctcttattttactattcttgaattgtttcacgcttctcaactcatgacaagaacctattctgccaatgaacctcctgcccccatctattgaaattaaagcttaggagcaccagtgcatcccagaatttgacttccttccagtggagagaccccttgggtttttcgtgtgctctttccctgatcctttaggtgtcacatggtcagaaagaacatagtattatttataaacaatatgctctctaacttcagaaagatttaggacagctttctggatttggtcatgcatgaaacaggaaaaacaggctattagaaaattgtgtgaagtctaacagggacttgatatgaattcattttgatttttaaaactgaggactgcaatcattaatcagttcattaaattaattggaataagtatattgcatgtagtgagagtagtagtattttttgaaattttagttttaattatatcctatggcctgtgttgtaagattttttattttaagagtttaaaagccattcgattaagcaactagtagtaaacttttctgtctctcattagttgttaaatctagaaaagttattggtttaacaaacctttattggatatctattttgcatcagatttttttctacatgaatgacatttttttctctctcttttctaatactgatttgttgcagtgtcgaataggtacctgggtcaactccacacacttctcactcttcactggacctctggtacaagattgagaggattcctattacttacaaacagactaggtattaaaacaaaaagattcccgaatagagtgaacctaacctagagcccctaagaattacatcagctttaaccattaattccctgggttcttcttattcagtaatgtcttaaaacctttttatcagtatgggatgggcgggcaaggggataaagaaactggcggctggtgggaagccttaggtaaggctgtcaggggggctttagtttgggagtgggataatttgctgaggaagggtgggagaaacgtgaactagcacacaaaaggctgtttccggctcaaatttcgttaccaaggctctttgagatgaacttttttgggggaaaacaatcagtctaaaagagctgtgtcttcttgtgtgtgtgtgtgtgtgtgtgtgtgtgtgtgtgtgtgtacaagggggcggcgagggtccccacttttagtatgagtagcattgttcacatgtttgccagtattttggagcctggcaggcctgggtagaggctgcgggggacgcctccaagttcccacccgggacatcctgaacagcagcagccacaacaacaggctcgcccctagacaaaggggccggcgcggcggagcagactggtgcagcctgggccgcgcgctcagagcgctgggcgtctgggcagctgagtgggcagagctgacccggtgcgggtgggagtcagggcgcccggaaaacccggctctgggtagcagaccccgcccgggctggctcggcgccgggccttcgggcttccactcagtctttgaccctcggtcctcgctcagcggcccggcaggccgcacaactgtaaccgctgccccggccgccgcccgctccttctcggtccggcgggcacagagcgcagcgcggcggggccggcggcatggctgtgtcctggaggagctggctcgccaacgaaggggttaaacacctctgcctggtaggatggcgggctaggctctccttgcgttctctctgtcctgcagtgattttgattcattctctgagcgtgcacgggtgggaagctggaagtggaagttttgtcttaattcgaacattctcaacttacaaaactttatgctggagataacaatgaacactccccctcccaccccctcgcctgtcccccaaatgcatgagaatttttctgcacattgatgggagagatgtggaggaagagggaagaggtcattttccgtgaatacagcttttctttttaccctttaaacatttttgctccctttgttcttttcccagattacttctgtttgcttggggtatggtgatgtcattaatttcttaatctcattttgtacggcaggggatagctgtaaatcatttaggaaacctatttgcaacccaaatgcttagtctcaggtgaaagggctgggtaaagtcagatttgttttcctctgagtggttttcagcttgctggttaattgaaaatgctttctgcagttactgatttaggttccattgaaagcactgtgtcgaagaatttacctgtggtttctattcatcaggtaataattattttcaatttttgttttctgtctctcatgtctgattggtttagttcatctggctctccatgaatgtcctgcttttctggaaaaccttcttgctgtataaccaagggccagagtatcactacctccaccagatgttgggggtaagtaaggtgaacttggataatctggtggaatgggtttaacactggcagacattgctacaggtttggtcagttccattcattaaagaaatgtgcactcttcactttgaaaacctttgttgttctctaaagtggtcacattttcctgatttatcatttacacttgtacaagttaaaaagattgactctctcaagaaccaaaggtaatatc

SEQ ID NO: 5476 - DNA, 6000 bp, Homo sapiens
attaccttaaataatcaaataaaacataatacgaaataaatttttgccttatatcttgctacaatttcctttttcaagaggcaaatattttgaactcttttggtaattccatttggtatttgccttcatatttctaaatgacatgcttatagcactattaattttttcaattttagatactattttttcacaactatgaaaagtgagaatttagctcttttacataatccttcatacagataatttctcctcactccacgcatatcttcagagagttataatacattctccaccatattcacatttttattattatgcctttgcatgtattattcactgccaaggcaaaatggtatactatacttttgtttcttttatgattattatgttaactggagttagttgcctttttttttttttttcatctgcttggctttcttcacatctgtggctaagttttctcaccctccctacagctctcaataatgtctctttgtccaattctgcatccttttcagattatcaatcagtttcactgtttcttttgtccttggggatagctgttcctggtgccttctatcttcttgacccaatttggactggtagctctctaggcccagtgcaaaactgtgatactggaacttccttttggcatcctcttgggagttcctctctcctttgctgaattcctggtttcctgaatcccatgtctccttctttctaagtttattccttaattttggtggagcatttctccagtgctttctaagaaagggcacatgggaagtacacattgagcttttatgcatattaaaatgtatttattttactgtttcatttgattgatattttggttaggtatagaattccaagttgggtgtgttttccttcagaagttggaatgctatgctccatttccctctagctagcttatgatgttactactgagtagtagatgtgattccaattgaatgtgattgccttcacccccatttttttttaatctggggaagcttttagaatcttcctattattctcaaatgttctaaaaacttttcagtgatatatcttgacttaggtctgtttgcatttgttgtattgggcattcagtgaattcttcaaatctggaaacaaatgttcttcaattttgagaaattctgttacattattactttgatttttttccttctctctttaatctctttctggattaagatattggaattgctggatggatcctttcattttatttttttcactttgctctttttttttggtcctttggctctactttctgttccctgattattcctttttttttatggcggtctattcctgtctcatagatgcaatatcttttttaaaaatctacttgagaatattgcagaggcttgttaagaagttaaacttctgctatctgcatcatttctcttttccaggcacttagttttcagtttttttcaatttgctaaatctgtcataaagagttaaataaaatcaagttattcttaataaaagtaaggttgtcaggaacaattactccaacaaagaacctcttaagagaaccagtgctgatcagcatgtttcctaggttcattaacagaatagagaagtcattaagccagatattaatgagaagatggtgagaagcttgtctctatttccactgaaaacagagaaggatacaacagccttaggatacaaaatgagtaatattttccacagaggggaatcaaatagagaggatacataggatttggtctgctcagctgttcctttggaaaactgtttccttctccacaatgtcatctacatggttgtatcaggaactaccacaatatatgactttgtccaacactcacttacttaactagtccagggatgggaatctgatccaaaatgactcaatcacagctcttccctaggaaatgtttaaaactgaaaccgagaaaaagagaccagtatgtttctgatcattcaaactctaagataaaagaattgagagcttttaggaaacatgtttcctaccaggtgaacctgagaagcagaggagttctgcagtggaaacctgcacagacacacaagcagatgcacagagaaaagcgatcactgaagaagagagtctcagaggcataagaatcagttgtcctgagcccagtctcatctctgttctagcaatctcagtgtcctcattaaattcctcttttggcttaagctagtttgaattgtcctctgtattgcaattaaaaaaaaaaaactatagctaatatgctcactttatttgatgcttcctgtgaatcaggcaatgtgttaatgctttatatattttatctcattaaatcttcacaacttgtaaggttggtgacattatttttcacataagaaaactttagagatctaactattatataatagacaactctatctagatgttccacaggtgtctaaaacagaaccatttctccatctgtaaaagaggaaaggctagattcactgctggaaatgctcttccctctacacacaccaagccaactccttcttaccttcatgtgtcagcttaagtgtcttcagataagactatcccaccttctcaatctaaagtaggttccgtggtggtaccctgttattttcctaaccaacaattgtaatgacatatttagtattttgttttgttctgttctgtcacatgctatatactatgaactccatgacagtagggaccataccaacattatttgcccttctagccccagcatctagcatacttcctgatatatggaaggtgctccgtaaaatgtgcttgaatacattaaagacttctaaatgtttcctttcatatacctatgaggctatattcagtaactttcaacaactgttcattgagtgactggtatttgtaagtcactgtgctaggcctgtttggacaaagacaaatacagttaattcctcaacaggcctagcacagtgccttgcacataatagtatacagcatagtataaagcccagaaagaggaataattataagtggagaagtgttgtaacagagatacgaacaaagtgctgcagttgcaaagaaggaagtagttaagatgtgatgcaagaagttaaagtcaggaaaagaaatgaatttccagggttcaaattgtcacattctgtataatgtctctattttgatacagctgtactttatatctgcttctaatttataagacctggagtagaagtcctagtaaatatgttctcaagtagagatgcatgaaaaacatatttctcttgaatcttatgatcattgttatcacttgctttatctccacatcactgtaaagacattgggcctcctacctcagcccaaccctcttcaaaagatttcaggcctatactacaagtcaaacttttcttccttccatattgccagatctgctttccctgaagctgagattaggggacaatgacttttgatcccttttaactctcaaaggataatgttcttttaagatgctgtcccacatgttctcattataatgagtggtttatggaaaattaccttggtcctataatttctgtctgatgcctatcttctctcctgctgatctttaaccaggtgatccaccccaacacaggttagggaacattgctctagctatgttccagaatagatttcttcttcttcttcttttttaaaaaaaatctcctttacccctttatttgtcaggaacacttcaaataaaaccttcttttgggatttgcatgtgtatgtatgtgaacaaattgggttcacttaaaggaaaagaaagggggttggcaaactgtcattatcactagttatctagtgaaagcctacagaggatgcaacaggaggaaagatgtagatagtatgtaactgcgtacctttttaatctcagaattttaaatatttaacaccattgccatatagttacatcagtgactgttaatcagacccactcccccccaaaaaaaccctttcctaaagcaaccccactgaatgaaacggacacaaataaaaaggattgtctggtgtactgacttccaagaactatgaagtgaaaaaaaaaagaaagcgattttaaaattaaaataaatattttccttttaaaccaaaagcttgcttcatccattgattcatcgaatattcattggtacccatctgggaggccagctttgcatatttttcgagagctccagctctgaaggcagaaggattctacttctgccatgtacaagcttcctgtccccagacacgttacttacctccgtgccttaatcccttcatctttagcgttaatgtaaatattagaattatctcacaaattgtagtcagaattaaagataatgtatgtatggtgcttaggagtacttgaaactacatcagtacacttagtctttaccttaattttctttcagcaccacggtcaacgtcaaatatctggaaggacattgaaatatcctgaaagtgaaattgtatatgacttaattaaattctatttaagtgtctcctgtaactctaactatagaaacagggagacgaataaccagagtagtcagaacctcagcatgggtaggggacaaatcccgtccttcttcgcattctccaaggtgacttacagaacgctaacgccttgcatacggacaggcgccccaaatttaagttcgccgtcatctttaaaacccccagggagctatgggcccgggtctcggctagctctaaggtcccaccctcgctgatctcaggttacccaaccctcctctcgggttacccaacccggcctcgcagcagtcctcgggtcttcggcccctcccgcccctcgccggcggtgcccgccgagccgggctgtcccactgcgcatgctcctcgccgcgcggttggggagcgccggggcagggaggcgggcaccaggcgcgggtccctccgggcaggggaggtaggcctgggcctgacgccggccacgcagcggcgggagagtgagcactcgggcggcggcgtcctggagacccgcgagagatggaagcggcggcgacgccggcggctgccggggcggcgaggcgcgaggagctaggtcggtgttgtgcgtgggcagggagccggggctgacgtgggcgggggtctgtgcgggagtcgggtgcgcccacacctccaggggccccgcgcttggcctgagttgaggcccgattgctaactgaccccgtggtcagcatccgcaaaggaaccggttatctgaccccgagaacttggtcagacgaagcccaggcctgaatagggcgttaaaatatgtgtgtgtgtgtttgcgcgcgcgcgtgtgggtgagtgtgtgtgttgagtggggcggggccctgtgggtacacgtcaaagacgcaagagcctgcgccgtgactcacggtttttttcccaatgatgctttaaggaagttatcattgttctgcttttcaaatgctgcagccccattcggaatctccagatgaatcctcattttactccttgttatcccagagtttcgaacaggtcgtgctgaccagaatgaacaggagatacctgtagcttgctcacttggcaaagtttgtttgttttttgctgctttcctcccatcttgtttcttggcgacagggcgtgtttgtttacggtttcccgctgtccaaaataaaaaagtaaggatcagggtggtaaaatgatcgctctcccagttatacgtactgtacttgggagtatttttcattcgatgctgattaaatgtaattaaaaaattaaatctaaatggaatcttcaagaaaaccgttgaactttaaaaaataccgtattataagtaactgataggttgttgttattcctctaatagcctgcagggcactttgcaatggaattgttttcaggccgtaataatggtagaaacaataaacttaacattttattgcgtgcttactgtgtgcaaacactgtgctaagtgctttacctatgcattgtctttaatcctcacagcaactgagata

SEQ ID NO: 5477 - DNA, 6000 bp, Homo sapiens
tattttatgttgaaagtgaaatacgacataaacatatgtgtaattttgtttttgtaaatctaggaaaaagggttcttttagtgatttggtgcaaatgaatgttaagaaaaatattttaaaatcacaatatgaaaagttttttctattatattctattttaagagttttctattaaaattcattgactaataaagccaaaaatcaaaggaaatacagttaaagtctgatttattaaaatagttttgagaaatatcaacacacttgaaaaattctgaggacttgctgtaggctaagtacttgctataggcatgaagattgagctaagattgaataagagagaattcttgtttgaagaatatattgcagagctagccatgtaaataagcaaatatgataacagaacataaacctttatgtaacaaataataacaaactccagttccattagtagggccacaccatctctgtagtcccatcataccttacacttaagccataggatacttgagttatccaaatgcactatagctgaattcctccagatttttgcactgcttgcttcctttgcccagattatcttttctacttactttacttaggtaacttatattcaccttttaatatcaagcctagaaatcactttctctgagtcctccagagcattactccttacctgctactcctactgtagtctgggctcctgagatcccagagtacactgaggattattacctctgtatcacagctcctgttacaacgggctgtaatagtcttcttactgtcttgctttcattagactaaggaaccacatcttcaccattatatctttgtcatctagcacagtgtccagcacaccgggcacataataaatactgaatgaatgaatgcattcattaatggagatagattaaatgctggtagaggggggatggtacgtaggagaagtaaaagaagttagggaatataatacagagttgaaagagagaggtcgggggaaagaggagagagatcagaagacagccatctggacagatgctggggagagaaagaaggaagactgtaagagagagaaatggaactagaagaatgagaaactgagaacaagctgaaacaattacacagtgggggcaccctagaagaaaatgattttcttctgttttaatagtcctaacacattgttctcaacagttcttaatcacatatttattcttttgtgctatttaatagtctatgtgcagacattctatctcccagataaagctgcagctctgagaaaactctgaaggacctgttatagttttaaaaaatgttctaaatagcatttagtacaaatctcggcatatagtgggcactaaatagctacttgttgaaaagaactaaaagaatgagtcaaaatgaggctcagattctgagatgagtattagctggaaggaacataggtattgttaacatacttgggcaacagagtcgctactgcacacagaaaacaatgatcctttctatgctagagaaaagcttgtccatttttgtttttaaatataaggtcgtaaatgttaattatttaattctttgaaaaaccttataaggttttgcatgtatcttcagggatgactctagttttataaatttggaatctcaatgatactggttaatttactgcctatttctgagtttctttgatatttaaaatgtgtcagaccactttatcctgagaaattagaaaaaaagaaatacccaggggcttgcattgtcctaaaatgacttgggagcagggtggtaacagccaggatcccatgtcatggtaaaccaggagagtggagagatccactaaggagtggagagatgatgggtcaaaacgtgagggaaggcacctaatgtagatgacgccttgatgggtgcagcaaaccaccacggcacgtgtatacctatgtaacaaacctgtacgttctgcacatgtatcccagaacttaaagtataataataattaaaaaaaaaaaagacgtgagggaaggcaaagtcaggtaaaataaggatggggtaaagtgctgggaaaagtcaaaggtatactgtgacttcagtttttttcatgacagataatggtcataaattcttgaacctaaagaactaagtaattttattggttgtttaagtttggcaagggaataattaaataatctgacctctaagaaatgtggcctagtaataatctttgacaaagactgtaaacagagaagggagttactataaacatagctagctcattctttttgtgcatatttttagttaagtaaacttctgatggtctttggtcacgtccttacactttattttagaattctctcaggtgctaggttggccttcagagggatgcactccgactatgggttattgaaagagttgggcttgtagccttataaaaacctgaatgacagctaaaaggcggctagagaatcttgaagacgattttgtgaagagggctttggattttatttttcagaaaacagtcatttgacacaatccctttatttttacttgtcaacactgagactttggtttagtttggtagtataaataatataaaaggttgctcttggctcttgctcttattatattattggcaacctgaaaggtgagtcttaaggatgcctatgtatttttggcatacagaaatcagagctttttaagactagaaaggatttcaaaggttatctaaattaattgcttcatttcacatttgagaagaacaaggccagtaaaagttataggattgcttaatggcagagtatgaatggctaggcccagacaaaaactcacaaaactggatttctactccctaccgtttccatgatcacgtgccaatcctactttagatgataacttcagattaaatgcccacacacatacacgcacatgcacacacacacacctgttaatctgaatttgttctaattttcaaatcaatttattatttcctatggaatttataacgggaatttcaataatgctggtgctagttttgtcacgcccttctgtacaaactcaaaatgtatccattttttactttaatcttcaactggtggtaatgagttctatgcacatcatataaaaaatacatttgctgagttttgctgaaatgagcattttttttcttgtcatggggataaaatgaccttttgaatttttatcttttaggacaagcatttgggtaatacattagaaaaggaaaagcaaaggaaagggaattctggaactttttcattttggttaaattcttgtgctaatttcttagtgccttttgctatgcatgtgaactatgaccatatacgaaaatggtctgttttaggtcatgactgtgggcagagattaattggtgaaaaatgggcctgtttgtgggatttaccacacagtaaggtttctcatctgcctggaaaaatgtggaattagctctttgagaaatgcagtccggtcatgaggttgaagcgagagcttagggagggaaacacagttcactctctaaggcagttatgattggttagattccagagcagtccctttggtgtagtaaagttcttttcttctcgctttcaggtctgtgtttcctaatgttgctagtttcaccagtacttcacagatagcatcttattcggcttccttcaaggcctgctgatccaaactggggagtggtcttggagaggattcctagttctctccgctcccccatctagaaagtgctgttacagtgaaaaagccttcaatttgcaaagaccaattgcgacagcaaatctgtgctgtgtggaaggggatacaagttgtgaaccggcggatatgtatgacaagggtacaaaatggaaggcgagacgttagttcttcgcctgtgaagatggttcttgagcaacactcaagaacgtgcacgtggagtgctactagagtgcactccacgtgcacgttcctccctaagagccactgcaaggatcctgggcctgctgcgtggcccaagaatccacgttgcttctgaggctagatctagccacagcgattagggtttcttcgccatggccttggtggtggctggccctaaactggtcacagtctgaagacccaccctgaaagggactaaggttagagacagcgcccctcccctcccacccttagctcagcatccccactaagcacaccccttggggaccacaaacgccctctttcccgaagaccccagtagtgacctgtgggattctggctgggtgtccgtgacttaccctcaaagagaacctgcacgcctggggtcccaggatggctggcttgcccctcccgtccgaagatgacctcgtccttctctttcagtcccggtgggtcttcggactgccgccgccgcgctttcctcggcctgggcacgctgggtcggcgtggtcccggctcgcgtccctgttgggcggccgcggcgcgggtggcggcgggacaagtcgtgagcgcgcgctgggcgcgcgcccggccggggcagtcgcgggggaggagcgcccgcccgccgctcgcgcgcccaacggaccaggctggggccgtgaggtaactgttgcagccagcggaggtgggaggcgacactgagtctccagtcccgagaggtgcccgagggaaaaggaggcggcagctaaactggtcctggagagaagccccttccgcccctctcctcagccagcatgtcccggactccgccgctcctcagtccgcgcggtggggaccccgggccgtggcggccggcgcagccctgacgggttgcgaaccagggggcgccccgaacgcgggggttggggtctgggagcgcgagcggccgctacggtacgagcggggtgtgctgagtcccgtggccacccccggccccagccatgaggagggacgagcgagacgccaaagccatgcggtccctgcagccgccggatggggccggctcgccccccgagagtctgaggaacggctacgtgaagagctgcgtgagccccttgcggcaggaccctccgcgcggcttcttcttccacctctgccgcttctgcaacgtggagctgcggccgccgccggcctctccccagcagccgcggcgctgctcccccttctgccgggcgcgcctctcgctgggcgccctggctgcctttgtcctcgccctgctgctgggcgcggaacccgagagctgggctgccggggccgcctggctgcggacgctgctgagcgtgtgttcgcacagcttgagccccctcttcagcatcgcctgtgccttcttcttcctcacctgcttcctcacccggaccaagcggggacccggcccgggccggagctgcggctcctggtggctgctggcgctgcccgcctgctgttacctgggggacttcttggtgtggcagtggtggtcttggccttggggggatggcgacgcagggtccgcggccccgcacacgcccccggaggcggcagcgggcaggttgctgctggtgctgagctgcgtagggctgctgctgacgctcgcgcacccgctgcggctccggcactgcgttctggtgctgctcctggccagcttcgtctggtgggtctccttcaccagcctcgggtcgctgccctccgccctcaggccgctgctctccggcctggtggggggcgctggctgcctgctggccctggggttggatcacttctttcaaatcagggaagcgcctcttcatcctcgactgtccagtgccgccgaagaaaaagtgcctgtgatccgaccccggaggaggtccagctgcgtgtcgttaggagaaactgcagccagttactatggcagttgcaaaatattcaggagaccgtcgttgccttgtatttccagagaacaggtatgttagctggaaggcgaggtctgggacgcgagcgggttcgggtttaccgctgcagtttccgagttgaattcgcttatttcaaagcatgttaactttcagaatggaaaaagggtgtgttgcggggggggggggggaggaaata

SEQ ID NO: 5478 - DNA, 6000 bp, Homo sapiens
catagattggtggtactggggttacaaagacatccttctccccagctcatatcaacttcaagccagagataacttattcaaaaataaataaataaatacaaaaaattaaaaaaacaagagatggccgggcacagtggctcacacctgtcatctcagcactttgggaggccgaggtgggcagatcacctaagctcaagagttcgagaccagcctgaccaatatggtgaaaccctgtctctactaaaaatacaaaaattagccgggcgtggtggtatgcacctgtagtcccagctactcgggaggctgagacagaagaattgcttgaatttgagaggcggaggttgcagtgagctgagatcatgccattgcactccagcctgggagacggagtaagactctgtctcaaaaacaaacaaacaaaacaaaacaaaaaacagagacgaccattcataatctggccatcaaaaagaggccaggttaggccaggcgcattggctcatgcctgtaatcccaagactctgggaggccaaggtgggtggatcacctgaggtcaggagttcgagaccagtttggccaacatggtgaaacccatctctactaaaaatacaacaattatctgggcgtggtcgtgggcgcctgaaatctcagctactcgggaggctgaggcagaaaaatcgcttgaacccaggaggtagaggttgcagtgagccgagatcgcaccatcgcactctagcctgggcaacaagagcgaaactccatctctctctctctagcctgggcaacaagagcgaaactcccatctctctctctcacacacagacacacaaagaggccaggttaggccaggcacagtggctcacacctgtaatcccagcattttgggaggcagaggcaggcagactatctgagatcaggagttccagaccagcctggccaacatggtgaaaccccatctctactaaaaatacaaaaattaggcgtggtggcagcacctgtaatcccacctacttgggaggctaaggcaggaaaatagcctgaaactgggaagtggaggttgcagcgagctgagattgcaccactgcattccagcctgggcaacaaagtgagaatccgtcttaaaaaaaaaaaaaaaaaggccgggcgcgggggctcatgcctgtaatcccagcactttgggaggcggaggcgggcggatcacgaggtcaggagatcgagagcatcctggctaacacgatgaaaccctgtctctactaaaaatacaaaaattagccgggcgtggtggtgggcacctgtagtcccagctactagggaggctgaggcaggagaatggtgtgaacccgggaggcggagcttgcagtgagccgagattgcgccactgcactccagcctggacgacagagcaagactccatctcaaaaaaaaaaaaaaagaggccaaattaactgatggcaagaatgcatggagagtatgcagtctcaacaattaagagatttgccttaccttcaagcttgtcctgagtgactctgcaaaagcctctctttcctctttattaaagttgatccaggcttctattgcctctgttgggttctgagaacacggaactccatctgtgagagccagaggaaaggcatggtcaatgacaatccgaaagagaaattcagagtaagggactttaaagatgtgaaccactttattagactactgctgggcatgtgtatatgtgtacatgcatacatacacatatacatgaaattaacctaaaattgctttttttttttttttgaggcagggtctcaccctgtcgctcaggcagaagtgcaatggcgcaatcaccatcaccatagcctcaacctcctgggctcaagcaatcctgtttcagcctcccaagtagctgggactacaggtgtgcaccaccacgcctggctaattttcttattttctgtatagacaaggtctcactgttgtccaggctggtctcaaactcctgccatcaagggatcctccctccttggcctcccaaagtgctgggattacaggcatgagccaccatgcctggcgggtcttgcttttttttttttttttttttttttttgagatggagtcttgcactgttgcccaggctggagtgcagtggcgtgatctcggctcactgcaagctccacctcccgggttcacgccattctcctgcctcagcctcccgagtagctgggtctacaggcgcctgccaccatgcccaggtaattttttgtactttcaccatgttagccaggatggccttgatctgacctcgtgatctgcccgcctcggcctcccaaagtgctgggattacaggcgtgagccactgcgcctggcccgtaccttgctcttttttaaagatagtctcatgtgttacatgagccctcaaaaagttgggtaaagactcataaccgttcctctccatggaaatctttagtaaaaggtaaaagatttatacaatctgaagagaaaccagagtatgtgccttgcttttttaaaatcaaaatggatgactcgatattttcccatctgccatggaagcaacctactaagctacagagctcacaccatttttttttttttttttgagatggaatcttgctctgtcgcccaggctggagtgcggtggcgtgatcttggctcactgcaacctctgcctccgggttcaagtgattctcctgcctcagccttcccaagtagctgagactacaggtgcaagccaccatgcccagctaatttttgtattttttgtggagacgggatttcgccatgttggccagggtggtcttgaactcctgacctcaggtgatccacccacctcggcctcccaaagtgttgggattacaggtgtgagccaccatgcctggccaacctcacaccttaagtatggctatatctcacttgcaaggttaggattgtttcctaacgttggcccatcactaaaaaagtttttagtcttagatatcttgccccatcaccaatttacataggtaattagacccactgggacatacgaagtacaggataaattagagtataatacaaatcactcctcactactctgtgtggttaaatgttgtgctttaattttcctgacttcttcctctaacgcactgtgtctctgacagcaattacactgaatctcacctcaatctttctcagcaggttatctcagtaagaatgcaggaataataatgtaaactaacaccaggaagcttgagggttcttttctcctaaactagaacattcactgaacatcatagccaagtaactgggtatggtgtgtcccctccctaaacttacccgagatgatatctgtgagtaagcggtggggcaagtggagaaattcctctgtattctgcagctgggccaggtgggtcttggcacagtgcttggcagccgtatagagctcaggatcactgtgccgatctgccagccacatcacctgaaggcagtttcccacttgcactgtgcgggccaaaaaccgagagcattcctcaaagagagatgtcagctgatacatgtctgacacctcataaatttcctgcaactcctcagctcgaagtttcacagtcccatggtagatataatcaaccaggagctggaaaacagactcgctgacatcctgcagcacaatcacccggttgtgggcctccttcaggttggaagtgaacatggatcggaagaagcagctctgagctgagaggaccagccgatggagctgaaactcccggccttccaccgaaatggtgacatcagcaaagagctcctcctctagacacagtttcatgatgccttgagccacacggcctgaatgtgaccgatctttgaaagtgtagttcacaaagtagttctcatccatggatgctccaggctcctctggtgattccatgctagccaacttctctctctgccagctgtctgcaaagcaacaccatcttgagtaacctgaggaattcacagccatagtctgtgaatccaactgtccaactcagggagggaaaaggaagaagtgagagcaaagtgggtccagattggccttagtcctggccctatccatgatgtccctgacgctatcctttaaccaaatctgggttcgttatccccagtggcgcccctccgctaatgatataaataaaagttccaactctgggtgttttcctgagaaaacacggaataattcctttccataatgttaacaaaagacttgggatttaggtcaatatatgaaagcaaagggctgggagaggcctgtgatcgtaaaagccttactaaccaaataactggggcataaaactagtgaagctcaggggcagtagaatcagacaaaaaggacccctggccccggcctagtggccaggtcctctccttcccagcgcatggagttaagacgctccatatgaagcctagcctgggatatccgtgggtcttacatttgctctcttctgagctgcttcccccacacttccccgctcgctcgaaagactccctatggctgcgtcccagaacttgagtccatccgcccccaggccggggcactgggaggcccatcaccctgtgcaatgtccccgctccaccttgagtcgtcttggaaacggtcgccagggaaaccgttcttcccgctcaggcccgcccgccctcgtcaaaagcttggctcagagagcgggggaggggtgtgtagcgtagaacccaaaacgcccgccccctcccctcctctcacccgcctggttcttcagcgtcctcgccttctctctaggctctgccacaaggagctaggaccacgctcacctcacgatttccctacctgcctgtctcgctttctcacctgcgttccctcctttcatcccggagcccggaacctccgcttccggctccacgtccgcccggaagaagatctgctgcacacttccgtttccggtccgtgcccttggggctccgtgtcctgctgtctttccgtccgctgcctagtctgcatctgagtaacatggcggcggcggcggtagccaggctgtggtggcgcgggatcttgggggcctcggcgctgaccaggggtgagcacgggcagccagctgagaccggggtcaggcgcagcggcgtgcccagtgcagagagctcctcagggctcatcccgcgcgtctgtgccttttatctccctgtgcagggactgggcgaccctccgttctgttgctgccggtgaggcgggagagcgccggggccgacacgcgccgtgagtatgtgcgggcagcgctcttctctgaactatcggcggggccccttagatgcctgtccttgccctaggatgcccttccctacgtcctcctggcaaatcttggagatctgacttgcagtggtcttcaccctgcatgcagaatcgagccctccctgtgcccttaggcctgttatggccctgattgttccttgtccatttcaatcatcccctttttgtctgattaaactgtcagctctttgaaagcaagcaatataacctttaggcctcagagccctgtaataatagtacctagcgttaattgagtgcttaatgtgtgcctggaacctcgctaagcgttttagtgaatgatcttatttcgtcctcacaacagccttatggggtagatagcatcttactcttcttactatagatcaggaaacagtccaaagaattaaactgcccagggtcaaagacctagtgaatgacaaagtaggcctgcctgctgccagaggcagaaacacctaaccattattctgtagcttgtgatgtgtgattgctcagtggtttagggttgcatgaatgagtatgtacatattatgttacagtcaagatacacggactgggagttaggagacctggcatttctcctttcctgggttttctcattgacacacacacacacacacacacacacacacacacacacacacacacctgggcctcagttttctcattgacacacacacacacacacacttttaaggagagagagagtc

SEQ ID NO: 5479 - DNA, 6000 bp, Homo sapiens
cgtggtcctgggccgccactgcccggcccgggggccggggccgccaacgccgcgccccccgcggtgccgctgtccgccatggcggccgccggggccacgtgcgagcgtcgggcccctccctgcgccaccgcctccgggacgcccgccggctggctcgggttagctcgccggctccgctccgcgcggctccgcggcgagggcggcggcgggggcgcccgggggcagctgcagcatgcggagcccccgggcttggcctggccgcgccccgccccctccccgccgatccgcccgccctttgtcccccgcggccgccgcccgagctgcagccgccgaagcgctttctctgtctcgctcttcctccgccccccgaccacacccccttaaagggccagcccctctacaggcccctctcccctactccgcccccgggcaggggtaggggagggtctattcggcagggggtggcctagctgtccgtactccccaaacgcaaccttccagtcccaaacccaggcgttctaagcgctcaggacgacgatttgcgctcacgccaggaccctagtcttcattggacccttcctcattctgtcctcattgaggccatctgagaataggggctatctgagaatgcaggggagtggacatcgtgtgcagacagggagtctggtgaggagacgctgcggtccccgatgtccaggtcctccagccctcggccagcgaggagcgaacgggctcctccgcacggaccgacacgtggactgggctcctgggaaaggaagagtggagaaggcgggcaggagctgtccgggtccctagactctccgagtagcaggtcccacgcccccagcggaagaagccggggctgggggtgagcggtggcacccggccggcccaaacggccaaccccgggcagccaccgcccaccggcaagatggcgcgaggctcgggcttgtgggaaacggagtccgctcccggcgccgcccctcccccgccctgcggccaggccgggaagcgcaaagttgtttggggcgtcctctgcgcctcgcgacccgagtgcgcacagagggggaaactaaggcgcaaagagctgggcagtgcgggggccgcgacttataataataaaggcggtaattgcggctgaccctaggagcgtgcgtcgggaccgccgcccagtcggctccgcagagagggcgccgtgccggggctcctgcacccccgccctgcggctcctcggtccttcacatagccctggcccacctccaataagccgacggcgcatcccattccctccctctattttattttctgcatctttaaatggtctcattcattcgtgtattgtctgtctcccacttctagattgtgagtgccacggggctgaggcctgcgccgacctggtctgctggtgctaccaggcttgaacagtcttcaaatccactgctattaggcaaattacctggctcccgctgaactccagcacctagaactatgtcacactcgtagtaggccgctgcattggttgaacaaatgattttgaaagaatgaatgtcttcctctgtgcctgcatttcctcagaaggctgtaacaaagattaaataggaaaattcgtggaaagttcaattactacaccacagaggttaattaagtcgcactgctagataaaacgggagacgagactttgaacccaggctgtgtggctcaaaccccctgacacgaagtctctactcaacctcctcactaccctgtagacaccacccaataaggctgcgcagctcccgggggatgtttctgtggaaggcaggctcaccttgtgccaccccaaacagggtcttggatctgagaggcaatgtttctgctccagcccctcaaagacactctttggatgttgtggggggaagccctctgcagcgggtggggttcagagatggattgggattggccccggggtcacacagctggggctgcatccaaactccaacccaggatgttgggctcctcctttgccctatagtcagagagaagagaccaagagaagacagaggctgggcattgtgaaggcaatgggctcacagggctcagttcagggaagggtagagtgagctgacccctccccttcccgtgcccctcctccggcctcagcctcccttcagccagtctgggtgccgaggaagggctgaccctcgctcttgcggattaggtaggatccaccctctccaccgggagccctatccgtggcctggcctcctgccctaagcctggcctgataggaggatcactttaccccagtccaaattccccaccacaccccaccaggccaggccagctccctctgaacccaagcattgtttgtaccttgagggtgcacacagattaaagggggaagaccctcaaacagcccctaatgcccaacagcttctgtggaagtggggcctgcaggccatgaagacccccagccctagctctgcccccaagatgctgtgaccctgagccctgacctttctgtctgtcctccctcagggttggtgtgaaggtctccagccatgtccgtgtccacaggtcaggcattctttctgactctccctcttccccccaccgcgccatgcccaggcacacccagattcctgtccagttcccatggctatccacccgagaccacttggtgcaggtgggcatgctggcctgccaccttcttggaagctgggccacagaaccttagccttggagtagaaatactgggttcaaatcctggctctgccccatgggctgagaggctgtatgcaagtcacttacctgctcagagcctcttcagggggcttatggtcctgacctcctgtggttgggggcccatgcccagccctggccctcctgcctgagccctactgggactggagtgtaccactgctcctcctccttctagcctcagtctgtggcctccccagccctaccccttccagggccccagcccccctccattagagtgcatccttgaagcagaggctctggggagggtcctgtgggtcaagaccgctccttcaatcaagggtagagtccggaaaggctgcctgccttcaccattactgcctgctgagataccctattaccattaccaaggatggaagaaagtgtctgggaaggaaggagccctgtaatgggggctgccctggcctccagagacacagggttgggggaggagagaggcttaagcccaggaaacaggtgcccatcctgtttttttccacaaggagctgctgcccaatgcttctctaaagtacgcttgcacaaggcctagggcccacagctcagatcccctaagctcaggccttggctccaggctttgctagccctggcacaagctggaggttccactgccccagagctgacctatgccctttcctccctccctggtatacccacagcttccagctactcatgtcaatttggcatctcccacccatttgcttatgtatacaacaacctttaggttctggacaaggtgactgaggcacctagagagactaggttctgccactagcaagaggctgctagcaagagccggatttgaactccagcctgtgagggcagaggccaagctccaccttgcatggttctgttttcccaatgaggtctagaggctcctgggcctcaggaagtcggagggttgaaatcctcctaagaagctgtgtgaccttgggcaagtcccttcccctctctgggcctcaagtggagatcataatcacaccccacagggccagggctgagagcgaggagatccgccaggttagagttgatggagaacttggcggggtgtggaggaaggccagggccaggcagggctccttgtggaggtctcagagcctggggcaaaggggcctgcaggggagctcctcctttgctgacccctcctcccccagagccagctgcatctctttctgggtttctaggtgacttggctggcccctctggatgagttctactttaaacctgctgctgttactgcctctgtattgggggggctcccacaggggcccccaggcaggaaccccccccaccagctaagccctgcgggaggggctgcagcccccacccatcccattgcccatgcgccttccccgctcccatctctggaacgcagatttcagggcacctgctgtgggccaggcactgcagagcccctcctcaaccctcctgtctggggacatccacaaagcttctgacccctctgggcagacaacagcgttccccccgcggttcccagccaagaggctcacagtcaggttccagtcatgggagtctgcagcaacaagaagggggctgttctagggctcactctcgaagaccaggatgcttgggtccttaaaggaggtggcaggcgcccggcctccctgggctagggacgggggaggggtgcctgccggcgggaggtccattagccggctaagtgctcccagggaggggggaccgcgcggcataagagtgggtgaggcgaagccagggcagaggggggcggaagaagcttttcctgcattcagctaagtgcggcagaagagggtgggcgacagggctgtgcagcgaccccccggcccaagtctagccctccgctggtactgcagccctagtcgctcggaaacctcagtgggctgatcccggaccgccttaagcagcgccctctacacccagtccctccagctgctccccaacagccacttcggcccccagcgccctccttccaccacaggcctgaagaatcaggttctgctgagccccgcagcaaagcccccgacccgtccgcgtgcccctgccccaatccccgctccggctgcagtcgccgccccggccgccagggggagccgacgcggtgggagggggcggggcccgggaggccccgccccgtccccgccccgcccgggccccgccgaggctctggtcggtccgggacagactggcgggcgggcgggcactgacgccgcggggccggagcgggccgcgcggtgggagcagcggcgccgtcggtccccgtcagggctccgtgggtccccgacccgcccctggccgggccatggcgggcgcccagcccggcgtccacgcgctgcagttggagccgcccaccgtggtggagaccctgcggcgcgggagtaagttcatcaaatgggacgaggtaagcgcgcgggcccctgctccgcccaaatcccgggactctttcagtcaagctcgaccagacgctggggacccccaccccagcctcgcctgcccgtggcgccaccctcatcccagtctggcggcgccccggaaacttaagtccccgatcgtctccgtaatgaagactttgtccccccaactcccagtccctcagctctggaaaatttgcctccactccttggcgcagagactttgaaccccaataaaccccgtccccccgttttccattcgttcttcccaccgctccctgccagactaattctcgttccccgatcctggcctggtgcccagacccctgcccagcactagactccccggctgcaggaccctgacttccaggctggctgggggcatcctcattctgggtgtgtgccagggcgcccctactctccccggtgccctgcctgaacagtcctcgtccattcatcatttttccccctgttctggttggcaccccttcgccctgcttctggatcccagcccagctccctgttcagatgggagcacccagtcaccccctagtggagactttgccccccaagttcctccacccctgggaactttgctccccactccttaggcttgggaccttgaaccccaatacatcctggcccccctttccctgtcctgcccctggtgcttcccaaatgcctgtgtccccaccttcggctgcccatccccatcctgggtgcatcctcttctgccccctgggcccttccttccctagggcctccacccggccggcctgagcttcctcgcagctccttcccagtcaggccacgggcctggaagactctgggctct

SEQ ID NO: 5480 - DNA, 6000 bp, Homo sapiens
gccatcagcatggaccacacatgagcagatgtccaggaaacatgtcccaagttggaagcttcatgaggagctgctacacaaccccctgccccacctgtaccatcacaggcccttcagctgacatggtggcctcagaccctttctgaggcaagatcagtgtcacagagtccagcatggaacaggctctgggtcctgaggatcctgatggggctcaaggcagcctcacgcacatcctgttctctcccaggtggtcaagcgggtgctgacccagaccagcagcgggggcttctgtgggaacgacggcttcatgcacatgaccctggccagcctgccttttggaggagtgggtaggtgcctgctaccctgcccttctgttaccatttggtcaaattgcaatagtgttacctgcatacatttctgccaaagcaccccagccccacctcaatgtagagggacaggcaaggaggcctcaccccagaacccgcatcctgctccccaccccagagggtctgagtccaatctgggcaacacagtaagaccccatctcaaaaaaaagtctgtggtggaaccttctagaccatctctgcacagacacacaatttagtgaatttttaaaaataccacacaactatgatcacactgcccactgcgatgctatttgctcttctccccaacagcatgacctggtgtctgcccctcagcagcaatgccgccggtgtcctttactccagggcagctgctcctctaaccccatcccccctccagctctcagtacaacacctccccaccctgagaggcccggatgagtgccaatcctccaccccccagagcagccccgatgccactgcagagtcctggcctctgagtcaggaagcctcagagatggtcctagcaacacgctgaaggccctgtggcccaggtgacatctcccctttctgagcccacttcctcctcagagaacagtaggccccgagcaggtgacaggcagtcccgccacctgtccacactcagcaccacagtgaacgatggcagggccaggcaagctgcctcaggtgggtccatgcccttcctggagggcagccaggggcacaacagtgcctgtgctgctgtcctggctcggctcgagtttgggcggctgcccccgaccccacctagctgcctccccagccccagccccagcctcctcaacccgcctccctgccctggaggagagtcggggctgtctgtgggcacatctgaccctgctgctccctcaagaaagcctcccccagctcccaggcccccgagctgacccttcttggtggccgtggccccaccccggcttccccacctgctgctcccacagcctgagctctgcccaggtccctaacacaccgcatggcacccacctctaaggctccccaagcctgggtccctcttgcccccacccactctcttcgtcttattaactgcatatccttggagctcactcactgcaggaagccccccagccaaccccactccacccaggctgtgctctgaacgccctggcctggggcctcgtctgcctcccaacctagacgctgaggagagttcactgcacatagcacctactgggtccaggggtctcaacatcccctcaatccccaccacaaccttaggagggaggtacccttgtcaccccacgacagaggagactgaggcacagtccaaggtgacatggattgtttgcagcagggccagagtttaacccccggcagtctgactctggaatccatgcccttgaccaccacccgcctatcttgccctggcatctggcatccccagggcttactgagctggtgccaagctcggggccaagccctttacacacagtgcctcatgatcagcccactggacagatggggaaactgaggctcagaggggagaagtagcccgcctaggccccactgtctgtgactaggagacccccagcgcctgaccacctgtgttctgtgccactgtacaggtgccagtgggatgggccggtaccatggcaagttctccttcgacaccttctcccaccatcgcgcctgcctcctgcgcagcccggggatggagaagctcaacgccctccgctacccgccgcaatcgccgcgccgcctgaggatgctgctggtggccatggaggccaaggctgcagctgcacactgctctgagcccttccccaggcccaggctgtagaccaccatgacagctgtcgcctgcggctggtggagacggggcctgggctcccgggcccgaggaggaaaaggattgccaaggctccagggcacccctcaaagcagcgcctgcctcctccctcctgggtcttccctctccctgcctcagcctcctccctcagccgctcccaaccatgagagccgaggtgggaggcatgggaaacagtgcagtgactcaccccctgcccccgcaccaaccacccatattcaggagaagaggacagacacggcacctctgagtcacccctctcctgtggagcgggcgtccgaggggccctggcatctgactcaggccacaccatggaatcactgcatccaaggccattcctgccctctctgagtctcagtttttccatttgttcagtggagagaattaaccattgatacctcctggctgggtgaggcggctcacacctgtaatcccagcactttgggaggccgaggcaggcggatcacctgaaatcaggagttcaagatcagcctggctaacatggcgaaaccccgtctctactaaaaatacaaaaattagcctggcgtggtggcgcatgcctgtaatcccagctactcaggaggctaaggcaggagaatcgcttgaacccgggaggtggaggttgccgtgagctgagattgcgtcactgaactccggcctgggtgacagaaggaggctctgccttaaaaaaaaaaaaaaaaaaaacctcctgggactgttgcaaggatgaaatgaaggattgagggattgagggattgctgagctggagctccaggtgtcctatctttctcagtggggtggcacggagcggggccgcctccctcttctctccaggcaggtggggctgtggttatgcgatagggtctcccttccctccagcccatgccagaggagcttgtaactctttatcctcatggtgcccactacgagtcatactcttccccatgctgctcatcctcctgggccccatccactcagccaaagcagaatgcagggtttcctgcctgacaacccttctcacctcccaagtcccacttttgaacaagctgatgattctgaaactggcccaatttcctaacaagccggatgcttgagaaacctacatttggacaatgagaggctgctcctgcggcctgcgggccacctcctcttccttggctcctgctttctttttagactatatcaacctacaactttagtcgggaagagggacaggggtggacctgagtttcgtctcctgtctctctggctgatgtcacctgaataaagccttcttccctggcaatacttacatctcagtgatttgctttctgtgcatctagcaacaggactctggaccaaggccctggcgttgggtaacaattctgtaatgctgcaggacttccccaatccacgcaggaatccccgcaggcatccacgcaggaatcacctgatgaagggccagggtcaggtgtgggccaccatcccaagacctcccttctctctagggccagcccctctcctctgagcacctgctgaccagcccaaagccctctccactcctcagcttgaactcccccagggtctccctgtggcccacaggtcctttggaggctcgggcatctgcatgcaaatcccaaaccactgtcccctttgcacacactgagcctgcccttgtcctcgtcctggtctaccatgcgtgtcctccctctgcacgggcatgggacatgccctctgcctccttcctgtcctggcctgcccaactcctacctaccctcagcgcagatcctcccaacacacacatgcaggcagcctcggggcctctgcgggtccctctaccacagcattcccggggaaaggcccggcgtggtggctcacgcctgtaatcccagcactttggcaggccgaggcaggaggatcgcctgagtccaggagttccagaccagcctgggcaacatggcgagaccccgtctctacaaaaaatacaaaaattagccgagcctggtggtggcaggcgactgtggttccagctgctcgggaggctgagaagtgaggatcacccgagcctgggaggtcgaggctgcagtgagccgagatcgcaccactgcattccagcctgagccacagagccagattgtctcaaaaaaagaaaaaaaaaaaaaaaaaaaaaaaaattcgctggtaggaaacataggctggttgagtacgggagtcatacagatcaggtggatcaggcggccgcacaccgcagctctacggcccgggaacgttactaaatactcccatgcctcagcttcccgccttaacgtggtaacacgttactgtagtttctccacgcagagctgctgtgaggattaaaagaggccgcgtgagttgagcatctcgtcgccattaccgtcatcacacgccccccacccaacccggcgggcccaccctctgcacccacggcgaaagcactctttctaaaccacgccccggatgtcccgcctccagcggctcggaggtcttcacttattggcctccccaaaccaacatggcggccccctacaaacttcaagcgccggtctctcctagccaatcaaaagaaagatatttctgaatcccgcctctttcagcagccttgctggccaatcagaccacaccatgaagcatcaatacagaaaagggggaacccgctggcccaatggcagcgtcctacagtgtagcctccgcctcccgattgactggcctgcttggcaaggcaagtagcggcggcgcttcaaggtgggtgttcacgttttggccgtgaaagtcgggcttgggcagcgtggcgtcgggggcgagtgtggtgtccccgttggcgccgccagctctgcgcctgggcttcccctcggctcactcaggatccgcggcctccgtgtccttcaggtgcagcggggagccggctctcagggcgcatgcgccgcccgctctgcgccaccggcctagttagggtcggagatcactgggaaggtggggaaggtgctgggttgggtccctggaactgcagtcagtgatccaaaggagtgggcctgttagggggttcacaggtcgtgggatgagctcttatgagcgccggctaagtgccgggctctggggtgcccttggcatgtacgggctcccctaattcccaagaccaaccgcccccaacccacttcataggtgagaagacggaggtcaggtcacatcatctgcccaaggtcacgcggcaggctgggggacagttccaggagggccttgaagctggggaaaggaatgtggtaccgaggactgttcaggccttgaagagtttccagcagggcagggctgggttccgatcctcggcccacctccttatcgtgtgacttccgacaagtcacttttttatcttttttttgagacaaggtctcactctgtcgcccaggttggagggcagtggtgcagtctgggctcactgcaacttctgcctcctgggttcaagcgattctcctacctcaacctcccgagtagctgggattataagtgcccaccaccacacctggctaatttctgtattttttggtagggacggggttccaccatgttagccaggctggtctcaaactcctgacctcaggtgatccacctgcctcagcctcccaaagtgctgggattacaggcgtgagccaccacacccagccctagcgagtcactcaacaaactgagtcccagcgccttatttgtgcctccctcgtggagtccttgtaaggataggatggcagcgctttccacccctgggcacggttcctgggggag

SEQ ID NO: 5481 - DNA, 6000 bp, Homo sapiens
gggacagggtttcaccatgttgcccacgctggtctcgaactcctgacctcaggtgatctgcctgcttcggcctcccaaaatactgggattacatgcctgagtcactgtgcctggctgctagccatgttctcattgctgattacgatgggagtgtccagttagtttgtggaatttcagtgggttgtactactctacaacttttttgtatgttgttacttcaataaaacatttaaaaattattttgtctgtcatacaaacaactctagggtttgttgttgttgttgttttgagacagggtgctcactctcttgcccaggctggagtgcagtggtgtgatcacagctcactgcagcctccatctcctgggcttaagcaattctccctcctcagcctctcaagtagctggaactacaggtgcacatcaccacacctgactacttatttctttatttatttttagtagagacgaggtctgcctatgttgcccaagctggtcttgaactccaggcctcaagtaatcctcccaccttggccccccaaagtgctggattataggcataagccaccttgcctggcctcaagagactctaggtttgactttgctgtaaccctaggcaggagagagcccattttcagcaggagataaaccaagataaattttttcctacttctataacaatatttttagaattacaaaagaaatatgtggctagggccaggcacggtggctcacagtactttgggaggcccaggcgggtgggtcatttgtggtcaggagtttgagaccagcctggacaacatggtgaaaccctgtctctagtaaaaatacaaaaattaactgggtggtagtggtgtgtgcctgtaatcccagatacttgagaggctgaggcaggagaatcacttgaacctgggaggcagaggttggggtgagctgagatcgcgccattgcactccagcctgggcgacagagtgagaccctgtctccccggcccccgcctccaaaaaaaagaaagaaatatggtggcttacacttgtaatcctagcactttggaaggctgaggcgtgtggattgcttgagcctagcagtttgtgactagcctgggcaacagggcagaacactgtctctactaaaagtacaacaacaacaaaattaactgggcatggtggcatgagcctgtagtctcagctactggggaggctgaggtgggagtatctcgtgagcctaggaggtggagactgtggtgagccgtgattgtgccactgcactctagccgtgtctcaaaaaacaaaacaaaacaaaaaagaacgaaagaaatatgcggttattgacgaaaactggaagaacattaaaacaacaacaggccgggcgtggtggctcatgcctgtaatcctagcactttgggaggcagaggcgagtggatcacttgaggccaggagtttgagaccaaccggggaaacatgtcaaaaccatgtctctacaaaaaatacaaaaactagccgggcatgatggcgtgcgcctgtagtctcagctacttgggtggctgaggcacaagaatcgcttgaacctgggagacgagacagaggttgcagtgagtcgagatcgtgccactgcactccagcctgggcaatggagggagactctatctcaaaaagaaaagaaggtagtttctacctggagagccagatgataaaaacggaaaattaaagtttgctgaggcaactacacaggaggctgaggcaggagaatcacttgaacctgggaggcggacgttgcagtgagccgagatcacgccactgcactcaagcctgacgactggcgacagagcgagactccgtctcaaaaataaaataaaataagataaaaataaattaaagtttgcatttgggacaagaagtgttcctgttttgttccagtggatgtaactgttttatatcatgggcagcagtttgctaaagggaaaagaaaatactgcaagacaattcttgcattcttgattctgagttatgacctctctaattcgaaactaaagacttgtatttcttctttatctttagtccattcagaactcgagttctcagtatgcagaactaactgtaagtgaacagtcattttctgtgtaatttgcttggttatattcctcactatcctgaaattcctgggttcagaccagtgtaactaagagacaaaccctggtgtatgttctgacaagcataatctagctttacacccatcaaactatctaattagagggtaggggactgaattactcattttatttccaaagaactttgaagtttttgcccagagagagccactttaagttaaactctttgagactccatttctcatcagggataatgatacctcttctgcagatggttgctacgaagattccatgaaaagcgaaggcactttattagatataatttactacatgaaattaggggcttgttactgtcagttctttttatgcctgtctctagggtggtggttgaggaccatgtcttgttcatttatattctgggcatttggtacaattcctggactaggagtgctcaatacatatttgtcaaaagaaggaaaggaaagaaggtagtaagtctgaagaggtgctgtgggtctctctggcaggccaatctcggcctttgtaaccctcatcaataagaggatccaatgggcacaagtagaaccagattcagccctcagaggaagacgtggagcttctgccattggacaacagggggagcacccaagcaacaaagatgcactctatctcttgttcacatctctgcttttacatttcttcttttttgaagcctgttgcccacgctggtcttgaactcctggcctcaagggatcctcctgcctcagcctcttaaagcgctgggattacaagcatgagccagcttgcctggccacattgcttcttttaacatatattcttcataggcttaacaactgacatattaacatactatctaaacattctgatgaccagtatggaatatgctcagtaggtgaaagtgggttcaacccgctcccatttgtgcttctgcccaacagttggtatcctgaaacagttgcaatgaattggagatatcctgtgtgatgaagaggaaagaaacttgagttggaagtcaggaaatctgtgtgcatggtggtggctagagtttcttcctatcatttacctcttcagacaaatggacgccacctgcccatcaaccagattgaggagaggagtggataagaggagaggcatccacaccacattcattccttcaaccaaacatggaacttctaccaggctctgctaggcctcgttcacagttacggtacaagatgtagcccccgctctcagggaactctggctggtggaaatacagcatcaaatattctgaaataagttgggggagggccgggtgcggtggctcacgcctgtaattccagtacttgggaggccgaggcgggtggatcacccgaggtcaggagttcgagaccagcctggccaaaatggcaaaaccccaactctactaaaaatacaaaaattagccaggcgtggtggcaggcagctgtaatcccagctactcaggaggctgaggcataagaatcgcttgaactcgggaggcggaggttgcagtcagctgagattgtgccactgcgcttcagcctgggggatagagagagactctgtctaaaaaaaaaaaaaaaaaaaaagaaaaaagaaaaaaaaggaagttgggggagtgcaaacaataaacttcacaaataccacagggtcacttttccatatgtccctaccatctcaaaatgatgctatgtcacttctgtctataggttctcatggcacacaaacagtaaacctgcagtagttgtccatgaggatagatcttgcttggattcaaagatggtttagccagagttgggagtggagaatgatcatgtaatatcttggacacctgccacttctcattaaaacactcagctctcaaagctgccacttccaggtttttgctcagttctatgtcccctaccctgccactatgaaagggggagaaagcccagggccttgggaattcctgccccaccagtatttcccagtttcctttttttttttttgagacaaggtcttgctctgtcgcccatgctggagtgcagcggctcgatcacagctcactgcagcttccaactccggggctcaatcgatcctcccacttcagcctcccaagtagctgggaccacaggtgtccaccaccatgccaggctcatttttgtattttttgtagagatggggtttcaccatgttgcccaggctggtctcgaacacctgggctcaagtgattcccccacctcggcctcccaaagtgctgggattacagacaggcatgagccatcgcgcccagcccgtttccttaagaaacgttttgagcgtctgttaggtgtcatacgctctgacgggggaaacaaaaacgaatataaaacattgactatggttcacaatctgcgtggtggcagacacaaacttctaattttatttctcctctcatacagccgaaaacctggtttaacatacactgtttcatttatgccccaaaacagtcctgtgaggtcaaaacgtcattcacttacgcacggcgggtgacagttcacaaggcacatgacatccctcatcttgatctcccggtatccgcgcattttaggaagaaacatgctcaaagggatgaagggtccgctctcaagcattttagctagcgaagttacagtcacatccggcaaactcgcacactgcagatctaggactaccccgcgcggccccgcccactttcccagcagcgggacgctgtcaccccgactcaggagctcctgggcccgcgggctcccggaagctgccgaccacgtgattcgctggctcagctcacgtgacaaagctcccggaggtgggagccctgggccaaaatggcggcctacctgcagtggcggcgcttcgttttcttcgacaaggagctggtgaaggagccgctgagcaatgatggggccgctcccggggccacacctgcttctggatccgctgcttccaagttcctttgcctccctcctggcatcactgtctgcgactcaggccgagggagcctggtctttggagatatccttcgtttggagctgtcttttccctcccgggatcccgaagagatcgagttaggatgaaatctgtttgtcggaggggtccgtgccgcgcgcctctttggtttagctggtcatccagagttgttctgtggtctacgggaagaaagaaggaagtccatctcctaacttgttatcaactgagcaatcctgggcaagtcatttaacctctctgggttttaatttccttatctgtaggagatgtgtgcatgccaatttgacgaggttaatttgagatcaataagaaaaagaatgcaagttggctttaaaagatgaatatgtaaagtgacatgatttcccctgccctaatattatcgttggcgaggaggtaaatgagcctagcggtttgttgctttcatcttcatgttgctgctactaaattctggcctttttacctttttttttttttttttttttttgatacggagtcttactctgttgcccaggctggagtgcagtggcgggatctgggctcactgtaaccgtctcttgagttcaagcgattctcctgccacagcctcccgagtagctgggactacaggcgcttgccaccacacccggctaattttttacattttcagtagagacggggtttcaccatattggccaggctggtctcgaactcctgacctcgtgatccacccgcctcggcctcccaaagtgctgggattacaggagtgagccatcgcgcccggcgcactaaatttttttcttttttttgagacggactttcactcttgttgcacaggctggagtgcaatggcatgatctgggcacactgcaacctccgcctcccgggttcaagcaattctcctgcctca

SEQ ID NO: 5482 - DNA, 6000 bp, Homo sapiens
ttcgagaccagcctcaacatggagaaaccctgtctctactaaaaatacaaaattagccaggcatggtggtgcatgcctgtaatcccagctacttgggaggctgaggcaggagaattgcttgaacctgggaggcggaggttgcggtgagctgagatcatgccatcgcactccagcctgggcaacaacagcaaaactccgtctcaaaaaaaaaaaaaaaagtctagtttgggtggaggtgacaggagcaacagaagggaggagccaggcatggtggctcctgcctgtaatcccactgctttgggaggccaaggcagaagcatcacttgagcctaatagtctgagaccatcctgggcaacatagcaagaccctgtctctacaaaaaattaaaaaattagtcaggtgtggtggcatgtagctatcatcccagctactcgggaggctgaggtgggaggattgcttgagcccaggagtctgaggctgcagtgagttgtgatcatgccattgtgctccaacctgggcaacagagtgagaccctgtctctcaaaaaaggggaagcaggtatagattcccagaggcaggctgatgaaaaaaaggcatggtagatggacagactgcctgctgaattccctccctggtctctcacctcccctctggccaccttctgctccagcttgcaactcaacagcctgggccctgaggcctgcaaggacctccgagacctgttgctgcatgaccagtgccaaattaccacactgcggtgagtgacctgggagtggggcatcctggtggccagctaaggtcaagggtgagctccctgcttcctgacatacttggcacagacccacccaagggatagtaaatggaggagagtctaggccctgacctgtcccctccacttcccccaggtccactgcaagcagcagggcagcagggaaacatgccacctgtaatgggtgctaagaaacctctcacgtggctaaaatcagcctgggggaggtggggagagagggtggaataatacctaggccggttgcctggtaacagtgccactgatcccctcccaggatttttcttgcagcctcccgaggaggaccctaatgctgggcactcagtagacaccccttaagtgttgactgatatgtggggaacctgagctcctgggttcccagtttctgattggtgtaaggggaggcaaatgaggagagaaaaaggaagagcagggagaaggataggggagtcagaggggagggagaagcagaggctgtggagggggtgaaaaaggcagaaaaagggaaacggaaatggtgaaaaggaagggaatagataagaagggagtcaggggaagagggaaggaaaggccagctcccctactctgactcctctgccaggcgccacaccccctattgctccagcctttctcctgggcctgcatttctatgtccaggttcctcttgccccatgcagggccctctttggcccaagtcctgacacccagcacagggctgccccattaaggctgccagtaccacccccaaccttgcctccccctcctctcaatgagccctcataaccttgggttgcacgtggctgtaggctgtccaacaacccgctgacggcggcaggtgttgccgtgctaatggaggggctggcaggaaacacctcagtgacgcacctgtccctgctgcacacgggccttggggacgaaggcctggagctgctggctgcccagctggaccgcaaccggcagctgcaggagctgaacgtggcgtacaacggtgctggtgacacagcggccctggccctggccagagctgcccgggagcacccttccctggaactgctacagtgagtcctgtccctggtcccattgcccccagcccttcagactacttccctctctcaactgtgctcctccaatcctagggagtgcttctgggcctgggcctggtgcctgtcctttattcctggtttctgactgatccttgtcaacctagctctgagccaacccaccccctctgtgactggcgcttaaactgcaccaattccctaccaccatttctcctaaagccctactgtctctggtcccactgaattctagtatcagggtcggctgtggtggctcacgtctgtaatcccagcacttcggggggccaaggcgggcacatcacctgaggtcaggagttcaagaccagtctggccaacatggtgaaaccccgtttctactaaaaatacaaaaattatctgggtgtggtggtgcgcacctgtaatcccagctacttgggaggctgaggcaggagaatcacctgaacccggcaggtggaggttgcagtaagccgagatcatgccactgcactccagcctgggtgacagagcaagactccatctcaaaaaaaacaaaaacaaaaacaaaaacaaaaacaaaaaaaaaaaagaattttagtattagtccctgcctcccactggccagcagcctccacctctggctcattgcagttacctgatcgcactctgcagccaggagatgagttgtgaggccccctgactttccatccatctaccctcgggccctccttctcagagctctactgaatggcatcgactttctctctcctgccagcctctacttcaatgagctgagctcagagggccgccaggtcttgcgagacttggggggtgctgctgaaggtggtgcccgggtggtggtgtcactgacagaggggacggcggtgtcagaatactggtcagtgatcctcagtgaagtccagcggaacctcaatagctgggatcgggcccgggttcagcgacaccttgagctcctactgcgggatctggaagatagccggggtgccacccttaatccttggcgcaaggcccagctgctgcgagtggagggcgaggtcagggccctcctggagcagctgggaagctctggaagctgagacactggcggcaggcacctagctatgtgaccactggccctaaaccttttccctctgtggcctcctggcttgcactgctccctctagaaagattccttcaggtctggaggcagaggaatgggcatagctgagccagttgccctcctagggcatgtttgaccaggactgagtctggaatctccaagttaaagatggtgaatcaatgcttcgggcttggagatggaacatgcctcctctccattcagctagaaggaccaaagcatgtggcatttggatggccagagtgccctgaagcaccactaccaaccttgcctccccctcctctcaaagagcctctgactgtgtcaccaaggggctcacatcttatgtctgccatgccaggggtgtcgccatccagatgtgttggaagcttcccctcctgccttatgctcacctgtggacaccgaggatgccctcacattggtgctttctcctcatcctcatgccccctttgccacaatggtatgatggcttggtagcccctcgaggcagatgcacctgacttgctgctattaaaaagccgtgtgccttctaccaattgtggcctcttctttactgcctggtgcttccaagaaagggcactgttcttggtctttctggttaaactaccaaccatgatctattgcaagtggttcttgggcactaggttcagaggcagtggaggctggaagggcccatgaacaagatattggcatgggggttggccatgctgggctgtattagtccagtctcacgctgctaataaagacatacccaagacagggtaagtaatttataaaggaggctgggcatggtgactcacgcccgtaatcccagcactttgggaggccgaggtgagcggatcacctgaggtcaggagtttgagaccagcctgaccgacatggatagacctcgtctctactaaaaatacaaaattagctgggtgtgatggcacatgcttgtaatcccagctactcgagaggctgaagcaagagtattgcttgaacccaggaggtggaggttgccgtgagccgagatagtgccactgcactccagcctggagaacaagagtgaaactctgtcaaaaaaaaaatttataaacgaaagaggtttaattgactcacagttccacatagctggggaggcctcacaatcgtggcagaaggcaaatgaggagcaaagtcacatcttacatagcagcaggcaagagagtgtgtgccggggaactcccctttataaaaccatcaaatctcatgagacttattcactatcatgaaaacagcacgggaaaacctgcccctgtgatttaattacctcccaccgggtacctcccatgacacgagggagttatgggagctgcaattcaagatgagatttgggtagggacacagccaaaccatactatgggccatagaattatcacccttttcacacttaccccccaggcttggagttagtgaccagcaatctgcctttctctgcacagaggggcaactgggtcagattcagggtctccagaaaaagttggggcccagggatagattcaggaggaacccacacagttttccagaggataagactctcagcggggcacggtggctgacgcctgtaatcccagcactttgggaggccgatgagggcagatcacctgaggtggggagtttgagaccagcctgactaatatggagaaaccccatctctactaaaaatacaaaattagccaggtgtggtggtgcatgcctgtaatcccagctactcgggaggctgaggcaggagaattgcttgaacctgggaggcagaggttatgatgagccaagatcatgccattgcactccagcctgggcaacaagagctaaactcggtctcaaaaaaaaaaaaaaaaaaaaaaaaaaaaaaagactctcactcccgttaaccattaccccactgcttccacagcgtcttcaaggaggcgggacctgggaggggatgggtgggaggatcagtggctgtgatgaaccttgtccctaccccgggcactgggttgctgatccagctatggagaaagccgcaggtaggaggccaggagaaatcctctgcaggggactttgggacaggcagggggccgacttggaggctgaagctttgggaccagggcacacttgattttggggcttggagccctgaggcaggtaaacaagtcaggagaaaagtaatgagttgatatgtctgtcttcctggtccacaccctgtactgatatgctcagatttatgtgccaaggacttggggggagagaaagggaggggaccgcacaatagtcctgtgtgtatggcagtgagaagagaagacccctttggagcagaaaggagggggcatgccctgagtttgggggtttccctgagtccttttagtttatgccaatggaagaggcacatctggggagaagaatgtgactctcctcctctcacccacttctttgcccagtagatctgcaggacacagcctcgttaactctgtaagtgccacgagggttggggcaaggggaggaaataattggaggcagcgaagcgcttcactgccattagcacctaaaggagatcctgggacccaagtccagctgccagcttgtacctgcttcccctgcctccttgcaggaagtttaagtttaacccaaagctgggcattgataatcctgtcctctccctggccgaagaccacgacccctatggtaactccctcaccccctggcaaccattccctatccctggaggcaccacggctccacacggcctccgatctccttggtaaccactcactcggtctccctctgataacagccttggttgggagtagagataggaggggccgggtgttttctcctgtcccagtccctctgcccacgaaccccaccacccaacacccaaccaggcagaaactgcccagcaccctatcaggacacagggtctgccaggcacacggcgaacctgtacttgggctgtgccctctcctcccccttttctgctgcccacctcaccctccagatccctggagcctggagcggc

SEQ ID NO: 5483 - DNA, 6000 bp, Homo sapiens
ggactaccagagttcttaccctctcctccatactgcctctcctctatatatgattcagctcaaataccatcttctgtggaaaccttcccttaccacccagtctgagttcaatgtttctcctctgtaccccaagacaccccacatgtaccttcatcatagcattcatcacgctgtcctatataacttggtatctattcccattattctgtaagttccttgagaacaggaactttgactcagtcttatttttgtttgtatcctcagtgcctaagcacatggcaaatattcaaataacttttatggatgaatggacagacggatgtagggacggatggataatgtgagctacagcattagcattcattttcagataatccagcaggtggcagaagagggcaatagctgaacggaagatgggctgccttacctttcacactggtcactttcttcatgatggtttcctgaccttggcgcagggtcacggtcactgtggctccaggtgtaccgaagccccatatcactgccccagcaggctccttctgcagcaccatatcattattgatgtatgaagcaaagcgaaaaccaatacctaaaaaatttaacaaacactgagggaagcatcatcggagagatatagcaccaactggatcaagtgaaacagcaaagaacatacagtctttatgcaagagaattttaacatactaagtccctttaatcgtctaaaactggctcttcttcctcctaattaggcaagcaacataacaagaacagtttccaacagtatgcatcatagcacatgatgaccactaaggaaaattcccagagcccaaggcaaccaatggaccatagtcttccctctccttcagagctcttgatctttttttgctcttgggcttggccctaacgctgggctctctcccgcaaaatcactaaaatgctcctttcatgcacctatagatggtgtttatgagaaaaataaaccacttcctttccctactttccattaccacacctgctcctaatgactgggaataaaacagcatgcctctctccaaacagccttccctaatctttttccccttctctatctccccttttctatgccactaatgccaatttccttcaaataatgccccttatcatggttttttgacaacccagtgtactgcatcaaaaattctaaataagcccttataaatactcatgacaagtcagcttccttctcaggtaaattcaaataaatcaagacacataaataaggtcagtgagagatagaaggtcaacatgtctgaacaaaggtcttctgtcacaattttacccattccacaagctaaattatactaaaaggacaagagaaagcacactagaaactggattctattctagagagtcactaacaagactgaataagaactcgctttaacgacatcattcctatttttaacatccagcctatataaaagtattttattaatacaaacatccatccaaattatctcagcgtgttcctcatcaaaacttaacaaggaaaaaaataaaacaaattatatcccaatttatctgaataaaacagaccccaaactacctaaaataattaacaaaatttagatctttttaagcattttaaacaaaaatgataggcagaaaagagaaccagaattaacaaggctgacattttcctccctggaagctacaaatgatgagggccccttcggctatacttaacagggcagcacagctaatggagtcgcctacacagctccgtggcctatttatcctgctcttggaataacagcccagtccctaaaaatcctcagcgctctcttatgagctagtgtgatcaagaaacctacatgacaatgaaagatcacccagaaggcctactgggctggagatgcacggttaccatgagcaaaatgctctaagaaaagaatacaacgccccagaattgcataagcaggttggcagcctgctggagggaagggggaggcacatgtgtgggagggccttgtcttgggtaggtgcttcatatggaaccaaaaaaaggaaaaccacagacataaataagagctaagtagagagagggtgggggtaggggaatggctgcagcttgcacatttgtgtgcagtcagtagtccataggctaggggaaataccttcccaagtctgtctgttttcaccaacatacacttagtgaacatctttgtggatgactctgtgctgggctaaagagttttagaggtggaaaggatcttcataatcgtagtataaacacgctacttactgatcaagaagtataatcatattactgatcaagtaactgagaccaaagcagatgaaacaattttttaaaatagcttgcatgttcattagttaattcaacaaatatttattgatgcctactattttaagcattggggatataacgatgaaaaaataataataataatagcaggcaaaaatccttgcccacagggagcttccattctactagagactttacctgtggcaggcacagtgctaaacacaccacaaacattaatgttctttggtctcaaatcacacagtttatgacaagttagaaaacaagtcacttgattccaaagttgaaattcccactttgccgaaattagatacttgtggcaaatcaaagaaaaaatcatattcctcatctttgtaaagtttaaattctaagttcattagagtagacagtggaacatcaaggaattgtgcaatggacaaaaaaaaagagagagagaatgagaaagagagcaaggctggtcattccttgtgccaaacacaagacacatacatttaccatttgatttcttgtttgtttgtttttttgagacagagtcttgctctgtcacccaggctggagtgcagtggtgcgatctcagctcactgcaacctccgcctctggggttcaagcggttctcctgcctcagcctcccgagtagctgagattacaggcatgtgccaccacacctggctaattctttttttttttttttttgatatctttagtagagacggggtttcactacgttggccaggctggtctcgaactcctgacctcatgatctgcccaccttggcctcccaaagtgctgggattacaagcatgagccaccgcgcctggccaatttttttgtatttttagtagagacggggtttcgccatgttggccaggctggtcttgaactcctgactctaagtgatccgcccacctcagcctcccaaagtgctgggattaaaggtgtgagccaacatttggattttttaggtcttcagttttttccttcatttggggctggagtagaaaaacaggaattagtgttatggggaagagagggcagtggttgcctctggtgaggagctccggatgcattggcgaggagcacaatggcaggctcaatagactggcaatgttctagttcttaagttgggtactgctctcatgggtgttcattttattgtgtcattgttacatataattttgtacatctcaagcattacatggtaaacatgggcacagggagaatgacttaaaggaaaaacgtcaggatacgcaaccaagtagagtactaatgaatgaaaaatgtgatcaatgttaatgaaggtgatgtaacaataagacccaaaggaggagataaaatactgacactaaaataaacagcctttaactgaaaacctaataaaatatcttttccccacctcataagatggatctcaaaggtcactgagtggagataagagtcaggaaatggcatacagagtgctagcattttgcacttttgttagactctgaacaatcatttatgggctgcagtttgtctgaatctaggtacttttccggctctcaggtagagcaggagtcatttttctgcacgctgttctcctaccccaactatcatttcttaacagggatctctggggtccactctttgagtgttttgaaacagaaaggaagaaatccaacattatcactttagtttgcattatcagacagattgcaccttctgctttctccatactgtgacccagtgtccagcctagggtattcgaatggcaagatctgacctgcgcaacagccaaagggagccaccagcctcccctatgccactcacattttcccaccaccaatatctgtaagcggtaccagaaatcaaaactgagccttaaatagtcagagctagtgagggggttgtatttcttagccctgataaccacttaaacgagtaaaatttaattcccctaaggaaccccgcctgaagcaaaccctccccaagggcaccactgagggggtagcgctgaaatgttttggaagattcagtcacctgtttccaaatattacctaactagcttcgcctccttccctccgagctcccctgcagttactccaggaccccgaaggcctctttctgggcacatttgggcctccccactcagacaagccgcactttctccctgctcacaggctgcatgtcagggatggtaagtggggggtggagaaagtggagaggccggggttcaacccagcagactcctgcagaccgggcctcggtcggagacgcgagcccctagcctagctaggttccttcgtcgaccttgagaaaggggcgcggatccgtgtcccgcagaggacacggggtctcggagcccgcacaggctgaggggcaggggtccggccgagccgggccgcctcacctgcacttctgtcggcccacaggattaatggcagcaccagcccgagtacaagccccggcgcgaccatgcttgcaaggatctgaccgccgcctaggactgggaaagtgggttcccggcaggggcggggcctgggcgggggcgaggccgactccacccttttgcagtcctcgcagcctcccgcgacctcaggactgggctgtactcgccccttctcggccgccgtagtttttttttttttttaaagaaaaaacggttacccagcaactagaaaaacaaccggaaccggcggcaccagctcggagagaaaggaggtgaggccgcttccccacttcctctccgataccaagacctagccttttcccttcgtctctcttattctctcagcatcccagacacagcctcggagccctgggccgtttgggagccgaggcagcccattctgcgcgagtctgaaatcccaggtcctcaacatcccgcccccgactagacccgtctgccccctccgcccgccctcctctgcccacattggttcagaatctcgccagctcttttcaccactctagaatggttcgatacccccatctactgctccctcagaaaaagcaaaagagaggagtcaggcgtggtggcgcgcgcctgtaatcccaattgctcgggaggctgaggcgggatcatcgctggagcccaggagttcgaggccagagaccccctctcaaagaaaaaaaaagcgatgaaacgagaaccctccatagtctgagcctcattaaaccgtccagttctcccaacctggacccctaccacggcctccgcctctattccgcattgacgcacactctcacattaacaggccaggtcccggaggattcttttcatactcagtagtagctcagcccgctgcttagcagctacccttaatctagcccttgtatttcaagacagaaagagacaacctgatcaagaagaaaccgaaaaatataagaattctaaaactttagaggctgggatttcaaaatcatgacacacagccccatcccatcccatccctccctcacacacacgcacgcacaaccccattccacagtacgaaggtgttcgaagcattgtgggtcatgcttcagaagtggcagcaaggggaaagattgtgcaacttcttcattcaacaaattaatttctagaaccaggactaatttctactctttaaaaaaaaatagacctcaaagaaggtcttctcagcaattgacaatgaatttaactttttagcaatcattctctctaaattcctgtgtgatag

SEQ ID NO: 5484 - DNA, 6000 bp, Homo sapiens
aactccttccctccagtcttctgtctcttcttttcattgtacagcaggagcttttgaagcaccccattagccttataccagtacagggagtttttttaaaaaaaaacaaaacacgagcacaaacccacctttcattagttaaatccttgagcggtgcagtatcacacagattgtgtgtctgtagtcttagcaggaagattgggaatttggcataaaccatgccactgtttccgtgaacccaagttactttttcccagattactctggttttgtttggtgtgccaccagaagtcgctgtgtggttctttgctttgtgtacatgagcacatctcttgcccaaatagaattcagtttatcccaggcataaatgctgaaattttaagaagagctgtgtgccccctttggttctggaaaccccatgtacagccagcaaaaatggccttggaccacagccttcctgttcccagcaagcctccacaggctccaagatggcagacagagtccttcttagatcctaggtggtaggcacttgcttgtaagcaagtgcctcccattcctgagttcctgcagggagtttggttgtaaagaagagggatgggtttgtccatctattctaccaaaatttattcagcccagctgttggccagggtcagggtcacatgttgagatacaccagcaagcaaaacatagtcatgtctttgctggaactttcatagccctgcacctcctagcccttcacccctagatcagatacagtgtgacccccacagtgctggcataagcacacaacacagacacctcacccagggtgggactaagagggtggcaaaggggtttctccatgaagctcctcgagggaagttgacctctgagctgaacctaaaggatgggcatttagtgaagtgaatgcaaggtggctaagggaggatccaggctgagggcaaaccatatgtaaaggtccagagacaagaattaatacgattcagggatttgtcctagtccacttgggcagctatcacaacatatcctagactgggtaatttataaataatagagatgtattgctcacagttctagacactgggaagtccaagatcaaggcaccagcagattcaatgtctagtaaaggcctgctttctgcttcgaagatggtgctttctcactgcatcctcacatggcagaaggggtaaggcaacttctttcaacctcttctaagaacactcgtccctttcatgagggtagagtccacatgacttaatcacgtccccaaaagccccgcctcttaacactatcacattgggtatcaggttccaacataggactttagggaggacaccaacattcagaccacagcaggattcagtgtgactgtttctgcctggatcgtggagtgcgagaagaggaactagagccactgaggggttttaaacaggagcaacacgatcggattttccttttagaagaatcacctgggtgaccctgtggagagcagatgaggatgtcaaggcaggcagcaaggaggccagatggaggctgtggttgcagtctgtgtggcagggacagggagtgcctgaaccatcatggcaagaatcagatggatcccagggtgacgccagcaacaagaagtgggttaagtcgcatggccaggtttctggatggaggttctacccctcccagagatgaggagcaccagggaggagcggagtgagggacagagtgaatggtgcagtctgggatgtggtgaatgagggtacctgtaggacatccctcaaatagggggttgggctgattggcatggtccttgggggatgatctgggctgtagatagtgatgtggacatcatggaacaggatggcatcaccccagagggtagagtagggggccaaggagggaagctggagggaccccaccaacatttaagggacagaccagagaaggggacactgaagaggtgcccacagagacaggagaaaagccaggagagtgtggtgtcgtgaagctaaggaggaagtgatcacggtgcctgctggattcggtcccaagtaggtcagtggtggcctcactcgagaagagcagtttcagtggaatttaaggtctggacacttgcacaggagaagtgaatgggaatagaaacagctggtaaactgcccactccgccttgaaagtggcctttgggatcgggcgcggtggctcacagttgtaatcccaggactctgggaggccgaggtgggaagatcgcttgagcctacgagttcgagaccagcttgggcaacatggcaaaatcctgtctctacaaaaaatacaaaaattagccaagcgtggtggcatgcacctgtagtcccagctattaatacgtgggaggctgaggcaggaggatcacttgagccttggaggttgaggctgcagtgagctgtgaggcaccactgcactccagcctgggtgaaggagtaagaccctatctcaaaaacaaaaaacgacaacagaaaaagtggcctttgtggagaaggatgaaagggagggaagaaatgatggaggtgggctttactaatggcaggggaggagatgtgctaccagtgaggtaacagcagaagcccctgaggttggggtgagggggccaggcctaaggcggaagccagaagaggaagaaggcggtgctgaaagacaggaaggaacttgccagggatacgcaggagggacaagctgacatccgggttgaccctgtgaagttcccctaggtgccagccagttgctcccttcagcacggacattccaatctcagggcaaaagggaaaaggccttcaagtgtttctcacccagaagctgctcccttccacacactgagtactatgtttattaagaagcactgaggcctgtaatcccagcactttgggaggcggaggtgggcagatcacctcaggtcaggagttcgagaccagcctgaccaacacggagaactcctgtctctagtaaaaatacaaaattagccgggcatggtggcgtgtgcctgtaattccagctactcaggaggcagaggcaggagaattgcttgaaccctggaggcggaggttgcagtgagctgagattgcgccattgcactccagcctgggcaacaagagtgaaactccatctcaaaaaaaaaaaaaaagcactgagcaactctcctgtcctcccacagggctgtacttcaagctgtgggcaagcccttaccatcgcctccgtgcatctgtcttcccccctgagctgtgcagagctgggaccaagccttcttcatccttgcctgacactcagctgccccaacacttggcccatacttggcgccgtcaaggcctgtttatctgagtgttcctcgagtgtccttctgctctggctggagcctgaagaaccatccctggcctcggggaatttttactctaaagtgggagataagcagcagagcacaggctctttacaatgaaaagcactatggcctttgagggatggaggtgggaagggctgggttaagcaaagctttcctgaataagctgcaaaaatgggccttgatccctttgtagctcataagcaagatgactgggtgttcacgcacatgtgtgaggtgtgcctcccttaaaccttgttaagggttgttacccgtgtgatgggaaaaaaaagaaaaaggaaacaaaaaaaccccaaaaataggccttgctagaagaagggcgttttgcagagcggagctggggaaaaggagggccctgggcggaggtgtacttggtagagtcaggtagagtcaaagcaaactgggcatttgggtgcagtgccaagtgcctgatctactttatgtagactaatccttgcaagaacaccagcaaccagataccataatgtgatgaaggaagcaagcctagaaaagttgcgtgacttcaccaaggccacacaactagtaagcgatgagcgctggttgtgaacccaggcagttgactccagagccctcccaggatgggcagctcatccgctttggcgggctggtgagaaaaggaggaaatcaaattggagggggagatcatgaatcttacatggcctaattaaactacctccactctccagcatttcgtgcacatagttttaggatagggtttcccaaactggcatggcctggagcaagacgctcaggaagacattcacatttcttgtagagtgaaacaagtgtggggaatgctccgttcccttctccccaaggtgcttcacagcgctcacgaacatctgaagagctctcagaagtgggaggcaaaggcatctctttcacccaggacttccagcatcttgcctacaccacgctgtttgcagcggctctgcagcatactgcagcgctgttcataacgcccatgtgggatcaccgcttagagaagcaaagaaagcactttggcagaagacggggtttccaccctcctcggcatcaaccagtgtctgggacgggaactggcggccgctgcggcctggcttcccagctgccgcccgggtctgcccctcccacactgcagccccgtacacccctcgctgtgtgtgacctttggaaaagttccatctctccaagcttcatgtttctcatttgtataaaaggaaaaaggtatgaacaccccccttgcagggtgttaggaagattaaatgggcggaatagggtgtttttttttccttctcccccgcctagaacaaaacccaggtttcaggttgtcacggtgggcgccgggggaccctggccacgggctcctctccgagttgctgcggaccgccccaacgcaagcggagaggacgggagcccggagtcatgcagaagccaggctggcaggggctcgggccgcagtggacacaggggctgccccgtcccgcgtctcccgcagccggattgtgcccgagagtctcccgggtctggactgggcctggcggcgtgggaggggcagtgcggcgggcggcgcttccggagagcggggcctgcgcgctgctcttccccgcggagcccgcgcagtccgcgcagccctcatcgcaactgggcccgcgcgcaggtgagcccggggcggggtcgcgggggaccgggaggcgcggcggggctccgtggggtgggcgacggagcgcggccggcctgggccccagagtcccggccccaccgagagccgcaggggtgcgcgccgcctctggtccggccttgccctgctggcggcacatccgcttcccttcttcacctttctggcacccgcaacacgcaagcggcatgaaagggccctccgaggagaatgtcaccttttctgtcgcaaagaagctcgcgcggggcggctcccctttcgcttgcctcgctggaagagcctggcgctcagtgcgttgtggatatcgtttctcctcacgttcttctctgctccggtcacagcctcttcctctgctcttcgggttgtcattgtggcagtgattcagcaagtgcataacattagttagggtcagggacctatcgaggcattacaccacagtcatgggcagctacacacgggctgggcagccactgtgccaacgactagggtgaccgcggtggaccagacagatccagtcttctggtccccaggggacagacaggtacgctagaatcacagcataccctagaagtgcaacagagagggggaagtgtggagaactcccgttgaaacaccaaacctaggggacaccaggatcaggaatgactcagagggaaccacatctagttagtttttagatttaaaagagttgatacgtaggcacacaaatcctaagtgtacagctcaaccattttccacaacacgcacatttcctgattcagagcaatcaataaaacatgactacatccctggcttctaacgccataaaataggtttgcctgttttggattttccatccatggaatcatatatcatgtacttcttttttttttttttttttttgagatggagtttcgcctttgtcctctgggctggagtgcagtggcgcaatctcggttcactgcag

SEQ ID NO: 5485 - DNA, 6000 bp, Homo sapiens
ttcctccccggagagctctgacagatatcctggaacctgaagtggatccttcatgccccatcctgaatcccaaagccaccttcctgaggtgttgaagaagctgctccaccttggaactactataggggctgtggtggcctttcattcctttatcagcaaaagcttttgtcacttgtgtggtgggggacatgcttagtgtgagaatgcagagacccatgccaggccctacccaaggacatggtgctccttcagccattgtcatcagagccacagaggggagcttcctggcagaggaggagtggggagaagctgtggaatggctccttgagctccccactccaccccttccccatgcctgggctcccattgcaaagacccagatgtgggcttatcctgtcccccagccagagggagtcacccaggggtgttcaggccaaccctttgtgaaatccatgttccaccagttaccagcctttctccggagagctgagggctgtctcacactgggtagtctcagcctgccctggggttgggggggtgctcacagagcagtaagcgtcactgcctgcatccccacacacctgcattatcttgtctgcaagacacgtgtgcccctgagctgagctctgttgtgcaccacccgatttccgtcggcctcctttctgacttttctccatcaacatttcctgcttgggcctgttgcgggctacccaaaggctgtggactggggccgaggtacataggactttggcttgtcttttgagctaacaggatcctgtagaagaaatgagatgagcctgagagggggtcggggggtgagacattagggaagggagaggccaccaagggtctctagcccagaatccaatgccccttcctgcctacctgtccttgtgggtgggaggcagggtgtgtgctgactggcccagcaatggtgggctaggatttgggataggcagagaaaaggaagaggagggggaagtcggcctgggaggagaaacactgtacaaagtcgaggaggagagaaccagagtgtgcttagggaccagacctggccccacctggagcagaggatggtgaggtcagtcagggctggatcgacaagggacctcaaatgccaggctgaggagcttggcctttatcctgagggcactggggagccctgcaaaggttttgagagggaattccattaccagatagatgtctttggaagccgcctctaggtgcaaggaggaggtggagtagagaggttgacctggggtaagggttggagcatgaccaggggagggggaaggaagcagggggtggggatggagggagtggatggatctaagagaatctactgtcctttggaacaaacgatacaggaagtgtaggagagggatggggcaaggcgactttgaagtgtccagctcagagattggaagtttgctgatgcctttgggaggccaaggcaggcagatcacgaggtcaggagttgaagaccagcctggccaatatggtgaaaccccgtctctactaaaaatacaaaaattagccgggcgtggtgcgggtgcctgtagtcccagctacttaggaggctgaggcaggagaattgcttgaacccgggaggcagaggttgcagtgagcccagatcgcaccactgcactccccactccaccccttccccatgcctgggtgacagagcgagactccgtctcaaaaacaaaacaaaaacccaaaaaacaaaaaactaagaagtttgctgatgcctttaatagtaacaaaaggtgtattggatgttcaatatttgagggacctacgggttgttcccagaggagatgtccaagagacagcctggacacctggagctccagggagagggatgggcagcaggggacacccggagttgttggtatgctgggagaaggctgcatgctccgtgggagtagggtggagaatgaggagagacagggccgccgtcctgcaaggagcatccatattgagggggcgaagatagggtgcaccagtgagggagacagaggaggggccgtctggaaggtgggagggaaacagccgcgcaggacggggcgggggcgggcgctgagaagaagccgccttcttcggcaaagaggtagctgaagcctgtggagcctgcagtcctctcaaggctatgggggcagcgcggaggccggattccagaactgaatcttcccatcgctttgggcagccaccctacctcccaggagcatccttcctgccatcccacctccagttccccagctaacaaaaaacggtgtttcttgactcccggcagggcggcggggcgggcaggtcttgtgaacacggctcgcagggttcagcaccctggagagaggcctgtggccggggcggggcctgcggcgggggtaggggcgcgcagtcagagcagtcgggcctttggctccgtctgggagcggtcttgcaggcaggcaattgatggaggagggaaaaacaatcttggattttctccagctctctcccctttatgcacctcccccatcccggcactggcctacaggagcccctatcccagcatttggggctattactctcctgacgacttcaggaaatgagatgggaggagaggggcaactatttactgggaacttttcagacattcccaaaacctcacaaccttttgagcttggaattcgtgaccccatatttcagatgaggaaactaaattgaagttcaggaaggtgaaataccttgcctaggcacttggcagagctgggatttgaattccacctgccgggctctaagtcctgagtgcccattagcccttctgagtcctgaatcttgcagtttgttcctgcagactctccacttctgggtggctgtggagtctggtgtggcagtgggatggggaggagaccttcccttccacctgcttgcttgagtgtattcccaggagatttctgaagatgaggccaccaccattgtttctgaagtgggagggcagaaaggaggctgagggccaggtgagacctcgtcacacctgcacccatgcatgcccaggaggaaccctcctttgaactcttctgactcagcttcttgctgccaggttcctccgaccagtgagcaggttcccaggacatgaaggggagctgtgagggagcaggacgccatggtccagggctgcagcttcctgagcccagagaatgccttcctagctgtcaggaatggagcagcgaggccccagtgataggtgaggtggagaagcaagacatgagttctgggctggctcagctgctttacaaccagcctgggcctcgttccctttgagaaaatggtttgcccagagttcagagatctaaaattctatgatgccttctggggccacagtgggaagcaaagactcctcatattttctttcctgacacttcccaggccacaagacaactgctttctgcagcacccagcctgggcaggccatctacacaagctcagtcatttctgaccttgccccctccaccgtgcacccccatgttcttcaacatgggtcaggtttctattcagcctcagggacttctctgcttgaagcctgttgtgtggcggggaggtattctccccacagctcagagagatggggttgctgtggagggtttgctgtagctcctctaccctggaatataccctcttctgccttaaaagacccagcttggaccctctcttccagaaatgcttgctaaccgcccccccaccacccaaactaggtcaggggtccctctgggcttcacagaccctgtgcttctttctgtcacagcctgcaagtctcccctccccactccccagcccgagtgcttctctgagacaagggatagtgtgagccatgagctcagccactggtaggccaatgaataagtaagttaatggtgaagccaggatccaaatccccatttcctgcctcaaggtgtggagctgtttctcctgcatacaatagtagctctgctgtgacaactctctatctgtcctagggcctaaaatgcctctatttcactaggttatagctttatcctagggagtcctctttggaagcagggtgggggtgcaacaggccttcccccatgcctgtagtctgtgagcagcgaaggccatgtggggcaggctgtggcctaggtctccacagatcctggtagaagtccatgctcacgcatcagctccaagtcccagctaaaccaagccaccaagaggtgggccctgtgacaaggctctgagtccaaaggccatcagtaaagccccctaagtcttccgtggacccagctccaggctgggatgcacgctaggagatgatacacaccgggtgagggagcccagaggagagggcagctagctgtgcatggaggcctgatctctcagacttgagggcacaagcgtgtcccctcatcctgaaggcttctgcgatggggcagcagagggtctgggtctgctgcccctcaagtccccagccccatcctagcccatgaggattgtaaatccctcgtcctctcccctctctcctctgtcagccactcccctttccccctaccccactctctttctatttctgcctctgattttttttccttttctgcctttgttcctctgtgtgtgtgtttctctatgcctctctggtctctttgtacttccatcttgatctcgctaaggctctgatccctctctcctctccctcttcatgtgttactgtcccccttcctgtctctgtttatctctcagtctctctgtctgtgagtcttttttcctctctcccagtcagactctctctctacccctccctctctccctctctccctctctgtctgggcctctctctgttcctcctccctcctccctcccccttctgcattatcagacctgctccaacctcctcccagagccagccgagcagcagaggcagtggcagcgggagaggcgggagcagcggggcagcagagctggattggggtgttgagtccaggctgagtagggggcagcccactgctcttggtccctgtgcctgctgggggtgccctgccctgaactccaggcagcggggacagggcgaggtgccaccttagtctggctggggaggcggacgatgaggagtgatggggcaggcatgcggccactccatcctctgcaggagccagcagtacccggcagcgcgaccggctgagccgtgagtatagtgaggggctggggtggtgagcggctgtgagaggtgccacagacagggtcctgggagtccctccaaggagctggggttggcatggagctgagccacgtggaaggatcgatcctgttcctgggcacccctcctccccgcgttgccagactgcagcctggggtgggggcaggttacctctgagcagaatgagggtgtctaacgtcaacctagtaggtgatgaggctggggtcccatggaaggggctgctggttggaggaggggctgataatgaacctgaaccggttcttcaagggctgagggtgtatgtggggagggggaggtctgccaagtagttgggaggagctctcggggctgcaataggctggttcaggacccggagagggagagtgtcttggcccaccaaggctatgtgtgtgtgaaggaggtggggagggggaaagatggagaaaatatgaataagagtggccctggagcaagagagggttagaggtaaccaccttccatggaattgggaattggggttcagggacaccactttatgaaactttaccccaaagcgtctgtcccaggatagggttctacggagccagatggaatatggtgccagcctcgtgtgtgtccacgtgcaggggggtgcatgtgcaagtgagtggggggcgccgtggcgacacccctctactaagggctgccgaggtggtaggcagggtatgtgtgtgtgtgtgtgtgtgtatacatgtggaatgtaagggacatgttgggtgtagaggggcctgtagagctctagggtccttggtggttggatgtaaagcagc

SEQ ID NO: 5486 - DNA, 6000 bp, Homo sapiens
atccttaattactttctgaaacagtttctgaatagggagactggtcaattatttttctttaatatgattattataataaagctatggacatgtttttgcagtcaagcttcctcagagatgtttataatgattcaatcacaaactaaatctctatgtttcctgctttgttgttgttgttgttagggaattaggggattccctggtatagcagtgtctttgttacatccacttcctatcttacctcttttctgaaatatttcaagttctccctgccagtgcaccaggagtaaaaagtcctatttatattgttcctcactgtgtatgtcattgcttctatcatattctggaacgcttatggtaccatacttagattcaggatggccagcatttccagccattgatgacattattaagaaacagaatgataaactatggctgaatcatttacaatgctaggtgttcctggcaataaatctcttatgacaatgtatctgaggctgggcacgatgtctcacacctgtaatcccagcattttgggaggcccaggcaggtggatcacttgaggtcaggagttcgagaccagccacaccaacatggtgaaacctcatctctactaaaaatacaaattagctgggtgtggtggcacatgcctgtaataccggttacttgggcggctacgtcaggagaatcgcttgaacccgggaggcggaggttgcagttagccgagatcacaccattgcactccagcctgggcaacaagagtgaaactctgtctcaaaaaaaagaaaaaaaagaaaatatatctgatatattccagaaatgaaaactaccctcaatctgtctgtatccgatgtgtttttccctggtatttccttagtaagctgcctggatggaatgcgtaaaacaataacagcattgctttttcacgtaaaagtttgaaatcttcccttcaaatacaaaaatatttttcacagtcttttttattagaaagtcaccactgcagtgaggcgaaaacatacattctgagaagttacagtagaaatgacaatttacaaaacaaactgtgctatgatttgcataatgtgtaaactatactaaaccatggcatgcaacacaaactatttaagctcaaaatgttttaatgtcatcttattcagacccacactttccaagataaaaccatagataagtggctataccctcagtctgaactcatgtgtttcagagaaaagactattacctgttctactaatttccctgtttatcgattctgaacaacacctgcccagaccatgctcactaactttattctaaaaccactttgtctgccttctcccgaccaaaaaacctagcagtacctttccctaaattttccccatgagaactatgggtactctggtaaatgttctgttttcccttgttcagtcaacttaataaactaagttttgtgtggttagcagatccctgatgatcttttcatggaagcttgtgtcattcacacatgatgacattgctttcttcatcatccatcatggtacccacactgtgttctttgctcctagaacttaaatacttggccctagggatatatttgtctcctgttagatgttgaacaggtatctgagaagagataaagactaggtacttattcttgttcaaactcagtatttattggctgactttatatctatctaaggacagtcaaaaccgggtggtagccaaccactttgcttttgagtgatgactctggttctgcagaatctatgaaattgagtcacaaaagacaatgatgtgcttatattctcaatcactagactctggtttttctttttcttatatgatgctaccaatgccagaggctgaaacaaggacaaatgtgcagaggttgcatatcgccacacagctggaaaatggctttgacaagcacacaaagtattcttgctgtggataatttcctttcaacataagtaatatgtgtcctccatcatgacctgtgtgaggttggactacatgattgttaggtctcttcaaacccaagactactttatgttataaaaatttcaaagtaggtaaactttggccttagtcattattcagcccatcttttttccctgctcttctgacattgcttctgtttgctacctttcactagtgttcattgatggttttagtgtattcatgttgtcctcatttacccaagatctttattttaggcctgttgccaagagccaaacttcattctcacacatgtgattttatttcctgtgttagaaccaaaacaatcagaattcagtttttaatagatgaaagttacaactccaaaagaaatttgacttcatcaggaccttcctgaaagaaataatcactgaaccaaaaaatggatgtccatgtatcatttatatagcagttgcctaccttacatatacagtatatcaggttagagctgtgcaatagtattttataatttacattatgagcatggatcaatggtagagtcaacaatcctacctttcaatctgttgcctcacaggcatttgttggacacatttaaaaactagctgacttatattaaacataattgtgtgctaaactatatatttggccttcttatctcattgaattgaatgagataaatctagaaagaaagattttataactcccattttgtaggttttaagaagttaagtaacttactctatatcacatatttggtaaatgttagactttgctctcaagctttcaatttggctgagtaaataacaatattcacggaacagttataaaataacatgaaaacacaaagcaagtcacaaggcactattaattgcacccacgtaatttgggaactctattatcaattttctgaattaaaataaaggaggtattattgtgagatggactgtatttagaaagcttcctaaaagagatggataattacactgggttgtgaaatatgtacaatggcagaatgtttgtcgaagggaggaatttcagagaacacaggaacaatacattattggaaagagaaactagtaggagcactgacagattatcaaattaccgagaaaattttcaatggctagtgaggccttgaatgagggataggggagggagaaatcaaaactaaatagctattagtgttgagggagctgtgaggtggaatttgtggccacactcccctttccctccatgagccacttggtctataaaaagactggcaactaaggtttattcaagcggaattcattggtatccacactaagagttttaaaagccacattgtgacatacagagaatttggatggatggcctgacaacaggcaaacatcaaggaaatttatttgtttattagttggtcagttagtttgtttgtttgaaagttgcctttctctgtcttttgacagataaaaagatgggaacatatataactgagagtaagagaaagaaaaaattaaaattcgcctacaatgtggatgtggtaaatgagaaggaaactgatatgttttaagtacctaatgtgagccagaaactgtactattttttttttttacacattgattcacttaatccccataacaaccataagaagtagatgttacttaaagagggggcactaaaatttaagggattttttttttttttttttttttagttatacttcaagttgaagaaagaatttacagaagtttaatacctggcctaaagtcatatagttaataaaaaataaagtatttaaaccagttctcactgatatcaaagtccattgtctctcattaaatgaatctcatatttaaaaaaaaaaaaccttaataatttactgagatgaagcattcttaggaaatttaataagcaaaatattcagataaaaattagtatttaagtcaagcatttctgtgcaacacatcaacccaataaagtggtttaaaacaacaaattttctttttttttcttttttttttcttgaaatgaggtcttattttgtctcccaggctggagtgcagtggctctattaccagaaaggggtcctgagccagaccccaagagagggttcttggatctcacacactctatgactccatagagtaaagtgaaagcaagtttattaggaaagtaaaggaagagagaggggctactccataggctaggcagcagcataggctgctcagctgcttatacttactgttactttttgacatatgctaaactagcagtggattatttatgagttttccaggaaaggggtgggcaattcccagaactgagggttccacccctttttagaccatacagggtgacttcctcatgttgccatggcatttataaactgttatggtgctagtgggagtgtcttttagcacgctaatgcattataattagcacataatgaggagtgaggacaaccagaggtcacatttgttgccctcgtgattttggctggcttgggctggcttctttacaatatgctgtttcatcagcaaggtctttgtgctctgtaccgtgtgcggacctcctaactcatctgcaactaagaataccttaacctcctgggaacgcagctggcttcagccctattttacccatcccctattcaagatagagtagctttggtttgatcgcctctgacagcatgattttggctcattgcagctttgacttctccccggctcaagtgatcctcctgcctcagccccccaagcagttgggacaataggcacatgccaccacacccagctaatttttgtattcttcttgtgtgtagagatggggtttgccacattgcccaggctggtcttgaactcctgggcacaagctatctgcctgcctcggcctcccaaagtgctggattactcgtgtcagtcacagtgccctgcccaacaacttttaattatctctcatgcttctctatcaattaggtcctcagctgagtcgttctgctatattgcatcagatgtcagctggttctgcagtcatctggaggctctgctggtagaactcccagcacacttcactcaaatggctggctgcagctggtgctagttatggtctgggatctcagatgaggctgctaagccgaatgtgttgttactcctttacatcgtctctccacatggcttgaacttctcacagcatgcctgctggattcgaagagatggcattcaagtgcttaaaaatgtaagcaaatctcttaatattcagtcttagtattacatagggcttctactgccatattctctggttgaaaacaatcattggatcagcccaaactaaaggggtagagaaagaaattccacttctcaaggaaggaatgacaagttttgggccctttttaatcaacatccaagtaagctgcttgtgatgaaagtgaaggtggggaacggaaaaagtgggaaggtaaagatcaaagcaaaatgctccagagtccttaaaaagctaaccgtgtaagcttggattccaagagagagactccagatggagctaggaatagaaagatttcctagtaattgggagcaaggtagatgaacatttacagtttctcctaatttctgtagtcaggcttcaggtacaaacttaggctaatatgttgtctgttaattatatgtatttcttaatcatatattggctgaggagataccttgggagggttgagagggaagataactgagagatggtgatattgctaatactaccgatatacgggacccctctgcaattacatcttttagttaatttcatgtgtatatattcagccattgacagtataatctgtatcctctgtgggtaggagccacagcactgtatttatttcgcattctcaatcacgcctacagattcagttcattcagactgttgtaaaaataaatgcggctcaaaaatgcagctcccccatgtaacctcctaggcaaaaagagacagaataaaatcagccaaccattttttcacaaagattgctgcctagtaatttcagggaataaacttttagttaataccgtaagtgcagag

SEQ ID NO: 5487 - DNA, 6000 bp, Homo sapiens
gttagttgcctttttttttttttttcatctgcttggctttcttcacatctgtggctaagttttctcaccctccctacagctctcaataatgtctctttgtccaattctgcatccttttcagattatcaatcagtttcactgtttcttttgtccttggggatagctgttcctggtgccttctatcttcttgacccaatttggactggtagctctctaggcccagtgcaaaactgtgatactggaacttccttttggcatcctcttgggagttcctctctcctttgctgaattcctggtttcctgaatcccatgtctccttctttctaagtttattccttaattttggtggagcatttctccagtgctttctaagaaagggcacatgggaagtacacattgagcttttatgcatattaaaatgtatttattttactgtttcatttgattgatattttggttaggtatagaattccaagttgggtgtgttttccttcagaagttggaatgctatgctccatttccctctagctagcttatgatgttactactgagtagtagatgtgattccaattgaatgtgattgccttcacccccatttttttttaatctggggaagcttttagaatcttcctattattctcaaatgttctaaaaacttttcagtgatatatcttgacttaggtctgtttgcatttgttgtattgggcattcagtgaattcttcaaatctggaaacaaatgttcttcaattttgagaaattctgttacattattactttgatttttttccttctctctttaatctctttctggattaagatattggaattgctggatggatcctttcattttatttttttcactttgctctttttttttggtcctttggctctactttctgttccctgattattcctttttttttatggcggtctattcctgtctcatagatgcaatatcttttttaaaaatctacttgagaatattgcagaggcttgttaagaagttaaacttctgctatctgcatcatttctcttttccaggcacttagttttcagtttttttcaatttgctaaatctgtcataaagagttaaataaaatcaagttattcttaataaaagtaaggttgtcaggaacaattactccaacaaagaacctcttaagagaaccagtgctgatcagcatgtttcctaggttcattaacagaatagagaagtcattaagccagatattaatgagaagatggtgagaagcttgtctctatttccactgaaaacagagaaggatacaacagccttaggatacaaaatgagtaatattttccacagaggggaatcaaatagagaggatacataggatttggtctgctcagctgttcctttggaaaactgtttccttctccacaatgtcatctacatggttgtatcaggaactaccacaatatatgactttgtccaacactcacttacttaactagtccagggatgggaatctgatccaaaatgactcaatcacagctcttccctaggaaatgtttaaaactgaaaccgagaaaaagagaccagtatgtttctgatcattcaaactctaagataaaagaattgagagcttttaggaaacatgtttcctaccaggtgaacctgagaagcagaggagttctgcagtggaaacctgcacagacacacaagcagatgcacagagaaaagcgatcactgaagaagagagtctcagaggcataagaatcagttgtcctgagcccagtctcatctctgttctagcaatctcagtgtcctcattaaattcctcttttggcttaagctagtttgaattgtcctctgtattgcaattaaaaaaaaaaaactatagctaatatgctcactttatttgatgcttcctgtgaatcaggcaatgtgttaatgctttatatattttatctcattaaatcttcacaacttgtaaggttggtgacattatttttcacataagaaaactttagagatctaactattatataatagacaactctatctagatgttccacaggtgtctaaaacagaaccatttctccatctgtaaaagaggaaaggctagattcactgctggaaatgctcttccctctacacacaccaagccaactccttcttaccttcatgtgtcagcttaagtgtcttcagataagactatcccaccttctcaatctaaagtaggttccgtggtggtaccctgttattttcctaaccaacaattgtaatgacatatttagtattttgttttgttctgttctgtcacatgctatatactatgaactccatgacagtagggaccataccaacattatttgcccttctagccccagcatctagcatacttcctgatatatggaaggtgctccgtaaaatgtgcttgaatacattaaagacttctaaatgtttcctttcatatacctatgaggctatattcagtaactttcaacaactgttcattgagtgactggtatttgtaagtcactgtgctaggcctgtttggacaaagacaaatacagttaattcctcaacaggcctagcacagtgccttgcacataatagtatacagcatagtataaagcccagaaagaggaataattataagtggagaagtgttgtaacagagatacgaacaaagtgctgcagttgcaaagaaggaagtagttaagatgtgatgcaagaagttaaagtcaggaaaagaaatgaatttccagggttcaaattgtcacattctgtataatgtctctattttgatacagctgtactttatatctgcttctaatttataagacctggagtagaagtcctagtaaatatgttctcaagtagagatgcatgaaaaacatatttctcttgaatcttatgatcattgttatcacttgctttatctccacatcactgtaaagacattgggcctcctacctcagcccaaccctcttcaaaagatttcaggcctatactacaagtcaaacttttcttccttccatattgccagatctgctttccctgaagctgagattaggggacaatgacttttgatcccttttaactctcaaaggataatgttcttttaagatgctgtcccacatgttctcattataatgagtggtttatggaaaattaccttggtcctataatttctgtctgatgcctatcttctctcctgctgatctttaaccaggtgatccaccccaacacaggttagggaacattgctctagctatgttccagaatagatttcttcttcttcttcttttttaaaaaaaatctcctttacccctttatttgtcaggaacacttcaaataaaaccttcttttgggatttgcatgtgtatgtatgtgaacaaattgggttcacttaaaggaaaagaaagggggttggcaaactgtcattatcactagttatctagtgaaagcctacagaggatgcaacaggaggaaagatgtagatagtatgtaactgcgtacctttttaatctcagaattttaaatatttaacaccattgccatatagttacatcagtgactgttaatcagacccactcccccccaaaaaaaccctttcctaaagcaaccccactgaatgaaacggacacaaataaaaaggattgtctggtgtactgacttccaagaactatgaagtgaaaaaaaaaagaaagcgattttaaaattaaaataaatattttccttttaaaccaaaagcttgcttcatccattgattcatcgaatattcattggtacccatctgggaggccagctttgcatatttttcgagagctccagctctgaaggcagaaggattctacttctgccatgtacaagcttcctgtccccagacacgttacttacctccgtgccttaatcccttcatctttagcgttaatgtaaatattagaattatctcacaaattgtagtcagaattaaagataatgtatgtatggtgcttaggagtacttgaaactacatcagtacacttagtctttaccttaattttctttcagcaccacggtcaacgtcaaatatctggaaggacattgaaatatcctgaaagtgaaattgtatatgacttaattaaattctatttaagtgtctcctgtaactctaactatagaaacagggagacgaataaccagagtagtcagaacctcagcatgggtaggggacaaatcccgtccttcttcgcattctccaaggtgacttacagaacgctaacgccttgcatacggacaggcgccccaaatttaagttcgccgtcatctttaaaacccccagggagctatgggcccgggtctcggctagctctaaggtcccaccctcgctgatctcaggttacccaaccctcctctcgggttacccaacccggcctcgcagcagtcctcgggtcttcggcccctcccgcccctcgccggcggtgcccgccgagccgggctgtcccactgcgcatgctcctcgccgcgcggttggggagcgccggggcagggaggcgggcaccaggcgcgggtccctccgggcaggggaggtaggcctgggcctgacgccggccacgcagcggcgggagagtgagcactcgggcggcggcgtcctggagacccgcgagagatggaagcggcggcgacgccggcggctgccggggcggcgaggcgcgaggagctaggtcggtgttgtgcgtgggcagggagccggggctgacgtgggcgggggtctgtgcgggagtcgggtgcgcccacacctccaggggccccgcgcttggcctgagttgaggcccgattgctaactgaccccgtggtcagcatccgcaaaggaaccggttatctgaccccgagaacttggtcagacgaagcccaggcctgaatagggcgttaaaatatgtgtgtgtgtgtttgcgcgcgcgcgtgtgggtgagtgtgtgtgttgagtggggcggggccctgtgggtacacgtcaaagacgcaagagcctgcgccgtgactcacggtttttttcccaatgatgctttaaggaagttatcattgttctgcttttcaaatgctgcagccccattcggaatctccagatgaatcctcattttactccttgttatcccagagtttcgaacaggtcgtgctgaccagaatgaacaggagatacctgtagcttgctcacttggcaaagtttgtttgttttttgctgctttcctcccatcttgtttcttggcgacagggcgtgtttgtttacggtttcccgctgtccaaaataaaaaagtaaggatcagggtggtaaaatgatcgctctcccagttatacgtactgtacttgggagtatttttcattcgatgctgattaaatgtaattaaaaaattaaatctaaatggaatcttcaagaaaaccgttgaactttaaaaaataccgtattataagtaactgataggttgttgttattcctctaatagcctgcagggcactttgcaatggaattgttttcaggccgtaataatggtagaaacaataaacttaacattttattgcgtgcttactgtgtgcaaacactgtgctaagtgctttacctatgcattgtctttaatcctcacagcaactgagataggtgctatcatgatttccattttatagatacagtaattttaagcttattaatggcagaacccaaatgtgaactcaggtttcattcattaataacctgtcttagtgaggatatggagaaatgggtattctcatgcattgctggcaggaaagggataatatatttagccttaaaaatgtacatatcggcctggcgcggtggctcacgcctgtaatcccagcactttgggaggctgaggcggccggatcatcacaaggtcaggagatggagaccatcctggctaacacggtgaaaccccgtctctactaaaaacacaaaaaattagccgggcgtggtggcgggcgcctgtagtcccagctactcgggtggctgaggcaggagaatggcgtgaacccggga

SEQ ID NO: 5488 - DNA, 6000 bp, Homo sapiens
atgatgaaatgctctaaaattagatattggtgatagttgtgcaaccctgtgagtatattaacaaacactgaattgtatagttaggagggtgacaaggcatatgcattatacctcaataaagctgttcccaaaaataatgttaacattggaggggggtgggcataatggactctcagtactatttttaaaacctttctgtgcatctaaattattccacatttaaaagtttattctggctgggcgcagtggctcacgcctgtaagcccagcactttgggagtccgaggcggacagatcacgaggtcaggagatcgagaccatcctggctaatatggtgaaaccccgtctctactaaaaatacaaaaaattagccgggcgtggtggtgggcgcctgtagtcccagctacttgagaggcagaggcaggagaatggcatgagcccgggaggcagagcttgtattgagtggagatcatgccactgcactctagcctgggcaacagagtgagactctgtctcaaaaaaaaaaaaaaaaagtgtatttcgctgggtgaggtggctcaggcctgtaatcccagcattttgggaggccgagacaggtggatcacgaggtcaggagattgagaccatcctggctaacacggagaaacccatctctactaaaaatacaaaaaataagccgggtgtggtagcgggcgcctgtagtcccagctacttgggaggctgaggcaggagaatggcatgaacccaggaggcggagcttgcagtgagccgagatcgcaccactgcactccagcctgggcgacagaacgagactccgtctcaaaaaaaaaaaaaaaaaaaaaaagtttattccacaaagagacaccacacccactaaaatggctataatgaaagacagataataagtgttggcaaccatgtggcaacattggaaccctccatactctcctggtggggatgcaaaaaggtgcagtccactttggaaaactgacagttcttcaaaaggttaaacactgtactaccctatgacctaacaattccatgattagtcaaatatacaagagaaatgaaaacctatgtccgtaagttgtatgcaaatgttcccagcagcattgttcaaaatagccaaaagtggaaacaactcaaatgttcataaactgataaatggagaaaaacatgtggtctgtccatacattgaaatattatttggcaataaaaagaaggacagtcctgatacttgctacaacatggacgaaccttgaaaacattctaagcataagacaggtatcaacacacaagtgatatctattaagaaaaaaaaaaagctgggcgcagtggctcacacctgtaatcccagcactttgggaggccgaggcaggctgatcacctgaggtcgggagttcgagaccaggctaaccaacatggagaaaccccgtctctactaaaaatacaaaattagccaggagtggtggtgcatacctgtaatcccagatactagggaggctgaggcaggagaattgcttgaacctgagaggcggaggttgtggtgagctgagattgtgccattgcactccagcctgggtaacaagagcgaaactccatctcaaaaaaaaaaaaaaaaaagttgggtggggtggctcacacctgtaatgccagcacttagagaggctgaggcaggcagatcgcttgagtccaggagttcgagaccaacctgggcaatatggtgaaagcctgtctctaccaaaaatacaaaaattcgccaccaggtgtggtggtacgcacctgtggtcccagctactcaggaggctgaggtgggagaattgcttgagcccaggaggtagaggttgcagtgagctaagatcacaccattgcactccagcctgggcaacaggagtgaaactctatctcaaaaaaaaaaaaaaaaaaaagcagccagatacaaagaacacatattgtatgactccatttatttgaaataccctaggctggatgcagtggttcagacctgtaatcccagtactttgggaggccaaatcaggaggattgtttgagcccaggagttccagatcagtttttttttgttttgttttgttttttttttgatatggagtctcactctgtcacccaggctgaagtgcagtggcgcgatcttggcttatcacaaactccgcctcctgggttcaagtgattctcctgcctcagcctcccaagtagctgggattacaggcgcccactattatacctggctaatttttgtatttttttagtagagacggggtttcaccatgttggccaggctggtctcaaactcctgacctcaggtgatctgcctgcctctgcctccgcctcccaaagtgctgggattacaggtgtgagccactgtgcccagtcccgagatcagtttgggcaacatagtgagaccccatcgctacaaataataaaaaattagccaggtatcgtggcacacgtctgtagtctcaactccttgggaggctgaggtaggaggactgcttgcacccaaaaggtcggggctacagtgagtcatgatcacgctgccactgcactctagcctgggtgacagtgagaccctgtttcctagaaaaaaaaaaaagaaaagtaaaaagaagaaatgccctcaacatgctaaacatgtaaatctatacagtcagaaagcaggttagtagtgtttgcctaaggctggaggatgattgggagaaaatggtgagtctctgctaattcataaggggcttattttgagggcaatgaaaatattctaaaattaggctgggtgcggtggctcatgcctgtaatcccagcactttgggagaccaaggcgggtggaacacctgaggtcaggagttcaagagcagcccggccaacatggtgaaaccccatctctattaaaaacacacacaaaattagccaggcatggtggcgggcacctgtagttctagctactggggaggatgaggcaggagaactgcttgaacccgggaggtggaggttgcagtgagtggagatggcgccactacacttcagcctagtcaatagaaggagactccgtctcaaaaacaaaatataaaaaaaagaaaatgaatcttttaaaaccaccagatgggccgggcatggtggcttatgcctgtaatcccggcactttggaaggccgagggggacggatctcctcaggtcaggactttgagaccagtctggccaacatggtgaaaccctgtctctactaaaaatacaaaacttagctgggcgtggtggcagctactcgggaggctgaggcaggagaattgcttgaacctgggaggcagaggttgcagtgagctgagatcacgccattgcactccagcttgggtgacaagagtgaaactctatcttaaaaacaaacaaacaaacaaaatctccaccagatgcttgggccgggcgtgtggctcatgcctgtaatcccaacactttgggaggctgaggctggcagatcaccataggtcaggagttcaagactagcctggccaacatggtgaaaccccatctctactaaaaatacaaaaaaaaaaaaaaaaaaaaaaagaaagccgggcgcggtggctcatgcctgtaatcctggcactttgggaggccagggggatggatcacctgaggtcaggagtttgagaccagcctggtcaacatgttgaagccatctcactaaaaatacaaaacttagctgggcgtggtgacatgtacctgtaatcccagctactcgggaggctgaggcaggagaattgcttgaacctgggaggcagaggttgcagtgtgctgagatcacgccattgcactgcagcttgggtgacaatagtgaaactctgtctcaaaaacaaaaaacaaaaaacaaaaactccaccagatgcttgggccgggtgcagtggctcatgcctgtaatgccagcactttgggaggctgaggtgggcggatcaccttaggttcgagaccagcctggctgacaaggtgaaacctcgtctctactaaaaacaaaagttagctgggtgtggtggcatgcacctgtaatcccagctactcaggaggctgaggcaggagaatcgtttgaacccgggaggcggaggttgcagtgagctgagatcttgcgactgccctctagcctgggcaacagagtgagactccgtctcaaaacaaacaaacaaaaagtaaatagctggcattacaaccattcttcttacctttttgtaggttgcaggttttatatttgagctcttcataatatttttcttaaggatatattaatataatgtatattttcctattttttcctgctatgtaaacactgctgtttggtcagatgaaggagggagccctgccctaggacaggggaggggaggaggaaggcgacctcaacccaggacccctgttcaccctgggatcaggccctcacccaggtagctcctctgtttgaaagctctaagcccttccactgtcctcttcagggctaccccgccacacagcctctccttgtcttgtcttccctttggcggggtcacacccgcacctgggtcactgcccccttcctctggtcgagggttggggggagtgtcccctcctccctcggccggagtcacagttccacacgcaggggtccttcctgcccctctcacctggggtcacaacccccctccctcggaggagggaggtcaccggccacaggcgggggcctcagtttcccacgctacagggctcacacgtgtctggcctgcgacgcgctctcccttcgccggggtcccagtttcccgcccaggaaacctcggtccctcctccgaggccgccgggccctcctccagagtcccgccagtcccccagagtccaggccagtccccgccgtcacccggtgcgagcccgcgagaggcctagtgcagctggcagccccgccccggcacccgcctgctcttctcgcgggtccggaccgcgagcgcgggggccgacgggtcgccgctgcgccgggccgggatggcggccaccgcgctgctggaggccggcctggcgcgggtgctcttctacccgacgctgctctacaccctgttccgcgggaaggtgccgggtcgggcgcaccgggactggtaccaccgcatcgaccccaccgtgctgctgggcgcgctgccgttgcggagcttgacgcgccaggtgagccgggccggggagcccgggcccctgccccgtccccgccgctccgtccctgtcgggccgctggggtctccaccgtctttgctgagccacctctttgcctcggcagctggtacaggacgagaacgtgcgcggggtgatcaccatgaacgaggagtacgagacgaggttcctgtgcaactcttcacaggtgagggaccgggccgaggggcaggctcgggggcccgctccccctcgcccaccgccctgagcctgggacggctagagaagtgtgggggaggtcaccatgcaccggagccaggtgtctcaagctgctttgcctccggtctgtgcctctaaatggcacctggaggtaggctagaagctgtgaaaggcgtttatttaaaagttcaagttgggccgggcgcggggactcacgcctgtaatcccagcactttgggaggcgggaggaggaggcgggcagatcacttgagcccaggagttcctgaccagcctgggcaacatggcgaggcccccgtccctacaaaaatacaaaaagtagccgggagtggtggcgtgcgcctgtactcccagctacttgggaggctaaggcaggagaatcactttagcccgggaggtggaggttgcagtgagccgacatctcgccattgcattccagcccagccttgggcgacaggagtgaaacaatgtctcaaaaaaaaaaaaaaaaaaagtggaagttgacaaagcctgatttctcctttgtgaacaaatgtaatgtattcttatttcggtaaccaaaatcagaaactaaaattgaaaggcaactttcccatgccttcctgat

SEQ ID NO: 5489 - DNA, 6000 bp, Homo sapiens
ggcaaagaaggtctgggttcaggggagtgcgtggggccccagagcctgccatgtctccgccaactctctccctcactggaggagggctctgtgccttggtgccccacctgcccagggccctgtggctcagccccttgcttgctctgtgagggggacgggagaaggatgagagtcccagtgatagggggaggacaagaccaggggagagggctgggggtttctggagggccagagcaggaagagcaggagagaagagaggacaccacagtgcaggaaacggaggagcaaaggctgggagtggggaggctggaggggtgcagggaatcagactggggcgctgcgaagaggcctgaggccagagcaggcagtgcctggatggagggagcgagcagctcctcaccctcagctccttgatgaggtaaggtgaccacgagccctgctccaggctgtgtgctgagcactttgctcggagcctgtcactctggaggaggggagggggtgttcccaggagctatgacagtcttgtgcaagggagggacagggtcacatttatgtttaacaaagcactgcgctgggagagaggagctgagagaccccggccctggggagcatggtggctgggaccccggagggcaggcgtgccccagacggaccccactcagaagattgcttatcccaaccccccaaagagaaaggctatttttaggaacaataaaagtgctcacacattcctgcaggggcagagagagggaaagggggcaggagtcagtgcagaggaagagggtggaccccgctcttctcccaactctgccttggtcttcagggacttctcctcaggggcttccccagccagccctgcctctccagcctccgcctgtccctggggttccctaccggctcttatgtctatccctctgcttctgaattggtacttgttctgtccctgtctctctttctcatacttccactttccccctccccctggggtttggggaacagctgggatgggccaagctctgttgagagagccaaatacagtcataggacaaagcagcgggaggctgtgggatacacacatgccgcagagcacagacagagagaggtggccaggcacagagagagcgcccagggaggctgagaggcagggagaaaacacgctgggacagtcagggagagccccagggcaggcatcaccgggcagccagcctctgtgccctgctctctatcttgtccctaagaagaccagcatggctgggcttgcctcccgccatccaccccaccagccctaccccaggctggcccttcctccccgccctctgcaggcccacactaaccctaggccaggccgcctccttcagcatttacctcccacacacaatgggcacagtgaggacataagagacccagtctctggcctggaggcagatactcagccttacccgacatctgagagggctcagcccatcccctggccaaggcaggtattagaggggccccaaagacaagcaggactctgggacaaggtgtcctagtgtggcccaaagggctgggctgaagcatgggtctcctggctccagatgagagcctgggtgaatccttccctgcctcctctggccttagtctaccccatcaagcttgggattggactacatgaggcctgaggccctgtagcccctggtccctgggaattctcagaaggcctgggagggggacaggtgaccacgcaggaaggcttcctggaggaggtgtcctcactcatgaaagaaggtgatagtgacagtgctcctcttggggaagagccctccatcctgacctgctgcccccacccggtctgcacgtggagatgatcctgaagcacaaagggcctcccggcctgcagaggtgcctgggagaggttgccaaaggctctcagtaggagacaccccattcctcaggctccttctctgagactgtaactgtgccagactggggaggctttgagaggtctcagctatctcccctgcctagatccttcctccacacccctcttctccctgatggcatgtagccctcacagtacagtagtcctgggcacacaggagtttacccagtcatttacagctcagcaaacgcctaccaacacctatgaggggctgggtaatgctggagacctggagaggggcaggacacaatctctgccctccaaaagctcccagtctgttgtgggagccagacgggaaagggtggcactgcattgatgcacacagtgcatgccatggtgggggaaaggggggcagtgggagccccaggtgggagggtcagacttgcctggagagagaacaacaacagactctccctggaggggatccagagaagggagatcactccattcattcattcgtcattcatccatccacccattcaattattcctttggccatcatttcctgagggatgtaaactctcttctgacactgacccagcgggacactcagcgtcctcctcctctcctgcttgagccaccatgcctgcctcttggaggctcctggacttgctttgctcagctcccaacccaccctgagggggtgaggctgaggagggtgtacagacattcagggtcaccaaactcagagctggaggcctgccacctcaccaggggcctttctcagggcacaggctccctggtggcagggccttggcccttgcttgcacacccttggggactaggagccccctcatccatcctgctcaggctctcttttgtggcgcgactctgattcacagtgtgcccaaatctgcctccttgtgactgccgcgagctgcctcgtgggccccaggccagaggacaaggatagctagaatgccaggtgaccaggatgactgtgatggcatggagagggggatgctgtgatgtgtttgggaggaagtttgtggtgtccaggagaatgtgggcagcagaaatgggaccactctcggttcttccctgtagatgaagcagctgaaggtgggagggggtgggaggagacctgagctggctctgccccgcttgatctgatgtctgccttgcagggccatcctccccctccccacactcagctcctgcctccctccctctacccactctgactgttccctcctttcctgactccagactctgggtgagggactgaggtgattccagtgagtcaggccctcagggaactgatcgtgcaggcaactcttgcctgccttctcctgctctttccctcttcccattccttcatccacccccaaacctagctcctgatggatccaagggtgcgggggacaaccgggaggtcattttggaggaggcaggagctggaatagaagctgggactggcttgggaagggcgagaggccggggcggagctggttgtgggcgctggaagggaggagccaacagtgtggggtcaggctcctgtggatggggacacccttgggaggcactgggactggctcaggtgtattctacagtgcacgtgtctccagtgtggctcggaggctggagacgcggccctgttggagtaacaactgaagccggagtctgcgaagggtgggcaggagggtggagggatgggggcatggagcgggagggggtaagtagaggagggaggggaggaagagaaagagggaggaggaaaggtctctggcaggtccctcctttaagactgggctcctgcgctgcgagtggccccgtccatactgccttgttatccatatctccccaccactagtctccctctgtccttccacccccagcctctcccctccattgggaccttccctggggcgtcccctcattggctgttctcacctgagcaaggcccctcccctccagtccttagcctcttcacctgtacaatgggatgacccaaacaggcacctcttgggcttgtaggaggatccaagatagtgtcagtgggtctcgaggtgtggtcccccgaccagcagcatcagtgtcatctaggaatgtttggaaacgcaagttcttggacctcgtcccagacctactgtatcagaaaccctgggggtggggccagcaatctgcactttaacaagcactctgggtggttctggtgcacatgaaaattggggaacggctggtggaaacctctagccacaggaggtgcttgggaaaggtaccttcccctccccaaagcctgatgcctcactcaagcatgacactgacagttgggctagttcagctgcgttctgggtctctgtcttgcctcctccttcagactaagcctcccaagggttgccaagcctctttcctctattctcctcaccctgatccagctcagcctcattgagagaagtctggggctgcaagatcttcgcactcacaggcagttcctctttgcacatccaaggcaccagtgtctttgagaggcgtctccttggccaggtggcaggcgtgggtgtgtggggaggaaggaggaggaaccgccttgttctgctttcttgtctctgactctgcaggctgggggtgctgtaaggctgcgaggaggcatagagtcagcttgggtgctgggctgaggccaggggccgaggctcagctgaagcgggcttctctggtctgagcctacaggatgcctcctttggggcagttctgccagtcaccctgactgggcggctgtgcttgctagtgccagacccatgctaggcacagaggtcgatacgttctcctgtgctcttgaagggccctgtcctctgggaagataagaggctgtgtatattgcccaccggaacaggaggcaggaagcaaaagaggcgtagatgacacttgcctggcaccccctgtttcccctctagctgccttcctgggtttcccattctgtgggcgcttctcttgagttaggtgctttctcccagtgttctcaaggtgactatttggaggtttgtgggaggagtgggctggagacacaggagtaggtgggggcaggaagtatgcaggagagagatggagagtgggaggagaagctatgagaggaagagaggacgcggaggtgggaaaagacgtcaagactcctggagaggaacaggagtgcagcctgggacagaggtggacgtcggccgggggaggcagggaggaaggcagggaggtccacccgaaaggaagggaagggatgatggacagagaatgagagggctccgaggtcctgggggatctagaaggacccttccctttacagaaggggacaccaaggcccagagagagaggagggcctcacagaggacctaacacaagcagagttgcatgaatcagtgtgaacggacagtcccaagagcacagccggaccttgggaggtacttgactcttgagtttgatgttattgccttcctgtaggccagtgtgaggggcactgtgaggcttccttccagagaaggaggcatggagccagtgccaggcagtggggtgagccataggaggacctgtggagatggggaaaggcatagagactcatgaagatgaaacaggaaagatcttatggcagcgaccccaaccctcaggaagggcgttggtcttgtgcttgtggctccaaaggggataagaccaaggtctctggtttcatagaatcttaggctttaagaacgagttagaagtaatttagtccagaccctctcctctccccagataagtgcagaaatgcagatctagcccacggctgagccccaaccctggcttcagaggaggcctgactcagaacaggctcccctttcttggtacctggggtgaatgaaagctaagtccgtggtaatggtgctgtctgtggtgctgactggccttaccttggactacagagctgcaggtggagctggagagagcagaaaggctccatctatccatctacccacccacccagccacccatctacctatccacccaccatccacccacccatccatccaccatccctcccccaacccatcctgcacccattcatctatccacctacccactcatccatccagcctcattgaattaaaccatagaac

SEQ ID NO: 5490 - DNA, 6000 bp, Homo sapiens
cgggtgagtgctgggaccgctgatgaggacccttcctgaggaggcgatgctgggtcttagccttaaagaacaactgagagttttccaggtggaggagaaaaggaagggtattccaggcaaaaatccccgtaagagcaaaggtgtgagcagcaagaaatcaagggtggcaggttcatggctcctgggctggaggaagggcctggcggtggagaggaagggagtgaaggcccagctcacaaagggaagcagaggaaagtttaagcagggtcaggccatggttagctttggggttaggaagctccaaatgatgggtgaagtaggggggctagacccaggtgagaggcagtattgcggttggccaaggacatgtgagttgcataaatgggccagaggaggggtgacagccgctacttcccggctcacctgcctgagctaaggccctagttcctcagtgtctgcccaccaatgcaggtgtgtggcagctctagaccctcctctagggacatccctccctgcctcatgctgcctgtggctttcactctctggagcactcatccatggcacccataagccaccccctcagacaatggcccctaaagcaaaactgtgtcaccgttgcatatctcttgataacactctgacccctccactgccaaatctgataaaagaactccctttgaagaccttcctcctggagtcggatctcagtccttcttgctgtccagagcctgggccttgggcctccctgggaggcgagtcagtgagggcagcccccttatggtgctgggagttgagggaccttggcccagccaactcatccctgttgtgtcagcctctctgggcctgggcagccaactcattttcagtgctaattagcatctcccctgcagctttctgccccactctaagtgcttgacaatcattaggtgttactgtgtgcaactggatcccagctccggcacctccctgccccagcttctcctccagaccccagctgcctgagataagggacctggccacaaacatacaacacaccgaaacccggacacaatctaggcatagggacttgaacaccaacataaatatacaaagaggaaaaacccaataacacagaagaactccccataccaggaagcagaccatagcacagacagagacccacagtacacacacaacacagacaccaacagatgctgaaaagcagacacaggatcattccaaaaagtgacccagaaacgaaaacagaacaaatgggaacatcaatgcacatgacacaggtatacacatctagatatgcaacacaggtacgattcagcacatgtgtggcgcatcgcagggaagcacttgcacttgaagtatacacagatgccaagatagtcagagggagccgcctgtggttccccacctgtgcagcgtctctcgcctctgggctgccgcacatgctgttgcccggaattcccttccccaaggccctcctctttttacctggctaattcctgtcattcttcagatcttctaggaagacttctgcctccttgataggggcctttccatactccccagccttggagtgcttcctgccacatggcatcactgactgttttccaatgagtttctgtcaagttttgggatgaaggattttgcctgtgctcgttgaggtggtgactgtgggtgtgagtgggtgattagggccaaaaaacccccccaaaaaactggacagaggcaaatttggggggaaatgagttaggaatagctgtgaggagccccagctactcagggcctcagaagatatttatttctgtatttatttatttattgagacagagtcttgctctgtcacccaggctggagggcagtggcgctatcctggcccactgcaacctccacctcccaggttcaggcgattctccttcctcagcctcccgagtagctgggattacaggtgcgcaccaccatgcctggctaatttttctatttttagcagagacggggtttcaccatgttggccaggctggtcttcaacttctgagctcaggtgatcctcctgcctcggcctcccaaagtgctgagattacaggtgtgagccactgcacctgacctcagaagacattgaaacccacagagaggacacagccagatgccctctgcctcattttctcagaccctgcctgatttctcttatgtttcttctaggcttgctccctgacccagttccctccttcccagagctggccttgccccttgccacctctcggagctcacacatactcactcaccttctctgcttggctgtgccctacccctacttctacgtgcagtgaaatccttgttattcaaggcctgaggtcagtgggcacatcatccatgcctggcgtcctaacccgtgccactgagtatcgtgaagggaggtagtggagggacgtgcttgggagcacaagccttgaggactgtctcttggttcagatctctgctcctctacttcttagctgcaggattgtgcaagttctgccacctttgttccctcatctgtagaaaggagaggataatagagcccacctcattagggcagccatgaggattaaatgagacacagtgtgtaatgtacctggctccctctccaggttgcgtgagagcagggagaaagctaatgagatcaaggatgtgcaaatgcactcagaaggtgcctagtgagtccttgctaactggcacttagtgaaacaaacacctcctgtgtgagcacctaatatgtgcctctgtagtgggctctgtgacccgcccctccttagtttctgcatggctgccagttctgcacagctgttactgctgtgggggcttagaaggtgggggtatgactactttttctgaatttatttttaattttttacatctgttttatggaggcataatttacatacagtaaaatcaccaatttaaagtgtataatgagttttgataaatatatatggtcataaccaccatgacaattaagaaaagaatatttttatcctggcaaacttcccttgtgccctttgtagtcagtccctttgagggggacttcttataggagtgtgagaagtactgggttttccttgggctgcaaacctgggcacatggagtgggggtgcctccaacatgctggaagttgccagggaactgctgaccctctctgggccttggttcctggcagaggcagtgcagccaggcaggggaagggatgcttaggccttggtctcctgagggcaagccttggatgtgagggttggatcggctggaagtggtggcttcagaaacccatagagtgggtgacagggtagggacttggtgtttccacaaacccgcccctcctttgaccaggtgtgccctgtggtcctggtggaaatggctatatattgtccagactgtagcaggggctggccaagatggtccactcctctccccatcctcctccaaccagaggccataaaccccactctatagattaacaattccctgaaaagaagggggtcacttttgttccccagttctagaactaaatattaaagcaattatgtaactagcaataaattacttaaagtagtgactcactcagcttaattagagcgcaagcagggagggattaaggtatttttagagcacacacctcactctctcctgtgggggaggcctctgtgcaaggtgggggtggaaaaaaggctgggaactcatgggagcaccccaggtgtctgcaaggagatgaaagctgatcctccgccccactgaggtcctaaggaagaaaggccgagtcagagctgcagcaggagggattcggatcagactcaagaacacttcccagtggtgcttatttgagaactgggacggcaacactagattgtaaactctgtgagggcagggattaggtctgtgactgcctcctcacccagcgggagaccaagaatgagacttgggagtcagacacaactgggtgtgactcctgcctttgcgggttgccagcacgtgggcttgggcaggttcctttatcaccagaagctttgccgtctcctccactataaagtgggcacaataacatccacctgcatgcatattataaggattgagtgggttaaaatgtgcaaagcaagactttgtgctcagctgggcacagcggctcacacctgtaatcccagtactttgggaggctgagacagagtgcttcagcccagtagttttgagaccagcctgggaaacatagggagaccctgtctcttaaaagaaaaaaaaaattagaagactcggtgctgactctgctagaccaaaagcccacaaaggcagggattaggtttggtttgtgttgttcattgttgtatctcaagcttcattcataggactgcacaaagtaggtgttcagtaaatgctttgttgtgtgactgcgtgttaattttgttcccattctcctgctccaaaaaaaagttcattttcctgaggttgtgagtgaagaaaataggcagtgtgggctgggtgtggtgtctcatgcctgtaatccccagcactttgggaagctgaggcgggaggatcacttgaggccaggagttcaagaccagcctgggtaacttagcgagatcccatctctacttcaaaaaaatttaaaacagaaaaaatctagggtgtgtgggggggcaggtggggaggttgcaggggtgcctcacaggtgggagtctggcatttctcctccaggctgaggaggtggtgacttccagggaaagtcctgggagggatcagaaccacagctccagcctgcttggatgagggtggtcttctggctgccaggagggtagctaggtgggaagatctgcccttgtttcctccataacctggggtgggaggaggaggagctcccagcccaatctgatgggggagaccagaaccctcacccaccattgctggcagttcagagaaggcagcgataagtcggggtggggcatcctgaaaggcttcccagaggattggatgggaggattagctgagaagacatccggcatccgtaaaatggagtaatgattctgaccctgcaggttttctgggaggattaaatgagttacattttaaagatgcctggtacatgcctgccaggagaaggcacaacatatgaactccctccctcttccctccacccctcctcagctcctgtgacatcaggagggacatgccctgccctgctcacagaggctgggtgggaggctcccatcatggccttcactgaggctgcctctgcagttggaccaagctggacacacagtaggtgcacataacagatgggggcaggtctgtgcttgttttaccagggtgttgggaggctgagggaagggcacagctggattggggtgatggagttcaatccctgctcctcccccagatccaagatcctaagacgcctatgtccagtggctgctctgatcagctctgaccagctctcctcacacctcataggccttccagggttcaggtgatgaattagtgatgacagcatccagcatcgctatgacaaccacatggcactcttagcctccagtcagggctcagccgcagaggccagagacccctttggctctgggcctttgtactggcgtgtgtgagcggggctggggcctgagggagatggaggagtgggaggggcaggggccggggcatggggctgcatctggcatggactggagttcattcagattgttccatccagagggaccttggggacagttgtttctctccttccttccccctttcttttcattcctccatccctcctctttcccctcctcccacttcttctgagccttgttcctgtttgaggccctgggctgccaacccttttcccctcctctgggaataaagccaggctcagccctcaccccggggagctgagtgaggtgggggacagccaccttctggtctaggcctcagggaaggtgtgtggggaccactgatggcttggtgagagggcctgacccagctgggccaggggctgtg

SEQ ID NO: 5491 - DNA, 6000 bp, Homo sapiens; identical to SEQ ID NO: 558
